(19) United States
(12) Patent Application Publication
(10) Pub. No.: US 2007/0010469 A1
(43) Pub. Date: Jan. 11, 2007

(54) Gene products differentially expressed in cancerous cells III

(76) Inventors: Vivien W. Chan, Emeryville, CA (US); Jaime Escobedo, Emeryville, CA (US); Pablo Dominguez Garcia, Emeryville, CA (US); Rhonda Hansen, Emeryville, CA (US); Joerg Kaufmann, Emeryville, CA (US); Giulia C. Kennedy, Emeryville, CA (US); George Lamson, Emeryville, CA (US); Edward J. Moler, Emeryville, CA (US); Filippo Randazzo, Emeryville, CA (US); Christoph Reinhard, Emeryville, CA (US); Julie Sudduth-Klinger, Emeryville, CA (US)

Correspondence Address: Chiron Corporation;Intellectual Property - R440, P.O. Box 8097, Emeryville, CA, 94662-8097, US

(21) Appl. No.: 10/948,737

(22) Filed: Sep. 22, 2004

Related U.S. Application Data
(63) Continuation-in-part of application No. 10/616,900, filed on Jul. 9, 2003.
Application No. 10/616,900 is a continuation of application No. 09/872,850, filed on Jun. 1, 2001, now abandoned.
(63) Continuation-in-part of application No. 10/081,519, filed on Feb. 21, 2002, now abandoned.
(63) Continuation-in-part of application No. 10/310,673, filed on Dec. 4, 2002.
(63) Continuation-in-part of application No. 10/501,187.
(63) Continuation-in-part of application No. 10/081,124, filed on Feb. 21, 2002.
(63) Continuation-in-part of application No. PCT/US04/15421, filed on May 13, 2004.
(60) Provisional application No. 60/208,871, filed on Jun. 2, 2000.
(60) Provisional application No. 60/270,959, filed on Feb. 21, 2001.
(60) Provisional application No. 60/336,613, filed on Dec. 4, 2001.
(60) Provisional application No. 60/345,637, filed on Jan. 8, 2002.
(60) Provisional application No. 60/270,855, filed on Feb. 21, 2001.
(60) Provisional application No. 60/475,872, filed on Jun. 3, 2003.

(51) Int. Cl. A61K 48/00; A61K 39/395; C12Q 1/68

(52) U.S. Cl. 514/44; 435/6; 424/155.1

(57) ABSTRACT

The present invention provides polynucleotides, as well as polypeptides encoded thereby, that are differentially expressed in cancer cells. These polynucleotides are useful in a variety of diagnostic and therapeutic methods. The present invention further provides methods of reducing growth of cancer cells. These methods are useful for treating cancer.

### SEQUENCE LISTING AND TABLES

[0001] A Sequence Listing is provided as part of this specification on triplicate compact discs, filed concurrently herewith, which compact discs named “Copy 1”, “Copy 2”, and “CRF” each of which compact discs contain the following file: “SEQLIST.TXT”, created Sep. 7, 2004, of 8693 kilobytes, which is incorporated herein by reference in its entirety.

[0002] The present application also incorporates by reference Tables 6, 15, 16, 31, 33, 34, and 35 contained on duplicate compact discs filed concurrently herewith, which compact discs are labeled “Atty Docket 2300-21987 Tables Copy 1” and “Atty Docket 2300-21987 Tables Copy 2”. The details of these Tables are further described later in this disclosure. These compact discs were created on Sep. 7th, 2004. The sizes of the Tables are as follows: Table 6: 70 kilobytes; Table 15: 254 kilobytes; Table 16: 407 kilobytes; Table 31: 603 kilobytes; Table 33: 379 kilobytes; Table 34: 985 kilobytes; and Table 35: 518 kilobytes.

LENGTHY TABLES FILED ON CD
The patent application contains a lengthy table section. A copy of the table is available in electronic form from the USPTO web site (http://seqdata.uspto.gov/?pageRequest=docDetail&DocID=US20070010469A1) An electronic copy of the table will also be available from the USPTO upon request and payment of the fee set forth in 37 CFR 1.19(b)(3).

### FIELD OF THE INVENTION

[0003] The present invention relates to polynucleotides of human origin in substantially isolated form and gene products that are differentially expressed in cancer cells, and uses thereof.

### BACKGROUND OF THE INVENTION

[0004] Cancer, like many diseases, is not the result of a single, well-defined cause, but rather can be viewed as several diseases, each caused by different aberrations in informational pathways, that ultimately result in apparently similar pathologic phenotypes. Identification of polynucleotides that correspond to genes that are differentially expressed in cancerous, pre-cancerous, or low metastatic potential cells relative to normal cells of the same tissue type, provides the basis for diagnostic tools, facilitates drug discovery by providing for targets for candidate agents, and further serves to identify therapeutic targets for cancer therapies that are more tailored for the type of cancer to be treated.

[0005] Identification of differentially expressed gene products also furthers the understanding of the progression and nature of complex diseases such as cancer, and is key to identifying the genetic factors that are responsible for the phenotypes associated with development of, for example, the metastatic phenotype. Identification of gene products that are differentially expressed at various stages, and in various types of cancers, can both provide for early diagnostic tests, and further serve as therapeutic targets. Additionally, the product of a differentially expressed gene can be the basis for screening assays to identify chemotherapeutic agents that modulate its activity (e.g. its expression, biological activity, and the like).

[0006] Early disease diagnosis is of central importance to halting disease progression, and reducing morbidity. Analysis of a patient's tumor to identify the gene products that are differentially expressed, and administration of therapeutic agent(s) designed to modulate the activity of those differentially expressed gene products, provides the basis for more specific, rational cancer therapy that may result in diminished adverse side effects relative to conventional therapies. Furthermore, confirmation that a tumor poses less risk to the patient (e.g., that the tumor is benign) can avoid unnecessary therapies. In short, identification of genes and the encoded gene products that are differentially expressed in cancerous cells can provide the basis of therapeutics, diagnostics, prognostics, therametrics, and the like.

[0007] For example, breast cancer is a leading cause of death among women. One of the priorities in breast cancer research is the discovery of new biochemical markers that can be used for diagnosis, prognosis and monitoring of breast cancer. The prognostic usefulness of these markers depends on the ability of the marker to distinguish between patients with breast cancer who require aggressive therapeutic treatment and patients who should be monitored.

[0008] While the pathogenesis of breast cancer is unclear, transformation of non-tumorigenic breast epithelium to a malignant phenotype may be the result of genetic factors, especially in women under 30 (Miki, et al., Science, 266: 66-71, 1994).

[0009] However, it is likely that other, non-genetic factors are also significant in the etiology of the disease. Regardless of its origin, breast cancer morbidity increases significantly if a lesion is not detected early in its progression. Thus, considerable effort has focused on the elucidation of early cellular events surrounding transformation in breast tissue. Such effort has led to the identification of several potential breast cancer markers.

[0010] Thus, the identification of new markers associated with cancer, for example, breast cancer, and the identification of genes involved in transforming cells into the cancerous phenotype, remains a significant goal in the management of this disease. In exemplary aspects, the invention described herein provides cancer diagnostics, prognostics, therametrics, and therapeutics based upon polynucleotides and/or their encoded gene products.

### SUMMARY OF THE INVENTION

[0011] The present invention provides methods and compositions useful in detection of cancerous cells, identification of agents that modulate the phenotype of cancerous cells, and identification of therapeutic targets for chemotherapy of cancerous cells. Cancerous prostate cells are of particular interest in each of these aspects of the invention. More specifically, the invention provides polynucleotides, as well as polypeptides encoded thereby, that are differentially expressed in prostate cancer cells. Also provided are antibodies that specifically bind the encoded polypeptides. These polynucleotides, polypeptides and antibodies are thus useful in a variety of diagnostic, therapeutic, and drug discovery methods. In some embodiments, a polynucleotide that is differentially expressed in prostate cancer cells can be used in diagnostic assays to detect prostate cancer cells. In other embodiments, a polynucleotide that is differentially expressed in prostate cancer cells, and/or a polypeptide encoded thereby, is itself a target for therapeutic intervention.

[0012] Accordingly, in one aspect the invention provides a method for detecting a cancerous prostate cell. In general, the method involves contacting a test sample obtained from a cell that is suspected of being a prostate cancer cell with a probe for detecting a gene product differentially expressed in prostate cancer. Many embodiments of the invention involve a gene identifiable or comprising a sequence selected from the group consisting of SEQ ID NOS: 1-3996, contacting the probe and the gene product for a time sufficient for binding of the probe to the gene product; and comparing a level of binding of the probe to the sample with a level of probe binding to a control sample obtained from a control prostate cell of known cancerous state. A modulated (i.e. increased or decreased) level of binding of the probe in the test prostate cell sample relative to the level of binding in a control sample is indicative of the cancerous state of the test prostate cell. In certain embodiments, the level of binding of the probe in the test cell sample, usually in relation to at least one control gene, is similar to binding of the probe to a cancerous cell sample. In certain other embodiments, the level of binding of the probe in the test cell sample, usually in relation to at least one control gene, is different, i.e. opposite, to binding of the probe to a non-cancerous cell sample. In specific embodiments, the probe is a polynucleotide probe and the gene product is nucleic acid. In other specific embodiments, the gene product is a polypeptide. In further embodiments, the gene product or the probe is immobilized on an array.

[0013] In another aspect, the invention provides a method for assessing the cancerous phenotype (e.g., metastasis, metatstatic potential, aberrant cellular proliferation, and the like) of a prostate cell comprising detecting expression of a gene product in a test prostate cell sample, wherein the gene comprises a sequence selected from the group consisting of SEQ ID NOS: 1-13996; and comparing a level of expression of the gene product in the test prostate cell sample with a level of expression of the gene in a control cell sample. Comparison of the level of expression of the gene in the test cell sample relative to the level of expression in the control cell sample is indicative of the cancerous phenotype of the test cell sample. In specific embodiments, detection of gene expression is by detecting a level of an RNA transcript in the test cell sample. In other specific embodiments detection of expression of the gene is by detecting a level of a polypeptide in a test sample.

[0014] In another aspect, the invention provides a method for suppressing or inhibiting a cancerous phenotype of a cancerous cell, the method comprising introducing into a mammalian cell an expression modulatory agent (e.g. an antisense molecule, small molecule, antibody, neutralizing antibody, inhibitory RNA molecule, etc.) to inhibition of expression of a gene identified by a sequence selected from the group consisting of SEQ ID NOS: 1-13996. Inhibition of expression of the gene inhibits development of a cancerous phenotype in the cell. In specific embodiments, the cancerous phenotype is metastasis, aberrant cellular proliferation relative to a normal cell, or loss of contact inhibition of cell growth. In the context of this invention “expression” of a gene is intended to encompass the expression of an activity of a gene product, and, as such, inhibiting expression of a gene includes inhibiting the activity of a product of the gene.

[0015] In another aspect, the invention provides a method for assessing the tumor burden of a subject, the method comprising detecting a level of a differentially expressed gene product in a test sample from a subject suspected of or having a tumor, the differentially expressed gene product comprising a sequence selected from the group consisting of SEQ ID NOS: 1 -13996. Detection of the level of the gene product in the test sample is indicative of the tumor burden in the subject.

[0016] In another aspect, the invention provides a method for identifying a gene product as a target for a cancer therapeutic, the method comprising contacting a cancerous cell expressing a candidate gene product with an anti-cancer agent, wherein the candidate gene product corresponds to a sequence selected from the group consisting of SEQ ID NOS: 1-13996; and analyzing the effect of the anti-cancer agent upon a biological activity of the candidate gene product and/or upon a.cancerous phenotype of the cancerous cell. Modulation of the biological activity of the candidate gene product and modulation of the cancerous phenotype of the cancerous cell indicates the candidate gene product is a target for a cancer therapeutic. In specific embodiments, the cancerous cell is a cancerous prostate cell. In other specific embodiments, the inhibitor is an antisense oligonucleotide. In further embodiments, the cancerous phenotype is aberrant cellular proliferation relative to a normal cell, or colony formation due to loss of contact inhibition of cell growth.

[0017] In another aspect, the invention provides a method for identifying agents that modulate (i.e. increase or decrease) the biological activity of a gene product differentially expressed in a cancerous cell, the method comprising contacting a candidate agent with a differentially expressed gene product, the differentially expressed gene product corresponding to a sequence selected from the group consisting of SEQ ID NOS: 1-13996; and detecting a modulation in a biological activity of the gene product relative to a level of biological activity of the gene product in the absence of the candidate agent. In specific embodiments, the detecting is by identifying an increase or decrease in expression of the differentially expressed gene product. In other specific embodiments, the gene product is mRNA or cDNA prepared from the mRNA gene product. In further embodiments, the gene product is a polypeptide.

[0018] In another aspect, the invention provides a method of inhibiting growth of a tumor cell by modulating expression of a gene product, where the gene product is encoded by a gene identified by a sequence selected from the group consisting of: SEQ ID NOS:1-13996.

[0019] The invention provides a method of determining the cancerous state of a cell, comprising detecting a level of a product of a gene in a test cell wherein said gene is defined by a sequence selected from a group consisting of SEQ ID NOS: -1-3996 wherein the cancerous state of the test cell is indicated by detection of said level and comparison to a control level of said gene product. In certain embodiments of this method, the gene product is a nucleic acid or a polypeptide. In certain embodiments of this method, the gene product is immobilized on an array. In one embodiment of this method, the control level is a level of said gene product associated with a control cell of known cancerous state. In other embodiments of this method, the known cancerous state is a non-cancerous state. In another embodiment of this method, the level differs from the control level by at least two fold, indicating the test cell is not of the same cancerous state as that indicated by the control level.

### BRIEF DESCRIPTION OF THE FIGURES

[0020] FIG. 1 is a schematic showing the alignment of the sequences (represented by single lines) that resulted in the assembly of the contig (represented by the bars in the lower portion of the figure).

[0021] FIGS. 2-17 are graphs showing the expression profiles of the genes of Group 1.

[0022] FIGS. 18-21 are graphs showing the expression profiles of the genes of Group 2. In addition to the figures described above, the application also includes Tables 10-12, as well as a Sequence Listing.

[0023] FIG. 22 is a table showing the expression of condroitin 4-O sulfotransferase 2 (C4S-2) in cancer versus normal cells, as determined by microarray analysis.

[0024] FIG. 23 is a bar graph showing C4S-2 mRNA expression in laser capture microdissected tissues, as determined by quantitative PCR analysis.

[0025] FIG. 24 is a bar graph showing C4S-2 mRNA expression in tissue samples.

[0026] FIG. 25 is a bar graph showing C4S-2 mRNA expression in prostate cell lines.

[0027] FIG. 26 is a table of antisense polynucleotides, directed against C4S-2.

[0028] FIG. 27 is a table of inhibitory RNA polynucleotides, directed against C4S-2.

[0029] FIG. 28 is two line graphs showing the effect of C4S-2 antisense molecules on growth of PC3 cells.

[0030] FIG. 29 is a line graph showing the effect of C4S-2 antisense molecules on growth of MDA PCa 2b cells.

[0031] FIG. 30 is a bar graph showing the effects of C4S-2 antisense molecules on PC3 growth in soft-agar.

[0032] FIG. 31 is two line graphs showing the effects of C4S-2 antisense molecules on growth of MDA PCa 2b cells growth in soft-agar.

[0033] FIGS. 32A-D show the effects of C4S-2 antisense molecules on MDA PCa 2b spheroids. FIGS. 32A-C are photographs of spheroids. FIGS. 32D is a bar graph showing LDH ratios.

[0034] FIG. 33A-C show the effects of C4S-2 antisense molecules on MRC9 cells. FIG. 33A is a graph of cytotoxicity. FIG. 33B is a graph showing relative mRNA expression of C4S-2 in cell lines. FIG. 33C is a panel of photographs of MRC9 cells.

[0035] FIG. 34 is a three dimensional bar graph showing effects of C4S-2 antisense molecules on 184B5 cell cytotoxicity.

[0036] FIG. 35 is a composite of graphs showing effects of C4S-2 antisense molecules on 184B5 and MRC9 cell proliferation.

[0037] FIG. 36 is a table of genes that are co-regulated with C4S-2.

[0038] FIG. 37 is a sequence alignment of mouse C4S-2 (top) and human C4S-2 (bottom).

[0039] FIG. 38 is three panels of autoradiographs showing expression of GAK polypeptide in different cell lines.

[0040] FIG. 39 is a graph of a hydropathy plot and a table showing the hydrophobic regions of DKFZp566I 33.

[0041] FIG. 40 is six panels of photographs of MDA-231 cells exposed to C1 80-7, C180-8 and positive control antisense (AS) and control (RC) oligonucleotides.

[0042] FIG. 41 is an alignment of spot ID 22793 and spot ID 26883.

[0043] FIG. 42 is a figure of three sequence alignments showing the mapping of each of three sequences onto VMP1 (DKFZ).

### DETAILED DESCRIPTION OF THE INVENTION

[0044] The present invention provides polynucleotides, as well as polypeptides encoded thereby, that are differentially expressed in cancer cells. Methods are provided in which these polynucleotides and polypeptides are used for detecting and reducing the growth of cancer cells. Also provided are methods in which the polynucleotides and polypeptides of the invention are used in a variety of diagnostic and therapeutic applications for cancer. The invention finds use in the prevention, treatment, detection or research into any cancer, including prostrate, pancreas, colon, brain, lung, breast, bone, skin cancers. For example, the invention finds use in the prevention, treatment, detection of or research into endocrine system cancers, such as cancers of the thyroid, pituitary, and adrenal glands and the pancreatic islets; gastrointestinal cancers, such as cancer of the anus, colon, esophagus, gallbladder, stomach, liver, and rectum; genitourinary cancers such as cancer of the penis, prostate and testes; gynecological cancers, such as cancer of the ovaries, cervix, endometrium, uterus, fallopian tubes, vagina, and vulva; head and neck cancers, such as hypopharyngeal, laryngeal, oropharyngeal cancers, lip, mouth and oral cancers, cancer of the salivary gland, cancer of the digestive tract and sinus cancer; leukemia; lymphomas including Hodgkin's and non-Hodgkin's lymphoma; metastatic cancer; myelomas; sarcomas; skin cancer; urinary tract cancers including bladder, kidney and urethral cancers; and pediatric cancers, such as pediatric brain tumors, leukemia, lymphomas, sarcomas, liver cancer and neuroblastoma and retinoblastoma.

[0045] Before the present invention is described, it is to be understood that this invention is not limited to particular embodiments described, as such may, of course, vary. It is also to be understood that the terminology used herein is for the purpose of describing particular embodiments only, and is not intended to be limiting.

[0046] Unless defined otherwise, all technical and scientific terms used herein have the same meaning as commonly understood by one of ordinary skill in the art to which this invention belongs. Although any methods and materials similar or equivalent to those described herein can be used in the practice or testing of the present invention, the preferred methods and materials are now described. All publications and patent applications mentioned herein are incorporated herein by reference to disclose and describe the methods and/or materials in connection with which the publications are cited.

[0047] It must be noted that as used herein and in the appended claims, the singular forms “a”, “and”, and “the” include plural referents unless the context clearly dictates otherwise. Thus, for example, reference to “a polynucleotide” includes a plurality of such polynucleotides and reference to “the cancer cell” includes reference to one or more cells and equivalents thereof known to those skilled in the art, and so forth.

[0048] The publications and applications discussed herein are provided solely for their disclosure prior to the filing date of the present application. Nothing herein is to be construed as an admission that the present invention is not entitled to antedate such publication by virtue of prior invention. Further, the dates of publication provided may be different from the actual publication dates which may need to be independently confirmed.

[0049] Definitions

[0050] The terms “polynucleotide” and “nucleic acid”, used interchangeably herein, refer to polymeric forms of nucleotides of any length, either ribonucleotides or deoxynucleotides. Thus, these terms include, but are not limited to, single-, double-, or multi-stranded DNA or RNA, genomic DNA, cDNA, DNA-RNA hybrids, or a polymer comprising purine and pyrimidine bases or other natural, chemically or biochemically modified, non-natural, or derivatized nucleotide bases. These terms further include, but are not limited to, mRNA or cDNA that comprise intronic sequences (see, e.g., Niwa et al. (1999) Cell 99(7):691-702). The backbone of the polynucleotide can comprise sugars and phosphate groups (as may typically be found in RNA or DNA), or modified or substituted sugar or phosphate groups. Alternatively, the backbone of the polynucleotide can comprise a polymer of synthetic subunits such as phosphoramidites and thus can be an oligodeoxynucleoside phosphoramidate or a mixed phosphoramidate-phosphodiester oligomer. Peyrottes et al. (1996) Nucl. Acids Res. 24:1841-1848; Chaturvedi et al. (1996) Nucl. Acids Res. 24:2318-2323. A polynucleotide may comprise modified nucleotides, such as methylated nucleotides and nucleotide analogs, uracyl, other sugars, and linking groups such as fluororibose and thioate, and nucleotide branches. The sequence of nucleotides may be interrupted by non-nucleotide components. A polynucleotide may be further modified after polymerization, such as by conjugation with a labeling component. Other types of modifications included in this definition are caps, substitution of one or more of the naturally occurring nucleotides with an analog, and introduction of means for attaching the polynucleotide to proteins, metal ions, labeling components, other polynucleotides, or a solid support. The term “polynucleotide” also encompasses peptidic nucleic acids (Pooga et al Curr Cancer Drug Targets. (2001) 1:231 -9).

[0051] A “gene product” is a biopolymeric product that is -expressed or produced by a gene. A gene product may be, for example, an unspliced RNA, an mRNA, a splice variant mRNA, a polypeptide, a post-translationally modified polypeptide, a splice variant polypeptide etc. Also encompassed by this term is biopolymeric products that are made using an RNA gene product as a template (i.e. cDNA of the RNA). A gene product may be made enzymatically, recombinantly, chemically, or within a cell to which the gene is native. In many embodiments, if the gene product is proteinaceous, it exhibits a biological activity. In many embodiments, if the gene product is a nucleic acid, it can be translated into a proteinaceous gene product that exhibits a biological activity.

[0052] A composition (e.g. a polynucleotide, polypeptide, antibody, or host cell) that is “isolated” or “in substantially isolated form” refers to a composition that is in an environment different from that in which the composition naturally occurs. For example, a polynucleotide that is in substantially isolated form is outside of the host cell in which the polynucleotide naturally occurs, and could be a purified fragment of DNA, could be part of a heterologous vector, or could be contained within a host cell that is not a host cell from which the polynucleotide naturally occurs. The term “isolatedA” does not refer to a genomic or cDNA library, whole cell total protein or mRNA preparation, genomic DNA preparation, or an isolated human chromosome. A composition which is in substantially isolated form is usually substantially purified.

[0053] As used herein, the term “substantially purified” refers to a compound (e.g., a polynucleotide, a polypeptide or an antibody, etc.,) that is removed from its natural environment and is usually at least 60% free, preferably 75% free, and most preferably 90% free from other components with which it is naturally associated. Thus, for example, a composition containing A is “substantially free of” B when at least 85% by weight of the total A+B in the composition is A. Preferably, A comprises at least about 90% by weight of the total of A+B in the composition, more preferably at least about 95% or even 99% by weight. In the case of polynucleotides, “A” and “B” may be two different genes positioned on different chromosomes or adjacently on the same chromosome, or two isolated cDNA species, for example.

[0054] The terms “polypeptide” and “protein”, interchangeably used herein, refer to a polymeric form of amino acids of any length, which can include coded and non-coded amino acids, chemically or biochemically modified or derivatized amino acids, and polypeptides having modified peptide backbones. The term includes fusion proteins, including, but not limited to, fusion proteins with a heterologous amino acid sequence, fusions with heterologous and homologous leader sequences, with or without N-terminal methionine residues; immunologically tagged proteins; and the like.

[0055] “Heterologous” refers to materials that are derived from different sources (e.g., from different genes, different species, etc.).

[0056] As used herein, the terms “a gene that is differentially expressed in a cancer cell,” and “a polynucleotide that is differentially expressed in a cancer cell” are used interchangeably herein, and generally refer to a polynucleotide that represents or corresponds to a gene that is differentially expressed in a cancerous cell when compared with a cell of the same cell type that is not cancerous, e.g., mRNA is found at levels at least about 25%, at least about 50% to about 75%, at least about 90%, at least about 1.5-fold, at least about 2-fold, at least about 5-fold, at least about 10-fold, or at least about 50-fold or more, different (e.g., higher or lower). The comparison can be made in tissue, for example, if one is using in situ hybridization or another assay method that allows some degree of discrimination among cell types in the tissue. The comparison may also or alternatively be made between cells removed from their tissue source.

[0057] “Differentially expressed polynucleotide” as used herein refers to a nucleic acid molecule (RNA or DNA) comprising a sequence that represents a differentially expressed gene, e.g., the differentially expressed polynucleotide comprises a sequence (e.g., an open reading frame encoding a gene product; a non-coding sequence) that uniquely identifies a differentially expressed gene so that detection of the differentially expressed polynucleotide in a sample is correlated with the presence of a differentially expressed gene in a sample. “Differentially expressed polynucleotidesz” is also meant to encompass fragments of the disclosed polynucleotides, e.g., fragments retaining biological activity, as well as nucleic acids homologous, substantially similar, or substantially identical (e.g., having about 90% sequence identity) to the disclosed polynucleotides.

[0058] “Corresponds to” or “represents” when used in the context of, for example, a polynucleotide or sequence that “corresponds to” or “represents” a gene means that at least a portion of a sequence of the polynucleotide is present in the gene or in the nucleic acid gene product (e.g., mRNA or cDNA). A subject nucleic acid may also be “identified” by a polynucleotide if the polynucleotide corresponds to or represents the gene. Genes identified by a polynucleotide may have all or a portion of the identifying sequence wholly present within an exon of a genomic sequence of the gene, or different portions of the sequence of the polynucleotide may be present in different exons (e.g., such that the contiguous polynucleotide sequence is present in an mRNA, either pre- or post-splicing, that is an expression product of the gene). In some embodiments, the polynucleotide may represent or correspond to a gene that is modified in a cancerous cell relative to a normal cell. The gene in the cancerous cell may contain a deletion, insertion, substitution, or translocation relative to the polynucleotide and may have altered regulatory sequences, or may encode a splice variant gene product, for example. The gene in the cancerous cell may be modified by insertion of an endogenous retrovirus, a transposable element, or other naturally occurring or non-naturally occurring nucleic acid. In most cases, a polynucleotide corresponds to or represents a gene if the sequence of the polynucleotide is most identical to the sequence of a gene or its product (e.g. mRNA or CDNA) as compared to other genes or their products. In most embodiments, the most identical gene is determined using a sequence comparison of a polynucleotide to a database of polynucleotides (e.g. GenBank) using the BLAST program at default settings For example, if the most similar gene in the human genome to an exemplary polynucleotide is the protein kinase C gene, the exemplary polynucleotide corresponds to protein kinase C. In most cases, the sequence of a fragment of an exemplary polynucleotide is at least 95%, 96%, 97%, 98%, 99% or up to 100% identical to a sequence of at least 15, 20, 25, 30, 35, 40, 45, or 50 contiguous nucleotides of a corresponding gene or its product (mRNA or cDNA), when nucleotides that are “N” represent G, A, T or C.

[0059] An “identifying sequence” is a minimal fragment of a sequence of contiguous nucleotides that uniquely identifies or defines a polynucleotide sequence or its complement. In many embodiments, a fragment of a polynucleotide uniquely identifies or defines a polynucleotide sequence or its complement. In some embodiments, the entire contiguous sequence of a gene, cDNA, EST, or other provided sequence is an identifying sequence.

[0060] “Diagnosis” as used herein generally includes determination of a subject's susceptibility to a disease or disorder, determination as to whether a subject is presently affected by a disease or disorder, prognosis of a subject affected by a disease or disorder (e.g., identification of pre-metastatic or metastatic cancerous states, stages of cancer, or responsiveness of cancer to therapy), and use of therametrics (e.g., monitoring a subject's condition to provide information as to the effect or efficacy of therapy).

[0061] As used herein, the term “a polypeptide associated with cancer” refers to a polypeptide encoded by a polynucleotide that is differentially expressed in a cancer cell.

[0062] The term “biological sample” encompasses a variety of sample types obtained from an organism and can be used in a diagnostic or monitoring assay. The term encompasses blood and other liquid samples of biological origin, solid tissue samples, such as a biopsy specimen or tissue cultures or-cells derived therefrom and the progeny thereof. The term encompasses samples that have been manipulated in any way after their procurement, such as by treatment with reagents, solubilization, or enrichment for certain components. The term encompasses a clinical sample, and also includes cells in cell culture, cell supernatants, cell lysates, serum, plasma, biological fluids, and tissue samples.

[0063] The terms “treatment”, “treating”, “treat” and the like are used herein to generally refer to obtaining a desired pharmacologic and/or physiologic effect. The effect may be prophylactic in terms of completely or partially preventing a disease or symptom thereof and/or may be therapeutic in terms of a partial or complete stabilization or cure for a disease and/or adverse effect attributable to the disease. “Treatment” as used herein covers any treatment of a disease in a mammal, particularly a human, and includes: (a) preventing the disease or symptom from occurring in a subject which may be predisposed to the disease or symptom but has not yet been diagnosed as having it; (b) inhibiting the disease symptom, i.e., arresting its development; or (c) relieving the disease symptom, i.e., causing regression of the disease or symptom.

[0064] The terms “individual,” “subject,” “host,” and “patient,” used interchangeably herein and refer to any mammalian subject for whom diagnosis, treatment, or therapy is desired, particularly humans. Other subjects may include cattle, dogs, cats, guinea pigs, rabbits, rats, mice, horses, and the like.

[0065] A “host cell”, as used herein, refers to a microorganism or a eukaryotic cell or cell line cultured as a unicellular entity which can be, or has been, used as a recipient for a recombinant vector or other transfer polynucleotides, and include the progeny of the original cell which has been transfected. It is understood that the progeny of a single cell may not necessarily be completely identical in morphology or in genomic or total DNA complement as the original parent, due to natural, accidental,; or deliberate mutation.

[0066] The terms “cancer”, “neoplasm”, “tumor”, and “carcinoma”, are used interchangeably herein to refer to cells which exhibit relatively autonomous growth, so that they exhibit an aberrant growth phenotype characterized by a significant loss of control of cell proliferation. In general, cells of interest for detection or treatment in the present application include precancerous (e.g., benign), malignant, pre-metastatic, metastatic, and non-metastatic cells. Detection of cancerous cells is of particular interest.

[0067] The term “normal” as used in the context of “normal cell,” is meant to refer to a cell of an untransformed phenotype or exhibiting a morphology of a non-transformed cell of the tissue type being examined.

[0068] “Cancerous phenotype” generally refers to any of a variety of biological phenomena that are characteristic of a cancerous cell, which phenomena can vary with the type of cancer. The cancerous phenotype is generally identified by abnormalities in, for example, cell growth or proliferation (e.g., uncontrolled growth or proliferation), regulation of the cell cycle, cell mobility, cell-cell interaction, or metastasis, etc.

[0069] “Therapeutic target” generally refers to a gene or gene product that, upon modulation of its activity (e.g., by modulation of expression, biological activity, and the like), can provide for modulation of the cancerous phenotype.

[0070] As used throughout, “modulation” is meant to refer to an increase or a decrease in the indicated phenomenon (e.g., modulation of a biological activity refers to an increase in a biological activity or a decrease in a biological activity).

[0071] As used herein a “Group I type tumor” is a tumor comprising cells that, relative to a non-cancer cell of the same tissue type, exhibit increased expression of a gene product encoded by at least one or more of the following genes: IGF2, TTK, MAPKAPK2, MARCKS, BBS2, CETN2 CGI-148 protein, FGFR4, FHL3, FLJ22066, KIP2, MGC:29604, NQO2, and OGG1.

[0072] As used herein a “Group II type tumor” is a tumor comprising cells that, relative to a non-cancer cell of the same tissue type, exhibit increased expression of a gene product encoded by at least one or more of the following genes: IFITM (1-8U; 1-8D; 9-27), ITAK, and BIRC3/H-IAP 1.

[0073] As used herein a “Group I+II type tumor” is a tumor comprising cells that, relative to a non-cancer cell of the same tissue type, exhibit increased expression of 1) a gene product encoded by at least one or more of the following genes: IGF2, TTK, MAPKAPK2, MARCKS, BBS2, CETN2 CGI-148 protein, FGFR4, FHL3, FLJ22066, KIP2, MGC:29604, NQO2, and OGGI; and a gene product encoded by at least one or more of the following genes 2) IFITM (1-8U; 1-8D; 9-27), ITAK, and BIRC3/H-IAP1.

[0074] By “chondroitin 4-O sulfotransferase” is meant any polypeptide composition that exhibits chondroitin 4-O sulfotransferase activity. Examples of chondroitin 4-0 sulfotransferases include chondroitin 4-O sulfotransferase-1, -2, -3, defined by NCBI accession numbers AAF81691, AAF81692, and AAM5548 1, respectively. Assays for determining whether a polypeptide has chondroitin 4-O sulfotransferase activity are described in Burkart & Wong (Anal Biochem 274:131-137 (1999)), and further described below. Variants of chondroitin 4-O sulfotransferase include enzymes that retain chondroitin 4-O sulfotransferase activity, i.e. a sulfotransferase activity that is specific for chondroitin over other substrates. Variants of chondroitin 4-O sulfotransferase-1, -2, -3 that retain biological activity may be produced by substituting amino acids that are in equivalent positions between two chondroitin 4-O sulfotransferases, such as chondroitin 4-O sulfotransferase-1 and chondroitin 4-O sulfotransferase-2. A chondroitin 4-O sulfotransferase activity of interest is chondroitin 4-O sulfotransferase 2, (C4S-2).

[0075] By “chondroitin 4-O sulfotransferase 2” is meant a polypeptide that has chondroitin 4-O sulfotransferase activity and has significant sequence identity to the chondroitin 4-O sulfotransferase 2 of humans (NCBI accession number NP_{—}061111) or mouse (NCBI accession number NP_{—}067503). The alignment between these two polypeptides (mouse C4S-2 at the top and human C4S-2 at the bottom) is shown in FIG. 37 (from Hiraoaka at al-JBC 2000 275: 20188-96). Conserved sequences that are active sites, important for binding phosphate and phosphosulphate groups, are underlined in this figure. Variants of chondroitin 4-O sulfotransferase 2 that have chondroitin 4-O sulfotransferase 2 activity include the human and mice chondroitin 4-O sulfotransferase 2 polypeptides, and, for example, polypeptides that contain substitutions of amino acids at equivalent positions from e.g. the mouse to the human polypeptidies. Amino acids at positions 4, 16, 17, 28 and 29 are examples of such amino acids. Chondroitin 4-O sulfotransferase 2 has specificity for certain substrates with respect to other chondroitin 4-O sulfotransferases.

[0076] With regard to chondroitin 4-O sulfotransferases, further references of interest include Hiraoaka at al JBC 2000 275: 20188-96, Ricciardelli et al. Cancer Res. May 15, 1999; 59(10):2324-8, Ricciardelli et al. Clin Cancer Res. June 1997;3(6):983-92, Iida et al. Semin Cancer Biol. June 1996;7(3):155-62, Yamori et al. J Cell Biochem. April 1988; 36(4):405-16, Denholm et al. Eur J Pharmacol. Mar. 30, 2001; 416(3):213-21 and Bowman and Bertozzi Chem Biol. January 1999;6(1):R9-R22.

[0077] A “chondroitin 4-O sulfotransferase-related disorder” is a disorder that is associated with the abnormal expression (i.e. increased or decreased expression) of a chondroitin 4-O sulfotransferase or variant thereof. In certain embodiments, the “chondroitin 4-O sulfotransferase-related disorder” is a “chondroitin 4-O sulfotransferase-2-related disorder” associated with the abnormal expression of chondroitin 4-O sulfotransferase-2 or a variant thereof. These disorders are usually related to cancer, in particular cancers of the breast, colon, lung, brain, skin etc. In certain embodiments, the disorder relates to prostate cancer.

[0078] By “cyclin G associated kinase”, or “GAK” is meant any polypeptide composition that exhibits cyclin G associated kinase activity. Examples of cyclin G associated kinase include the polypeptide defined by NCBI accession number XM_{—}003450, NM_{—}005255, NP_{—}005246 and NM_{—}031030. Assays for determnimng whether a polypeptide has cyclin G associated kinase activity are described in Ausubel et al., eds., 1998, Current Protocols in Molecular Biology, John Wiley & Sons, NY. Variants of the human cyclin G associated kinase that retain biological activity may be produced by, inter alia, substituting amino acids that are in equivalent positions between two cyclin G associated kinases, such as the cyclin G associated kinases from rat and humans.

[0079] With regard to cyclin G associated kinases, further references of interest include: Kanaoka et al, FEBS Lett. Jan. 27, 1997;402(l):73-80; Kimura et al, Genomics. Sep. 1, 1997;44(2):179-87; Greener et al, J Biol Chem. Jan. 14, 2000;275(2):1365-70; and Korolchuk et al, Traffic. June 2002;3(6):428-39.

[0080] “DKFZP5661133” and “DKFZ” are used interchangeably herein to refer to a polypeptide composition that exhibits DKFZP5661133 activity. Assays for determining whether a polypeptide has DKFZP5661133 activity (i.e. for determining whether DKFZP5661133 may have intracytoplasmatic vacuole promoting activity) are described in Dusetti et al, (Biochem Biophys Res Commun. Jan. 18, 2002;290(2):641-9). Variants of the DKFZP5661133 that retain biological activity may be produced by, inter alia, substituting amino acids that are in equivalent positions between two DKFZP5661133, such as the DKFZp5661133 from rat and humans. DKFZ is also known as VMP1, or vacuole membrane protein 1.

[0081] Alternatively, “DKFZP566133”, or “DKFZ” refers to an amino acid sequence defined by NCBI accession number NP_{—}112200, AAH09758, NM_{—}138839, and NM_{—}030938, polynucleotides encoding the amino acid sequences set forth in these accession numbers (SEQ ID NO:3017and SEQ ID NO: 3018, respectively).

[0082] In addition, “DKFZP1133”, or “DKFZ” refers to the polynucleotide sequences represented by Spot ID NOS 22793, 26883 and 27450 (SEQ ID NOS: 2779-2780 and SEQ ID NOS: 2781-2782 and SEQ ID NOS: 2964-2965, respectively). FIG. 41 shows an alignment between Spot ID NOS: 22793, 26883 and VMP1 (NM_{—}030938) (i.e. DKFZ), identifying a VMP1 or DKFZ gene product as corresponding to these spot IDs. FIG. 42 depicts fragments of Spot ID NOS 22793, 26883, 27450 which align with VMP1 (SEQ ID NOS 3019, 3020, and 3021 respectively). These fragments, or their encoded products, may also be used as a DKFZ identifying sequence.

[0083] Ploynucleotide Compositions

[0084] The present invention provides isolated polynucleotides that contain nucleic acids that are differentially expressed in cancer cells. The polynucleotides, as well as any polypeptides encoded thereby, find use in a variety of therapeutic and diagnostic methods.

[0085] The scope of the invention with respect to compositions containing the isolated polynucleotides useful in the methods described herein includes, but is not necessarily limited to, polynucleotides having (i.e., comprising) a sequence set forth in any one of the polynucleotide sequences provided herein, or fragment thereof; polynucleotides obtained from the biological materials described herein or other biological sources (particularly human sources) by hybridization under stringent conditions (particularly conditions of high stringency); genes corresponding to the provided polynucleotides; cDNAs corresponding to the provided polynucleotides; variants of the provided polynucleotides and their corresponding genes, particularly those variants that retain a biological activity of the encoded gene product (e.g., a biological activity ascribed to a gene product corresponding to the provided polynucleotides as a result of the assignment of the gene product to a protein family(ies) and/or identification of a functional domain present in the gene product). Other nucleic acid compositions contemplated by and within the scope of the present invention will be readily apparent to one of ordinary skill in the art when provided with the disclosure here. “Polynucleotide” and “nucleic acid” as used herein with reference to nucleic acids of the composition is not intended to be limiting as to the length or structure of the nucleic acid unless specifically indicated.

[0086] The invention features polynucleotides that represent genes that are expressed in human tissue, specifically polynucleotides that are differentially expressed in tissues containing cancerous cells. Nucleic acid compositions described herein of particular interest are at least about 15 bp in length, at least about 30 bp in length, at least about 50 bp in length, at least about 100 bp, at least about 200 bp in length, at least about 300 bp in length, at least about 500 bp in length, at least about 800 bp in length, at least about 1 kb in length, at least about 2.0 kb in length, at least about 3.0 kb in length, at least about 5 kb in length, at least about 10 kb in length, at least about 50kb in length and are usually less than about 200 kb in length. These polynucleotides (or polynucleotide fragments) have uses that include, but are not limited to, diagnostic probes and primers as starting materials for probes and primers, as discussed herein.

[0087] The subject polynucleotides usually comprise a sequence set forth in any one of the polynucleotide sequences provided herein, for example, in the sequence listing, incorporated by reference in a table (e.g. by an NCBI accession number), a cDNA deposited at the A.T.C.C., or a fragment or variant thereof. A “fragment” or “portion” of a polynucleotide is a contiguous sequence of residues at least about 10 nt to about 12 nt, 15 nt, 16 nt, 18 nt or 20 nt in length, usually at least about 22 nt, 24 nt, 25 nt, 30 nt, 40 nt, 50 nt, 60nt, 70 nt, 80 nt, 90 nt, 100 nt to at least about 150 nt, 200 nt, 250 nt, 300 nt, 350 nt, 400 nt, 500 nt, 800 nt or up to about 1000 nt, 1500 or 2000 nt in length. In some embodiments, a fragment of a polynucleotide is the coding sequence of a polynucleotide. A fragment of a polynucleotide may start at position 1 (i.e. the first nucleotide) of a nucleotide sequence provided herein, or may start at about position 10, 20, 30, 50, 75, 100, 150, 200, 250, 300, 350, 400, 450, 500, 600, 700, 800, 900, 1000, 1500 or 2000, or an ATG translational initiation codon of a nucleotide sequence provided herein. In this context “about” includes the particularly recited value or a value larger or smaller by several (5, 4, 3, 2, or 1) nucleotides. The described polynucleotides and fragments thereof find use as hybridization probes, PCR primers, BLAST probes, or as an identifying sequence, for example.

[0088] The subject nucleic acids may be variants or degenerate variants of a sequence provided herein. In general, a variants of a polynucleotide provided herein have a fragment of sequence identity that is greater than at least about 65%, greater than at least about 70%, greater than at least about 75%, greater than at least about 80%, greater than at least about 85%, or greater than at least about 90%, 95%, 96%, 97%, 98%, 99% or more (i.e. 100%) as compared to an identically sized fragment of a provided sequence. as determined by the Smith-Waterman homology search algorithm as implemented in MPSRCH program (Oxford Molecular). For the purposes of this invention, a preferred method of calculating percent identity is the Smith-Waterman algorithm. Global DNA sequence identity should be greater than 65% as determined by the Smith-Waterman homology search algorithm as implemented in MPSRCH program (Oxford Molecular) using an gap search with the following search parameters: gap open penalty, 12; and gap extension penalty, 1.

[0089] The subject nucleic acid compositions include full-length cDNAs or mRNAs that encompass an identifying sequence of contiguous nucleotides from any one of the polynucleotide sequences provided herein.

[0090] As discussed above, the polynucleotides useful in the methods described herein also include polynucleotide variants having sequence similarity or sequence identity. Nucleic acids having sequence similarity are detected by hybridization under low stringency conditions, for example, at 50° C. and 10×SSC (0.9 M saline/0.09 M sodium citrate) and remain bound when subjected to washing at 55° C. in 1×SSC. Sequence identity can be determined by hybridization under high stringency conditions, for example, at 50° C. or higher and 0.1×SSC (9 mM saline/0.9 mM sodium citrate). Hybridization methods and conditions are well known in the art, see, e.g., U.S. Pat. No. 5,707,829. Nucleic acids that are substantially identical to the provided polynucleotide sequences, e.g. allelic variants, genetically altered versions of the gene, etc., bind to the provided polynucleotide sequences under stringent hybridization conditions. By using probes, particularly labeled probes of DNA sequences, one can isolate homologous or related genes. The source of homologous genes can be any species, e.g. primate species, particularly human; rodents, such as rats and mice; canines, felines, bovines, ovines, equines, yeast, nematodes, etc.

[0091] In one embodiment, hybridization is performed using a fragment of at least 15 contiguous nucleotides (nt) of at least one of the polynucleotide sequences provided herein. That is, when at least 15 contiguous nt of one of the disclosed polynucleotide sequences is used as a probe, the probe will preferentially hybridize with a nucleic acid comprising the complementary sequence, allowing the identification and retrieval of the nucleic acids that uniquely hybridize to the selected probe. Probes from more than one polynucleotide sequence provided herein can hybridize with the same nucleic acid if the cDNA from which they were derived corresponds to one mRNA.

[0092] Polynucleotides contemplated for use in the invention also include those having a sequence of naturally occurring variants of the nucleotide sequences (e.g., degenerate variants (e.g., sequences that encode the same polypeptides but, due to the degenerate nature of the genetic code, different in nucleotide sequence), allelic variants, etc.). Variants of the polynucleotides contemplated by the invention are identified by hybridization of putative variants with nucleotide sequences disclosed herein, preferably by hybridization under stringent conditions. For example, by using appropriate wash conditions, variants of the polynucleotides described herein can be identified where the allelic variant exhibits at most about 25-30% base pair (bp) mismatches relative to the selected polynucleotide probe. In general, allelic variants contain 15-25% bp mismatches, and can contain as little as even 5-15%, or 2-5%, or 1-2% bp mismatches, as well as a single bp mismatch.

[0093] The invention also encompasses homologs corresponding to any one of the polynucleotide sequences provided herein, where the source of homologous genes can be any mammalian species, e.g., primate species, particularly human; rodents, such as rats; canines, felines, bovines, ovines, equines, yeast, nematodes, etc. Between mammalian species, e.g., human and mouse, homologs generally have substantial sequence similarity, e.g., at least 75% sequence identity, usually at least 80%%, at least 85, at least 90%, at least 95%, at least 96%, at least 97%, at least 98%, at least 99% or even 100% identity between nucleotide sequences. Sequence similarity is calculated based on a reference sequence, which may be a subset of a larger sequence, such as a conserved motif, coding region, flanking region, etc. A reference sequence will usually be at least about a fragment of a polynucleotide sequence and may extend to the complete sequence that is being compared. Algorithms for sequence analysis are known in the art, such as gapped BLAST, described in Altschul, et al. Nucleic Acids Res. (1997) 25:3389-3402, or TeraBLAST available from TimeLogic Corp. (Crystal Bay, Nev.).

[0094] The subject nucleic acids can be cDNAs or genomic DNAs, as well as fragments thereof, particularly fragments that encode a biologically active gene product and/or are useful in the methods disclosed herein (e.g., in diagnosis, as a unique identifier of a differentially expressed gene of interest, etc.). The term “cDNA” as used herein is intended to include all nucleic acids that share the arrangement of sequence elements found in native mature mRNA species, where sequence elements are exons and 3′ and 5′ non-coding regions. Normally mRNA species have contiguous exons, with the intervening introns, when present, being removed by nuclear RNA splicing, to create a continuous open reading frame encoding a polypeptide. mRNA species can also exist with both exons and introns, where the introns may be removed by alternative splicing. Furthermore it should be noted that different species of mRNAs encoded by the same genomic sequence can exist at varying levels in a cell, and detection of these various levels of mRNA species can be indicative of differential expression of the encoded gene product in the cell.

[0095] A genomic sequence of interest comprises the nucleic acid present between the initiation codon and the stop codon, as defined in the listed sequences, including all of the introns that are normally present in a native chromosome. It can further include the 3′ and 5′ untranslated regions found in the mature mRNA. It can further include specific transcriptional and translational regulatory sequences, such as promoters, enhancers, etc., including about 1 kb, but possibly more, of flanking genomic DNA at either the 5′ and 3′ end of the transcribed region. The genomic DNA can be isolated as a fragment of 100 kbp or smaller; and substantially free of flanking chromosomal sequence. The genomic DNA flanking the coding region, either 3′ and 5′, or internal regulatory sequences as sometimes found in introns, contains sequences required for proper tissue, stage-specific, or disease-state specific expression.

[0096] The nucleic acid compositions of the subject invention can encode all or a part of the naturally-occurring polypeptides. Double or single stranded fragments can be obtained from the DNA sequence by chemically synthesizing oligonucleotides in accordance with conventional methods, by restriction enzyme digestion, by PCR amplification, etc.

[0097] Probes specific to the polynucleotides described herein can be generated using the polynucleotide sequences disclosed herein. The probes are usually a fragment of a polynucleotide sequences provided herein. The probes can be synthesized chemically or can be generated from longer polynucleotides using restriction enzymes. The probes can be labeled, for example, with a radioactive, biotinylated, or fluorescent tag. Preferably, probes are designed based upon an identifying sequence of any one of the polynucleotide sequences provided herein. More preferably, probes are designed based on a contiguous sequence of one of the subject polynucleotides that remain unmasked following application of a masking program for masking low complexity (e.g., XBLAST, RepeatMasker, etc.) to the sequence., i.e., one would select an unmasked region, as indicated by the polynucleotides outside the poly-n stretches of the masked sequence produced by the masking program.

[0098] The polynucleotides of interest in the subject invention are isolated and obtained in substantial purity, generally as other than an intact chromosome. Usually, the polynucleotides, either as DNA or RNA, will be obtained substantially free of other naturally-occurring nucleic acid sequences that they are usually associated with, generally being at least about 50%, usually at least about 90% pure and are typically “recombinant”, e.g., flanked by one or more nucleotides with which it is not normally associated on a naturally occurring chromosome.

[0099] The polynucleotides described herein can be provided as a linear molecule or within a circular molecule, and can be provided within autonomously replicating molecules (vectors) or within molecules without replication sequences. Expression of the polynucleotides can be regulated by their own or by other regulatory sequences known in the art. The polynucleotides can be introduced into suitable host cells using a variety of techniques available in the art, such as transferrin polycation-mediated DNA transfer, transfection with naked or encapsulated nucleic acids, liposome-mediated DNA transfer, intracellular transportation of DNA-coated latex beads, protoplast fusion, viral infection, electroporation, gene gun, calcium phosphate-mediated transfection, and the like.

[0100] The nucleic acid compositions described herein can be used to, for example, produce polypeptides, as probes for the detection of mRNA in biological samples (e.g., extracts of human cells) or cDNA produced from such samples, to generate additional copies of the polynucleotides, to generate ribozymes or antisense oligonucleotides, and as single stranded DNA probes or as triple-strand forming oligonucleotides. The probes described herein can be used to, for example, determine the presence or absence of any one of the polynucleotide provided herein or variants thereof in a sample. These and other uses are described in more detail below.

[0101] Ploypeptides and Variants Thereof

[0102] The present invention further provides polypeptides encoded by polynucleotides that represent genes that are differentially expressed in cancer cells. Such polypeptides are referred to herein as “polypeptides associated with cancer.” The polypeptides can be used to generate antibodies specific for a polypeptide associated with cancer, which antibodies are in turn useful in diagnostic methods, prognostics methods, therametric methods, and the like as discussed in more detail herein. Polypeptides are also useful as targets for therapeutic intervention, as discussed in more detail herein.

[0103] The polypeptides contemplated by the invention include those encoded by the disclosed polynucleotides and the genes to which these polynucleotides correspond, as well as nucleic acids that, by virtue of the degeneracy of the genetic code, are not identical in sequence to the disclosed polynucleotides. Further polypeptides contemplated by the invention include polypeptides that are encoded by polynucleotides that hybridize to polynucleotide of the sequence listing. Thus, the invention includes within its scope-a polypeptide encoded by a polynucleotide having the sequence of any one of the polynucleotide sequences provided herein, or a variant thereof.

[0104] In general, the term “polypeptide” as used herein refers to both the full length polypeptide encoded by the recited polynucleotide, the polypeptide encoded by the gene represented by the recited polynucleotide, as well as portions or fragments thereof. “Polypeptides” also includes variants of the naturally occurring proteins, where such variants are homologous or substantially similar to the naturally occurring protein, and can be of an origin of the same or different species as the naturally occurring protein (e.g., human, murine, or some other species that naturally expresses the recited polypeptide, usually a mammalian species). In general, variant polypeptides have a sequence that has at least about 80%, usually at least about 90%, and more usually at least about 98% sequence identity with a differentially expressed polypeptide described herein, as measured by BLAST 2.0 using the parameters described above. The variant polypeptides can be naturally or non-naturally glycosylated, i.e., the polypeptide has a glycosylation pattern that differs from the glycosylation pattern found in the corresponding naturally occurring protein.

[0105] The invention also encompasses homologs of the disclosed polypeptides (or fragments thereof) where the homologs are isolated from other species, i.e. other animal or plant species, where such homologs, usually mammalian species, e.g. rodents, such as mice, rats; domestic animals, e.g., horse, cow, dog, cat; and humans. By “homolog” is meant a polypeptide having at least about 35%, usually at least about 40% and more usually at least about 60% amino acid sequence identity to a particular differentially expressed protein as identified above, where sequence identity is determined using the BLAST 2.0 algorithm, with the parameters described supra.

[0106] In general, the polypeptides of interest in the subject invention are provided in a non-naturally occurring environment, e.g. are separated from their naturally occurring environment. In certain embodiments, the subject protein is present in a composition that is enriched for the protein as compared to a cell or extract of a cell that naturally produces the protein. As such, isolated polypeptide is provided, where by “isolated” or “in substantially isolated form” is meant that the protein is present in a composition that is substantially free of other polypeptides, where by substantially free is meant that less than 90%, usually less than 60% and more usually less than 50% of the composition is made up of other polypeptides of a cell that the protein is naturally found.

[0107] Also within the scope of the invention are variants; variants of polypeptides include mutants, fragments, and fusions. Mutants can include amino acid substitutions, additions or deletions. The amino acid substitutions can be conservative amino acid substitutions or substitutions to eliminate non-essential amino acids, such as to alter a glycosylation site, a phosphorylation site or an acetylation site, or to minimize misfolding by substitution or deletion of one or more cysteine residues that are not necessary for function. Conservative amino acid substitutions are those that preserve the general charge, hydrophobicity/hydrophilicity, and/or steric bulk of the amino acid substituted.

[0108] Variants can be designed so as to retain or have enhanced biological activity of a particular region of the protein (e.g., a functional domain and/or, where the polypeptide is a member of a protein family, a region associated with a consensus sequence). For example, muteins can be made which are optimized for increased antigenicity, i.e. amino acid variants of a polypeptide may be made that increase the antigenicity of the polypeptide. Selection of amino acid alterations for production of variants can be based upon the accessibility (interior vs. exterior) of the amino acid (see, e.g., Go et al, Int. J Peptide Protein Res. (1980) 15:211), the thermnostability of the variant polypeptide (see, e.g., Querol et al., Prot. Eng. (1996) 9:265), desired glycosylation sites (see, e.g., Olsen and Thomsen, J. Gen. Microbiol. (1991) 137:579), desired disulfide bridges (see, e.g., Clarke et al., Biochemistry (1993) 32:4322; and Wakarchuk et al., Protein Eng. (1994) 7:1379), desired metal binding sites (see, e.g., Toma et al., Biochemistry (1991) 30:97, and Haezerbrouclk et al., Protein Eng. (1993) 6:643), and desired substitutions with in proline loops (see, e.g., Masul et al., Appl. Env. Microbiol. (1994) 60:3579). Cysteine-depleted muteins can be produced as disclosed in U.S. Pat. No. 4,959,314.Variants also include fragments of the polypeptides disclosed herein, particularly biologically active fragments and/or fragments corresponding to functional domains. Fragments of interest will typically be at least about 10 aa to at least about 15 aa in length, usually at least about 50 aa in length, and can be as long as 300 aa in length or longer, but will usually not exceed about 1000 aa in length, where the fragment will have a stretch of amino acids that is identical to a polypeptide encoded by a polynucleotide having a sequence of any one of the polynucleotide sequences provided herein, or a homolog thereof. The protein variants described herein are encoded by polynucleotides that are within the scope of the invention. The genetic code can be used to select the appropriate codons to construct the corresponding variants.

[0109] A fragment of a subject polypeptide is, for example, a polypeptide having an amino acid sequence which is a portion of a subject polypeptide e.g. a polypeptide encoded by a subject polynucleotide that is identified by any one of the sequence of SEQ ID NOS: 1-13996 or its complement. The polypeptide fragments of the invention are preferably at least about 9 aa, at least about 15 aa, and more preferably at least about 20 aa, still more preferably at least about 30 aa, and even more preferably, at least about 40 aa, at least about 50 aa, at least about 75 aa, at least about 100 aa, at least about 125 aa or at least about 150 aa in length. A fragment “at least 20 aa in length,” for example, is intended to include 20 or more contiguous amino acids from, for example, the polypeptide encoded by a cDNA, in a cDNA clone contained in a deposited library, or a nucleotide sequence shown in SEQ ID NOS: 1-13996 or the complementary stand thereof. In this context “about” includes the particularly recited value or a value larger or smaller by several (5, 4, 3, 2, or 1) amino acids. These polypeptide fragments have uses that include, but are not limited to, production of antibodies as discussed herein. Of course, larger fragments (e.g., at least 150, 175, 200, 250, 500, 600, 1000, or 2000 amino acids in length) are also encompassed by the invention.

[0110] Moreover, representative examples of polypeptides fragments of the invention (useful in, for example, as antigens for antibody production), include, for example, fragments comprising, or alternatively consisting of, a sequence from about amino acid number 1-10, 5-10, 10-20, 21-31, 31-40, 41-61, 61-81, 91-120, 121-140, 141-162, 162-200, 201-240, 241-280, 281- 320, 321-360, 360-400, 400-450, 451-500, 500-600, 600-700, 700-800, 800-900 and the like. In this context “about” includes the particularly recited range or a range larger or smaller by several (5, 4, 3, 2, or 1) amino acids, at either terminus or at both termini. In some embodiments, these fragments has a functional activity (e.g., biological activity) whereas in other embodiments, these fragments may be used to make an antibody.

[0111] In one example, a polynucleotide having a sequence set forth in the sequence listing, containing no flanking sequences (i.e., consisting of the sequence set forth in the sequence listing), may be cloned into an expression vector having ATG and a stop codon (e.g. any one of the pET vector from Invitrogen, or other similar vectors from other manufactures), and used to express a polypeptide of interest encoded by the polynucleotide in a suitable cell, e.g., a bacterial cell. Accordingly, the polynucleotides may be used to produce polypeptides, and these polypeptides may be used to produce antibodies by known methods described above and below. In many embodiments, the sequence of the encoded polypeptide does not have to be known prior to its expression in a cell. However, if it desirable to know the sequence of the polypeptide, this may be derived from the sequence of the polynucleotide. Using the genetic code, the polynucleotide may be translated by hand, or by computer means. Suitable software for identifying open reading frames and translating them into polypeptide sequences are well know in the art, and include: LasergeneTM from DNAStar (Madison, Wis.), and Vector NTI TM from Informax (Frederick Md.), and the like.

[0112] Further polypeptide variants mnay are described in PCT publications WO/00-55173 WO/01-07611 and WO/02-16429

[0113] Vectors, Host Cells and Protein Production

[0114] The present invention also relates to vectors containing the polynucleotide of the present invention, host cells, and the production of polypeptides by recombinant techniques. The vector may be, for example, a phage, plasmid, viral, or retroviral vector. Retroviral vectors may be replication competent or replication defective. In the latter case, viral propagation generally will occur only in complementing host cells.

[0115] The polynucleotides of the invention may be joined to a vector containing a selectable marker for propagation in a host. Generally, a plasmid vector is introduced in a precipitate, such as a calcium phosphate precipitate, or in a complex with a charged lipid. If the vector is a virus, it may be packaged in vitro using an appropriate packaging cell line and then transduced into host cells.

[0116] The polynucleotide insert should be operatively linked to an appropriate promoter, such as the phage lambda PL promoter, the E. coli lac, trp, phoA and tac promoters, the SV40 early and late promoters and promoters of retroviral LTRs, to name a few. Other suitable promoters will be known to the skilled artisan. The expression constructs will further contain sites for transcription initiation, termination, and, in the transcribed region, a ribosome binding site for translation. The coding portion of the transcripts expressed by the constructs will preferably include a translation initiating codon at the beginning and a termination codon (UAA, UGA or UAG) appropriately positioned at the end of the polypeptide to be translated.

[0117] As indicated, the expression vectors will preferably include at least one selectable marker. Such markers include dihydrofolate reductase, G418 or neomycin resistance for eukaryotic cell culture and tetracycline, kanamycin or ampicillin resistance genes for culturing in E. coli and other bacteria.

[0118] Representative examples of appropriate hosts include,but are not limited to, bacterial cells, such as E. coli, Streptomyces and Salmonella typhimurium cells; fungal cells, such as yeast cells (e.g., Saccharomyces cerevisiae or Pichia pastoris (ATCC Accession No. 201178)); insect cells such as Drosophila S2 and Spodoptera Sf9 cells; animal cells such as CHO, COS, 293, and Bowes melanoma cells; and plant cells. Appropriate-culture mediums and conditions for the above-described host cells are known in the art.

[0119] Among vectors preferred for use in bacteria include pQE70, pQE60 and pQE-9, available from QIAGEN, Inc.; pBluescript vectors, Phagescript vectors, pNHSA, pNH 16a, pNH 18A, pNH46A, available from Stratagene Cloning Systems, Inc.; and ptrc99a, pKK223-3, pKK233-3, pDR540, pRITS available from Pharmacia Biotech, Inc. Among preferred eukaryotic vectors are pWLNEO, pSV2CAT, pOG44, pXTI and pSG available from Stratagene; and pSVK3, pBPV, pMSG and pSVL available from Pharmacia. Preferred expression vectors for use in yeast systems include, but are not limited to pYES2, pYDI, pTEFl/Zeo, pYES2/GS, pPICZ, pGAPZ, pGAPZalph, pPIC9, pPIC3.5, pHIL-D2, pHIL-SI, pPIC3.5K, pPIC9K, and PA0815 (all available from Invitrogen, Carload, Calif.). Other suitable vectors will be readily apparent to the skilled artisan.

[0120] Nucleic acids of interest may be cloned into a suitable vector by route methods. Suitable vectors include plasmids, cosmids, recombinant viral vectors e.g. retroviral vectors, YACs, BACs and the like, phage vectors.

[0121] Introduction of the construct into the host cell can be effected by calcium phosphate transfection, DEAE-dextran mediated transfection, cationic lipid-mediated transfection, electroporation, transduction, infection, or other methods. Such methods are described in many standard laboratory manuals, such as Davis et al., Basic Methods In Molecular Biology (1986). It is specifically contemplated that the polypeptides of the present invention may in fact be expressed by a host cell lacking a recombinant vector.

[0122] A polypeptide of this invention can be recovered and purified from recombinant cell cultures by well-known methods including ammonium-sulfate or ethanol precipitation, acid extraction, anion or cation exchange chromatography, phosphocellulose chromatography, hydrophobic interaction chromatography, affinity chromatography, hydroxylapatite chromatography and lectin chromatography. Most preferably, high performance liquid chromatography (“HPLC”) is employed for purification.

[0123] Polypeptides of the present invention can also be recovered from: products purified from natural sources, including bodily fluids, tissues and cells, whether directly isolated or cultured; products of chemical synthetic procedures; and products produced by recombinant techniques from a prokaryotic or eukaryotic host, including, for example, bacterial, yeast higher plant, insect, and mammalian cells. Depending upon the host employed in a recombinant production procedure, the polypeptides of the present invention may be glycosylated or may be non-glycosylated. In addition, polypeptides of the invention may also include an initial modified methionine residue, in some cases as a result of host mediated processes. Thus, it is well known in the art that the N-terminal methionine encoded by the translation initiation codon generally is removed with high efficiency from any protein after translation in all eukaryotic cells. While the N-terminal methionine on most proteins also is efficiently removed in most prokaryotes, for some proteins, this prokaryotic removal process is inefficient, depending on the nature of the amino acid to which the N-terminal methionine is covalently linked.

[0124] Suitable methods and compositions for polypeptide expression may be found in PCT publications WO/00-55173, WO/01-07611 and WO/02-16429, and suitable methods and compositions for production of modified polypeptides may be found in PCT publications WO/00-55173, WO/01-07611 and WO/02-16429.

[0125] Antibodies and Other Plypeptide or Polynucleotide Binding Molecule

[0126] The present invention further provides antibodies, which may be isolated antibodies, that are specific for a polypeptide encoded by a polynucleotide described herein and/or a polypeptide of a gene that corresponds to a polynucleotide described herein. Antibodies can be provided in a composition comprising the antibody and a buffer and/or a pharmaceutically acceptable excipient. Antibodies specific for a polypeptide associated with cancer are useful in a variety of diagnostic and therapeutic methods, as discussed in detail herein.

[0127] Gene products, including polypeptides, mRNA (particularly mRNAs having distinct secondary and/or tertiary structures), cDNA, or complete gene, can be prepared and used for raising antibodies for experimental, diagnostic, and therapeutic purposes. Antibodies may be used to identify a gene corresponding to a polynucleotide. The polynucleotide or related cDNA is expressed as described above, and antibodies are prepared. These antibodies are specific to an epitope on the polypeptide encoded by the polynucleotide, and can precipitate or bind to the corresponding native protein in a cell or tissue preparation or in a cell-free extract of an in vitro expression system.

[0128] Antibodies

[0129] Further polypeptides of the invention relate to antibodies and T-cell antigen receptors (TCR) which immunospecifically bind a subject polypeptide, subject polypeptide fragment, or variant thereof, and/or an epitope thereof (as determined by immunoassays well known in the art for assaying specific antibody-antigen binding). Antibodies of the invention include, but are not limited to, polyclonal, monoclonal, multispecific, human, humanized or chimeric antibodies, single chain antibodies, Fab fragments, F(ab′) fragments, fragments produced by a Fab expression library, anti-idiotypic (anti-Id) antibodies (including, e.g., anti-Id antibodies to antibodies of the invention), and epitope-binding fragments of any of the above. The term “antibody,” as used herein, refers to immunoglobulin molecules and immunologically active portions of immunoglobulin molecules, i.e., molecules that contain an antigen binding site that immunospecifically binds an antigen. The immunoglobulin molecules of the invention can be of any type (e.g., IgG, IgE, IgM, IgD, IgA and IgY), class (e.g., IgGl, IgG2, lgG3, IgG4, IgAl and IgA2) or subclass of immunoglobulin molecule.

[0130] Most preferably the antibodies are human antigen-binding antibody fragments of the present invention and include, but are not limited to, Fab. Fab′ and F(ab′)2, Fd, single-chain Fvs (scFv), single-chain antibodies, disulfide-linked Fvs (sdFv) and fragments comprising either a VL or VH domain. Antigen-binding antibody fragments, including single-chain antibodies, may comprise the variable region(s) alone or in combination with the entirety or a portion of the following: hinge region, C_{H}1, C_{H}2, and C_{H}3 domains. Also included in the invention are antigen-binding fragments also comprising any combination of variable region(s) with a hinge region, C_{H}1, C_{H}2, and C_{H}3 domains. The antibodies of the invention may be from any animal origin including birds and mammals. Preferably, the antibodies are human, murine (e.g., mouse and rat), donkey, ship rabbit, goat, guinea pig, camel, horse, or chicken. As used herein, “human” antibodies include antibodies having the amino acid sequence of a human immunoglobulin and include antibodies isolated from, human immunoglobulin libraries or from animals transgenic for one or more human immunoglobulin and that do not express endogenous immunoglobulins, as described infra and, for example in, U.S. Pat. No. 5,939,598 by Kucherlapati et al.

[0131] The antibodies of the present invention may be monospecific, bispecific, trispecific or of greater multispecificity. Multispecific antibodies may be specific for different epitopes of a polypeptide of the present invention or may be specific for both a polypeptide of the present invention as well as for a heterologous epitope, such as a heterologous polypeptide or solid support material. See, e.g., PCT publications WO 93/17715; WO 92/08802; WO 91/00360; WO 92/05793; Tutt, et al., J. Immunol. 147:60-69 (199.1); U.S. Pat. Nos. 4,474,893; 4,714,681; 4,925,648; 5,573,920; 5,601,819; Kostelny et al., J. Immunol. 148:1547-1553 (1992).

[0132] Antibodies of the present invention may be described or specified in terms of the epitope(s) or portion(s) of a polypeptide of the present invention which they recognize or specifically bind. The epitope(s) or polypeptide portion(s) may be specified as described herein, e.g., by N-terminal and C-terminal positions, or by size in contiguous amino acid residues. Antibodies which specifically bind any epitope or polypeptide of the present invention may also be excluded. Therefore, the present invention includes antibodies that specifically bind polypeptides of the present invention, and allows for the exclusion of the same.

[0133] Antibodies of the present invention may also be described or specified in terms of their cross-reactivity. Antibodies that do not bind any other analog, ortholog, or homoiog of a polypeptide of the present invention are included. Antibodies that bind polypeptides with at least 95%, at least 90%, at least 85%, at least 80%, at least 75%, at least 70%, at least 65%, at least 60%, at least 55%, and at least 50% identity (as calculated using methods known in the art and described herein) to a polypeptide of the present invention are also included in the present invention. In specific embodiments, antibodies of the present invention cross-react with murine, rat and/or rabbit homologs of human proteins and the corresponding epitopes thereof Antibodies that do not bind polypeptides with less than 95%, less than 90%, less than 85%, less than 80%, less than 75%, less than 70%, less than 65%, less than 60%, less than 55%, and less than 50% identity (as calculated using methods known in the art and described herein) to a polypeptide of the present invention are also included in the present invention. In a specific embodiment, the above-described cross-reactivity is with respect to any single specific antigenic or immunogenic polypeptide, or combination(s) of 2, 3, 4, 5, or more of the specific antigenic and/or immunogenic polypeptides disclosed herein. Further included in the present invention are antibodies which bind polypeptides encoded by polynucleotides which hybridize to a polynucleotide of the present invention under stringent hybridization conditions (as described herein). Antibodies of the present invention may also be described or specified in terms of their binding affinity to a polypeptide of the invention. Preferred binding affinities include those with a dissociation constant or Kd less 5×10⁻⁵ M, 10⁻⁵ M, 5×10⁻⁶ M, 10⁻⁶ , 5×10⁻⁷ M, 10⁻⁷ M, 5×10⁻⁸ M, 10⁻⁸ M, 5×10 ⁻⁹ M, 10⁻⁹ M, 5×10−10 M, 10 -10 M, etc.

[0134] The invention also provides antibodies that competitively inhibit binding of an antibody to an epitope of the invention as determined by any method known in the art for determining competitive binding, for example, the immunoassays described herein. In preferred embodiments, the antibody competitively inhibits binding to the epitope by at least 95%, at least 90%, at least 85 %, at least 80%, at least 75%, at least 70%, at least 60%, or at least 50%.

[0135] Methods for making screening, assaying, humanizing, and modifying different types of antibody are well known in the art and may be found in PCT publications WO/00-55173, WO/01-07611 and WO/02-16429.

[0136] In addition, the invention further provides polynucleotides comprising a nucleotide sequence encoding an antibody of the invention and fragments thereof. The invention also encompasses polynucleotides that hybridize under stringent or alternatively, under lower stringency hybridization conditions, e.g., as defined supra, to polynucleotides that encode an antibody, preferably, that specifically binds to a polypeptide of the invention, preferably, an antibody that binds to a subject polypeptide.

[0137] The antibodies of the invention can be produced by any method known in the art for the synthesis of antibodies, in particular, by chemical synthesis or preferably, by recombinant expression techniques. Recombinant expression of an antibody of the invention, or fragment, derivative or analog thereof, (e.g., a heavy or light chain of an antibody of the invention or a single chain antibody of the invention), requires construction of an expression vector containing a polynucleotide that encodes the antibody. Once a polynucleotide encoding an antibody molecule or a heavy or light chain of an antibody, or portion thereof (preferably containing the heavy or light chain variable domain), of the invention has been obtained, the vector for the production of the antibody molecule may be produced by recombinant DNA technology using techniques well known in the art. Thus, methods for preparing a protein by expressing a polynucleotide containing an antibody encoding nucleotide sequence are described herein. Methods which are well known to those skilled in the art can be used to construct expression vectors containing antibody coding sequences and appropriate transcriptional and translational control signals. These methods include, for example, in vitro recombinant DNA techniques, synthetic techniques, and in vivo genetic recombination. The invention, thus, provides replicable vectors comprising a nucleotide sequence encoding an antibody molecule of the invention, or a heavy or light chain thereof, or a heavy or light chain variable domain, operably linked to a promoter. Such vectors may include the nucleotide sequence encoding the constant region of the antibody molecule (see, e.g., PCT Publication WO 86/05807; PCT Publication WO 89/01036; and U.S. Pat. No. 5,122,464) and the variable domain of the antibody may be cloned into such a vector for expression of the entire heavy or light chain.

[0138] The expression vector is transferred to a host cell by conventional techniques and the transfected cells are then cultured by conventional techniques to produce an antibody of the invention. Thus, the invention includes host cells containing a polynucleotide encoding an antibody of the invention, or a heavy or light chain thereof, or a single chain antibody of the invention, operably linked to a heterologous promoter. In preferred embodiments for the expression of double-chained antibodies, vectors encoding both the heavy and light chains may be co-expressed in the host cell for expression of the entire immunoglobulin molecule, as detailed below.

[0139] A variety of host-expression vector systems may be utilized to express the antibody molecules of the invention. Such host-expression systems represent vehicles by which the coding sequences of interest may be produced and subsequently purified, but also represent cells which may, when transformed or transfected with the appropriate nucleotide coding sequences, express an antibody molecule of the invention in situ. These include but are not limited to microorganisms such as bacteria (e.g., E. coli, B. subtilis) transformed with recombinant bacteriophage DNA, plasmid DNA or cosmid DNA expression vectors containing antibody coding sequences; yeast (e.g., Saccharomyces, Pichia) transformed with recombinant yeast expression vectors containing antibody coding sequences; insect cell systems infected with recombinant virus expression vectors (e.g., baculovirus) containing antibody coding sequences; plant cell systems infected with recombinant virus expression vectors (e.g., cauliflower mosaic virus, CaMV; tobacco mosaic virus, TMV) or transformed with recombinant plasmid expression vectors (e.g., Ti plasmid) containing antibody coding sequences; or mammalian cell systems (e.g., COS, CHO, BHK, 293, 3T3 cells) harboring recombinant expression constructs containing promoters derived from the genome of mammalian cells (e.g., metallothionein promoter) or from mammalian viruses (e.g., the adenovirus late promoter; the vaccinia virus 7.5K promoter). Preferably, bacterial cells such as Escherichia coli, and more preferably, eukaryotic cells, especially for the expression of whole recombinant antibody molecule, are used for the expression of a recombinant antibody molecule. For example, mammalian cells such as Chinese hamster ovary cells (CHO), in conjunction with a vector such as the major intermediate early gene promoter element from human cytomegalovirus is an effective expression system for antibodies (Foecking et al., Gene 45:101 (1986); Cockett etal., Bio/Technology 8:2 (1990)).

[0140] Antibodies production is well known in the art. Exemplary methods and compositions for making antibodies may be found in PCT publications WO/00-55173, WO/01-07611 and WO/02-16429.

[0141] Immunophenotyping

[0142] The antibodies of the invention may be utilized for immunophenotyping of cell lines and biological samples. The translation product of the gene of the present invention may be useful as a cell specific marker, or more specifically as a cellular marker that is differentially expressed at various stages of differentiation and/or maturation of particular cell types. Monoclonal antibodies directed against a specific epitope, or combination of epitopes, will allow for the screening of cellular populations expressing the marker. Various techniques can be utilized using monoclonal antibodies to screen for cellular populations expressing the marker(s), and include magnetic separation using antibody-coated magnetic beads, “panning” with antibody attached to a solid matrix (i.e., plate), and flow cytometry (See, e.g., U.S. Pat. No. 5,985,660; and Morrison et al. Cell, 96:737-49 (1999)).

[0143] These techniques allow for the screening of particular populations of cells, such as might be found with hematological malignancies (i.e. minimal residual disease (MRD) in acute leukemic patients) and “non-self cells in transplantations to prevent Graft-versus-Host Disease (GVHD). Alternatively, these techniques allow for the screening of hematopoietic stem and progenitor cells capable of undergoing proliferation and/or differentiation, as might be found in human umbilical cord blood.

Kits

[0144] Also provided by the subject invention are kits for practicing the subject methods, as described above. The subject kits include at least one or more of: a subject nucleic acid, isolated polypeptide or an antibody thereto. Other optional components of the kit include: restriction enzymes, control primers and plasmids; buffers, cells, carriers adjuvents etc. The nucleic acids of the kit may also have restrictions sites, multiple cloning sites, primer sites, etc to facilitate their ligation other plasmids. The various components of the kit may be present in separate containers or certain compatible components may be precombined into a single container, as desired. In many embodiments, kits with unit doses of the active agent, e.g. in oral or injectable doses, are provided. In certain embodiments, controls, such as samples from a cancerous or non-cancerous cell are provided by the invention. Further embodiments of the kit include an antibody for a subject polypeptide and a chemotherapeutic agent to be used in combination with the polypeptide as a treatment.

[0145] In addition to above-mentioned components, the subject kits typically further include instructions for using the components of the kit to practice the subject methods. The instructions for practicing the subject methods are generally recorded on a suitable recording medium. For example, the instructions may be printed on a substrate, such as paper or plastic, etc. As such, the instructions may be present in the kits as a package insert, in the labeling of the container of the kit or components thereof (i.e., associated with the packaging or subpackaging) etc. In other embodiments, the instructions are present as an electronic storage data file present on a suitable computer readable storage medium, e.g. CD-ROM, diskette, etc. In yet other embodiments, the actual instructions are not present in the kit, but means for obtaining the instructions from a remote source, e.g. via the internet, are provided. An example of this embodiment is a kit that includes a web address where the instructions can be viewed and/or from which the instructions can be downloaded. As with the instructions, this means for obtaining the instructions is recorded on a suitable substrate.

[0146] Computer-Related Embodiments

[0147] In general, a library of polynucleotides is a collection of sequence information, which information is provided in either biochemical form (e.g., as a collection of polynucleotide molecules), or in electronic form (e.g., as a collection of polynucleotide sequences stored in a computer-readable form, as in a computer system and/or as part of a computer program). The sequence information of the polynucleotides can be used in a variety of ways, e.g., as a resource for gene discovery, as a representation of sequences expressed in a selected cell type (e.g., cell type markers), and/or as markers of a given disease or disease state. For example, in the instant case, the sequences of polynucleotides and polypeptides corresponding to genes differentially expressed in cancer, as well as the nucleic acid and amino acid sequences of the genes themselves, can be provided in electronic form in a computer database.

[0148] In general, a disease marker is a representation of a gene product that is present in all cells affected by disease either at an increased or decreased level relative to a normal cell (e.g., a cell of the same or similar type that is not substantially affected by disease). For example, a polynucleotide sequence in a library can be a polynucleotide that represents an mRNA, polypeptide, or other gene product encoded by the polynucleotide, that is either overexpressed or underexpressed in a cancerous cell affected by cancer relative to a normal (i.e., substantially disease-free) cell.

[0149] The nucleotide sequence information of the library can be embodied in any suitable form, e.g., electronic or biochemical forms. For example, a library of sequence information embodied in electronic form comprises an accessible computer data file (or, in biochemical form, a collection of nucleic acid molecules) that contains the representative nucleotide sequences of genes that are differentially expressed (e.g., overexpressed or underexpressed) as between, for example, i) a cancerous cell and a normal cell; ii) a cancerous cell and a dysplastic cell; iii) a cancerous cell and a cell affected by a disease or condition other than cancer; iv) a metastatic cancerous cell and a normal cell and/or non-metastatic cancerous cell; v) a malignant cancerous cell and a non-malignant cancerous cell (or a normal cell) and/or vi) a dysplastic cell relative to a normal cell. Other combinations and comparisons of cells affected by various diseases or stages of disease will be readily apparent to the ordinarily skilled artisan. Biochemical embodiments of the library include a collection of nucleic acids that have the sequences of the genes in the library, where the nucleic acids can correspond to the entire gene in the library or to a fragment thereof, as described in greater detail below.

[0150] The polynucleotide libraries of the subject invention generally comprise sequence information of a plurality of polynucleotide sequences, where at least one of the polynucleotides has a sequence of any of sequence described herein. By plurality is meant at least 2, usually at least 3 and can include up to all of the sequences described herein. The length and number of polynucleotides in the library will vary with the nature of the library, e.g., if the library is an oligonucleotide array, a cDNA array, a computer database of the sequence information, etc.

[0151] Where the library is an electronic library, the nucleic acid sequence information can be present in a variety of media. “Media” refers to a manufacture, other than an isolated nucleic acid molecule, that contains the sequence information of the present invention. Such a manufacture provides the genome sequence or a subset thereof in a form that can be examined by means not directly applicable to the sequence as it exists in a nucleic acid. For example, the nucleotide sequence of the present invention, e.g. the nucleic acid sequences of any of the polynucleotides of the sequences described herein, can be recorded on computer readable media, e.g. any medium that can be read and accessed directly by a computer. Such media include, but are not limited to: magnetic storage media, such as a floppy disc, a hard disc storage medium, and a magnetic tape; optical storage media such as CD-ROM; electrical storage media such as RAM and ROM; and hybrids of these categories such as magnetic/optical storage media.

[0152] One of skill in the art can readily appreciate how any of the presently known computer readable mediums can be used to create a manufacture comprising a recording of the present sequence information. “Recorded” refers to a process for storing information on computer readable medium, using any such methods as known in the art. Any convenient data storage structure can be chosen, based on the means used to access the stored information. A variety of data processor programs and formats can be used for storage, e.g. word processing text file, database format, etc. In addition to the sequence information, electronic versions of libraries comprising one or more sequence described herein can be provided in conjunction or connection with other computer-readable information and/or other types of computer-readable files (e.g., searchable files, executable files, etc, including, but not limited to, for example, search program software, etc.).

[0153] By providing the nucleotide sequence in computer readable form, the information can be accessed for a variety of purposes. Computer software to access sequence information (e.g. the NCBI sequence database) is publicly available. For example, the gapped BLAST (Altschul et al., Nucleic Acids Res. (1997) 25:3389-3402) and BLAZE (Brutlag et al, Comp. Chem. (1993) 17:203) search algorithms on a Sybase system, or the TeraBLAST (TimeLogic, Crystal Bay, Nev.) program optionally running on a specialized computer platform available from TimeLogic, can be used to identify open reading frames (ORFs) within the genome that contain homology to ORFs from other organisms.

[0154] As used herein, “a computer-based system” refers to the hardware means, software means, and data storage means used to analyze the nucleotide sequence information of the present invention. The minimum hardware of the computer-based systems of the present invention comprises a central processing unit (CPU), input means, output means, and data storage means. A skilled artisan can readily appreciate that any one of the currently available computer-based system are suitable for use in the present invention. The data storage means can comprise any manufacture comprising a recording of the present sequence information as described above, or a memory access means that can access such a manufacture.

[0155] “Search means” refers to one or more programs implemented on the computer-based system, to compare a target sequence or target structural motif, or expression levels of a polynucleotide in a sample, with the stored sequence information. Search means can be used to identify fragments or regions of the genome that match a particular target sequence or target motif. A variety of known algorithms are publicly known and commercially available, e.g. MacPattern (EMBL), TeraBLAST (TimeLogic), BLASTN and BLASTX (NCBI). A “target sequence” can be any polynucleotide or amino acid sequence of six or more contiguous nucleotides or two or more amino acids, preferably from about 10 to 100 amino acids or from about 30 to 300 nt. A variety of means for comparing nucleic acids or polypeptides may be used to compare accomplish a sequence comparison (e.g., to analyze target sequences, target motifs, or relative expression levels) with the data storage means. A skilled artisan can readily recognize that any one of the publicly available homology search programs can be used to search the computer based systems of the present invention to compare of target sequences and motifs. Computer programs to analyze expression levels in a sample and in controls are also known in the art.

[0156] A “target structural motif,” or “target motif,” refers to any rationally selected sequence or combination of sequences in which the sequence(s) are chosen based on a three-dimensional configuration that is formed upon the folding of the target motif, or on consensus sequences of regulatory or active sites. There are a variety of target motifs known in the art. Protein target motifs include, but are not limited to, enzyme active sites and signal sequences, kinase domains, receptor binding domains, SH2 domains, SH3 domains, phosphorylation sites, protein interaction domains, transmembrane domains, etc. Nucleic acid target motifs include, but are not limited to, hairpin structures, promoter sequences and other expression elements such as binding sites for transcription factors.

[0157] A variety of structural formats for the input and output means can be used to input and output the information in the computer-based systems of the present invention. One format for an output means ranks the relative expression levels of different polynucleotides. Such presentation provides a skilled artisan with a ranking of relative expression levels to determine a gene expression profile. A gene expression profile can be generated from, for example, a cDNA library prepared from mRNA isolated from a test cell suspected of being cancerous or pre-cancerous, comparing the sequences or partial sequences of the clones against the sequences in an electronic database, where the sequences of the electronic database represent genes differentially expressed in a cancerous cell, e.g., a cancerous breast cell. The number of clones having a sequence that has substantial similarity to a sequence that represents a gene differentially expressed in a cancerous cell is then determined, and the number of clones corresponding to each of such genes is determined. An increased number of clones that correspond to differentially expressed gene is present in the cDNA library of the test cell (relative to, for example, the number of clones expected in a cDNA of a normal cell) indicates that the test cell is cancerous.

[0158] As discussed above, the “library” as used herein also encompasses biochemical libraries of the polynucleotides of the sequences described herein, e.g., collections of nucleic acids representing the provided polynucleotides. The biochemical libraries can take a variety of forms, e.g., a solution of cDNAs, a pattern of probe nucleic acids stably associated with a surface of a solid support (i.e, an array) and the like. Of particular interest are nucleic acid arrays in which one or more of the genes described herein is represented by a sequence on the array. By array is meant an article of manufacture that has at least a substrate with at least two distinct nucleic acid targets on one of its surfaces, where the number of distinct nucleic acids can be considerably higher, typically being at least 10 nt, usually at least 20 nt and often at least 25 nt. A variety of different array formats have been developed and are known to those of skill in the art. The arrays of the subject invention find use in a variety of applications, including gene expression analysis, drug screening, mutation analysis and the like, as disclosed in the above-listed exemplary patent documents.

[0159] In addition to the above nucleic acid libraries, analogous libraries of polypeptides are also provided, where the polypeptides of the library will represent at least a portion of the polypeptides encoded by a gene corresponding to a sequence described herein.

[0160] Diagnostic and Other Methods Invloving Detection of Differentially Expressed Genes

[0161] The present invention provides methods of using the polynucleotides described herein in, for example, diagnosis of cancer and classification of cancer cells according to expression profiles. In specific non-limiting embodiments, the methods are useful for detecting cancer cells, facilitating diagnosis of cancer and the severity of a cancer (e.g., tumor grade, tumor burden, and the like) in a subject, facilitating a determination of the prognosis of a subject, and assessing the responsiveness of the subject to therapy (e.g., by providing a measure of therapeutic effect through, for example, assessing tumor burden during or following a chemotherapeutic regimen). Detection can be based on detection of a polynucleotide that is differentially expressed in a cancer cell, and/or detection of a polypeptide encoded by a polynucleotide that is differentially expressed in a cancer cell (“a polypeptide associated with cancer”). The detection methods of the invention can be conducted in vitro or in vivo, on isolated cells, or in whole tissues or a bodily fluid, e.g., blood, plasma, serum, urine, and the like).

[0162] In general, methods of the invention involving detection of a gene product (e.g., mRNA, cDNA generated from such mRNA, and polypeptides) involve contacting a sample with a probe specific for the gene product of interest. “Probe” as used herein in such methods is meant to refer to a molecule that specifically binds a gene product of interest (e.g., the probe binds to the target gene product with a specificity sufficient to distinguish binding to target over non-specific binding to non-target (background) molecules). “Probes” include, but are not necessarily limited to, nucleic acid probes (e.g., DNA, RNA, modified nucleic acid, and the like), antibodies (e.g., antibodies, antibody fragments that retain binding to a target epitope, single chain antibodies, and the like), or other polypeptide, peptide, or molecule (e.g., receptor ligand) that specifically binds a target gene product of interest.

[0163] The probe and sample suspected of having the gene product of interest are contacted under conditions suitable for binding of the probe to the gene product. For example, contacting is generally for a time sufficient to allow binding of the probe to the gene product (e.g., from several minutes to a few hours), and at a temperature and conditions of osmolarity and the like that provide for binding of the probe to the gene product at a level that is sufficiently distinguishable from background binding of the probe (e.g., under conditions that minimize non-specific binding). Suitable conditions for probe-target gene product binding can be readily determined using controls and other techniques available and known to one of ordinary skill in the art.

[0164] In this embodiment, the probe can be an antibody or other polypeptide, peptide, or molecule (e.g., receptor ligand) that specifically binds a target polypeptide of interest.

[0165] The detection methods can be provided as part of a kit. Thus, the invention further provides kits for detecting the presence and/or a level of a polynucleotide that is differentially expressed in a cancer cell (e.g., by detection of an mRNA encoded by the differentially expressed gene of interest), and/or a polypeptide encoded thereby, in a biological sample. Procedures using these kits can be performed by clinical laboratories, experimental laboratories, medical practitioners, or private individuals. The kits of the invention for detecting a polypeptide encoded by a polynucleotide that is differentially expressed in a cancer cell comprise a moiety that specifically binds the polypeptide, which may be a specific antibody. The kits of the invention for detecting a polynucleotide that is differentially expressed in a cancer cell comprise a moiety that specifically hybridizes to such a polynucleotide. The kit may optionally provide additional components that are useful in the procedure, including, but not limited to, buffers, developing reagents, labels, reacting surfaces, means for detection, control samples, standards, instructions, and interpretive information.

[0166] Detecting a Polypeptide Encoded by a Polynucleotide that is Differentially Expressed in a Cancer Cell

[0167] In some embodiments, methods are provided for a detecting cancer cell by detecting in a cell, a polypeptide encoded by a gene differentially expressed in a cancer cell. Any of a variety of known methods can be used for detection, including, but not limited to, immunoassay, using an antibody specific for the encoded polypeptide, e.g., by enzyme-linked immunosorbent assay (ELISA), radioimmunoassay (RIA), and the like; and functional assays for the encoded polypeptide, e.g., binding activity or enzymatic activity.

[0168] For example, an immunofluorescence assay can be easily performed on cells without first isolating the encoded polypeptide. The cells are first fixed onto a solid support, such as a microscope slide or microtiter well. This fixing step can pen-neabilize the cell membrane. The permeablization of the cell membrane permits the polypeptide-specific probe (e.g, antibody) to bind. Alternatively, where the polypeptide is secreted or membrane-bound, or is otherwise accessible at the cell-surface (e.g., receptors, and other molecule stably-associated with the outer cell membrane or otherwise stably associated with the cell membrane, such permneabilization may not be necessary.

[0169] Next, the fixed cells are exposed to an antibody specific for the encoded polypeptide. To increase the sensitivity of the assay, the fixed cells may be further exposed to a second antibody, which is labeled and binds to the first antibody, which is specific for the encoded polypeptide. Typically, the secondary antibody is detectably labeled, e.g., with a fluorescent marker. The cells which express the encoded polypeptide will be fluorescently labeled and easily visualized under the microscope. See, for example, Hashido et al. (1992) Biochem. Biophys. Res. Comm. 187:1241-1248.

[0170] As will be readily apparent to the ordinarily skilled artisan upon reading the present specification, the detection methods and other methods described herein can be varied. Such variations are within the intended scope of the invention. For example, in the above detection scheme, the probe for use in detection can be immobilized on a solid support, and the test sample contacted with the immobilized probe. Binding of the test sample to the probe can then be detected in a variety of ways, e.g., by detecting a detectable label bound to the test sample.

[0171] The present invention further provides methods for detecting the presence of and/or measuring a level of a polypeptide in a biological sample, which polypeptide is encoded by a polynucleotide that represents a gene differentially expressed in cancer, particularly in a polynucleotide that represents a gene differentially cancer cell, using a probe specific for the encoded polypeptide. In this embodiment, the probe can be a an antibody or other polypeptide, peptide, or molecule (e.g., receptor ligand) that specifically binds a target polypeptide of interest.

[0172] The methods generally comprise: a) contacting the sample with an antibody specific for a differentially expressed polypeptide in a test cell; and b) detecting binding between the antibody and molecules of the sample. The level of antibody binding (either qualitative or quantitative) indicates the cancerous state of the cell. For example, where the differentially expressed gene is increased in cancerous cells, detection of an increased level of antibody binding to the test sample relative to antibody binding level associated with a normal cell indicates that the test cell is cancerous.

[0173] Suitable controls include a sample known not to contain the encoded polypeptide; and a sample contacted with an antibody not specific for the encoded polypeptide, e.g., an anti-idiotype antibody. A variety of methods to detect specific antibody-antigen interactions are known in the art and-can be used in the method, including, but not limited to, standard immunohistological methods, immunoprecipitation, an enzyme immunoassay, and a radioimmunoassay.

[0174] In general, the specific antibody will be detectably labeled, either directly or indirectly. Direct labels include radioisotopes; enzymes whose products are detectable (e.g., luciferase, β-galactosidase, and the like); fluorescent labels (e.g., fluorescein isothiocyanate, rhodamine, phycoerythrin, and the like); fluorescence emitting metals, e.g., 152Eu, or others of the lanthanide series, attached to the antibody through metal chelating groups such as EDTA; chemiluminescent compounds, e.g., luminol, isoluminol, acridinium salts, and the like; bioluminescent compounds, e.g., luciferin, aequorin (green fluorescent protein), and the like.

[0175] The antibody may be attached (coupled) to an insoluble support, such as a polystyrene plate or a bead. Indirect labels include second antibodies specific for antibodies specific for the encoded polypeptide (“first specific antibody”), wherein the second antibody is labeled as described above; and members of specific binding pairs, e.g., biotin-avidin, and the like. The biological sample may be brought into contact with and immobilized on a solid support or carrier, such as nitrocellulose, that is capable of immobilizing cells, cell particles, or soluble proteins. The support may then be washed with suitable buffers, followed by contacting with a detectably-labeled first specific antibody. Detection methods are known in the art and will be chosen as appropriate to the signal emitted by the detectable label. Detection is generally accomplished in comparison to suitable controls, and to appropriate standards.

[0176] In some embodiments, the methods are adapted for use in vivo, e.g., to locate or identify sites where cancer cells are present. In these embodiments, a detectably-labeled moiety, e.g., an antibody, which is specific for a cancer-associated polypeptide is administered to an individual (e.g., by injection), and labeled cells are located using standard imaging techniques, including, but not limited to, magnetic resonance imaging, computed tomography scanning, and the like. In this manner, cancer cells are differentially labeled.

[0177] Detecting a Polynucleotide that Represents a Gene Differentially Expressed in a Cancer Cell

[0178] In some embodiments, methods are provided for detecting a cancer cell by detecting expression in the cell of a transcript or that is differentially expressed in a cancer cell. Any of a variety of known methods can be used for detection, including, but not limited to, detection of a transcript by hybridization with a polynucleotide that hybridizes to a polynucleotide that is differentially expressed in a cancer cell; detection of a transcript by a polymerase chain reaction using specific oligonucleotide primers; in situ hybridization of a cell using as a probe a polynucleotide that hybridizes to a gene that is differentially expressed in a cancer cell and the like.

[0179] In many embodiments, the levels of a subject gene product are measured. By measured is meant qualitatively or quantitatively estimating the level of the gene product in a first biological sample either directly (e.g. by determining or estimating absolute levels of gene product) or relatively by comparing the levels to a second control biological sample. In many embodiments the second control biological sample is obtained from an individual not having not having cancer. As will be appreciated in the art, once a standard control level of gene expression is known, it can be used repeatedly as a standard for comparison. Other control samples include samples of cancerous tissue.

[0180] The methods can be used to detect and/or measure mRNA levels of a gene that is differentially expressed in a cancer cell. In some embodiments, the methods comprise: a) contacting a sample with a polynucleotide that corresponds to a differentially expressed gene described herein under conditions that allow hybridization; and b) detecting hybridization, if any. Detection of differential hybridization, when compared to a suitable control, is an indication of the presence in the sample of a polynucleotide that is differentially expressed in a cancer cell. Appropriate controls include, for example, a sample that is known not to contain a polynucleotide that is differentially expressed in a cancer cell. Conditions that allow hybridization are known in the art, and have been described in more detail above.

[0181] Detection can also be accomplished by any known method, including, but not limited to, in situ hybridization, PCR (polymerase chain reaction), RT-PCR (reverse transcription-PCR), and “Northern” or RNA blotting, arrays, microarrays, etc, or combinations of such techniques, using a suitably labeled polynucleotide. A variety of labels and labeling methods for polynucleotides are known in the art and can be used in the assay methods of the invention. Specific hybridization can be determined by comparison to appropriate controls.

[0182] Polynucleotides described herein are used for a variety of purposes, such as probes for detection of and/or measurement of, transcription levels of a polynucleotide that is differentially expressed in a cancer cell. Additional disclosure about preferred regions of the disclosed polynucleotide sequences is found in the Examples. A probe that hybridizes specifically to a polynucleotide disclosed herein should provide a detection signal at least 2-, 5-, 10-, or 20-fold higher than the background hybridization provided with other unrelated sequences. It should be noted that “probe” as used in this context of detection of nucleic acid is meant to refer to a polynucleotide sequence used to detect a differentially expressed gene product in a test sample. As will be readily appreciated by the ordinarily skilled artisan, the probe can be detectably labeled and contacted with, for example, an array comprising immobilized polynucleotides obtained from a test sample (e.g., mRNA). Alternatively, the probe can be immobilized on an array and the test sample detectably labeled. These and other variations of the methods of the invention are well within the skill in the art and are within the scope of the invention.

[0183] Labeled nucleic acid probes may be used to detect expression of a gene corresponding to the provided polynucleotide. In Northern blots, mRNA is separated electrophoretically and contacted with a probe. A probe is detected as hybridizing to an mRNA species of a particular size. The amount of hybridization can be quantitated to determine relative amounts of expression, for example under a particular condition. Probes are used for in situ hybridization to cells to detect expression. Probes can also be used in vivo for diagnostic detection of hybridizing sequences. Probes are typically labeled with a radioactive isotope. Other types of detectable labels can be used such as chromophores, fluorophores, and enzymes. Other examples of nucleotide hybridization assays are described in WO092/02526 and U.S. Pat. No. 5,124,246.

[0184] PCR is another means for detecting small amounts of target nucleic acids, methods for which may be found in Sambrook, et al. Molecular Cloning: A Laboratory Manual, CSH Press 1989, pp.14.2-14.33.

[0185] A detectable label may be included in the amplification reaction. Suitable detectable labels include fluorochromes,(e.g. fluorescein isothiocyanate (FITC), rhodamine, Texas Red, phycoerythrin, allophycocyanin, 6-carboxyfluorescein (6-FAM), 2′, 7′-dimethoxy-4′,5′-dichloro-6-carboxyfluorescein, 6-carboxy-X-rhodamine (ROX), 6-carboxy-2′,4′,7′,4,7-hexachlorofluorescein (HEX), 5-carboxyfluorescein (5-FAM) or N,N,N′,N′-tetramethyl-6-carboxyrhodamine (TAMRA)), radioactive labels, (e.g. ³²P, ³⁵s, ³H, etc.), and the like. The label may be a two stage system, where the polynucleotides is conjugated to biotin, haptens, etc. having a high affinity binding partner, e.g. avidin, specific antibodies, etc., where the binding partner is conjugated to a detectable label. The label may be conjugated to one or both of the primers. Alternatively, the pool of nucleotides used in the amplification is labeled, so as to incorporate the label into the amplification product.

[0186] Arrays

[0187] Polynucleotide arrays provide a high throughput technique that can assay a large number of polynucleotides or polypeptides in a sample. This technology can be used as a tool to test for differential expression.

[0188] A variety of methods of producing arrays, as well as variations of these methods, are known in the art and contemplated for use in the invention. For example, arrays can be created by spotting polynucleotide probes onto a substrate (e.g., glass, nitrocellulose, etc.) in a two-dimensional matrix or array having bound probes. The probes can be bound to the substrate by either covalent bonds or by non-specific interactions, such as hydrophobic interactions.

[0189] Samples of polynucleotides can be detectably labeled (e.g., using radioactive or fluorescent labels) and then hybridized to the probes. Double stranded polynucleotides, comprising the labeled sample polynucleotides bound to probe polynucleotides, can be detected once the unbound portion of the sample is washed away. Alternatively, the polynucleotides of the test sample can be immobilized on the array, and the probes detectably labeled. Techniques for constructing arrays and methods of using these arrays are described in, for example, Schena et al. (1996) Proc Natl Acad Sci USA. 93(20):10614-9; Schena et al. (1995) Science 270(5235):467-70; Shalon et al. (1996) Genome Res. 6(7):639-45, U.S. Pat. No. 5,807,522, EP 799 897; WO 97/29212; WO 97/27317; EP 785 280; WO 97/02357; U.S. Pat. No. 5,593,839; U.S. Pat. No. 5,578,832; EP 728 520; U.S. Pat. No. 5,599,695; EP 721.016; U.S. Pat. No. 5,556,752; WO 95/22058; and U.S. Pat. No. 5,631,734. In most embodiments, the “probe” is detectably labeled. In other embodiments, the probe is immobilized on the array and not detectably labeled.

[0190] Arrays can be used, for example, to examine differential expression of genes and can be used to determine gene function. For example, arrays can be used to detect differential expression of a gene corresponding to a polynucleotide described herein, where expression is compared between a test cell and control cell (e.g., cancer cells and normal cells). For example, high expression of a particular message in a cancer cell, which is not observed in a corresponding normal cell, can indicate a cancer specific gene product. Exemplary uses of arrays are further described in, for example, Pappalarado et al., Sem. Radiation Oncol. (1998) 8:217; and Ramsay, Nature Biotechnol. (1998) 16:40. Furthermore, many variations on methods of detection using arrays are well within the skill in the art and within the scope of the present invention. For example, rather than immobilizing the probe to a solid support, the test sample can be immobilized on a solid support which is then contacted with the probe.

[0191] Diagnosis, Prognosis, Assessment of Therapy (Theremetrics), and Management of Cancer

[0192] The-polynucleotides described herein, as well as their gene products and corresponding genes and gene products, are of particular interest as genetic or biochemical markers (e.g., in blood or tissues) that will detect the earliest changes along the carcinogenesis pathway and/or to monitor the efficacy of various therapies and preventive interventions.

[0193] For example, the level of expression of certain polynucleotides can be indicative of a poorer prognosis, and therefore warrant more aggressive chemo- or radio-therapy for a patient or vice versa. The correlation of novel surrogate tumor specific features with response to treatment and outcome in patients can define prognostic indicators that allow the design of tailored therapy based on the molecular profile of the tumor. These therapies include antibody targeting, antagonists (e.g., small molecules), and gene therapy.

[0194] Determining expression of certain polynucleotides and comparison of a patient's profile with known expression in normal tissue and variants of the disease allows a determination of the best possible treatment for a patient, both in terms of specificity of treatment and in terms of comfort level of the patient. Surrogate tumor markers, such as polynucleotide expression, can also be used to better classify, and thus diagnose and treat, different forms and disease states of cancer. Two classifications widely used in oncology that can benefit from identification of the expression levels of the genes corresponding to the polynucleotides described herein are staging of the cancerous disorder, and grading the nature of the cancerous tissue.

[0195] The polynucleotides that correspond to differentially expressed genes, as well as their encoded gene products, can be useful to monitor patients having or susceptible to cancer to detect potentially malignant events at a molecular level before they are detectable at a gross morphological level. In addition, the polynucleotides described herein, as well as the genes corresponding to such polynucleotides, can be useful as therametrics, e.g., to assess the effectiveness of therapy by using the polynucleotides or their encoded gene products, to assess, for example, tumor burden in the patient before, during, and after therapy.

[0196] Furthermore, a polynucleotide identified as corresponding to a gene that is differentially expressed in, and thus is important for, one type of cancer can also have implications for development or risk of development of other types of cancer, e.g., where a polynucleotide represents a gene differentially expressed across various cancer types. Thus, for example, expression of a polynucleotide corresponding to a gene that has clinical implications for cancer can also have clinical implications for metastatic breast cancer, colon cancer, or ovarian cancer, etc.

[0197] Staging. Staging is a process used by physicians to describe how advanced the cancerous state is in a patient. Staging assists the physician in determining a prognosis, planning treatment and evaluating the results of such treatment. Staging systems vary with the types of cancer, but generally involve the following “TNM” system: the type of tumor, indicated by T; whether the cancer has metastasized to nearby lymph nodes, indicated by N; and whether the cancer has metastasized to more distant parts of the body, indicated by M. Generally, if a cancer is only detectable in the area of the primary lesion without having spread to any lymph nodes it is called Stage I. If it has spread only to the closest lymph nodes, it is called Stage II. In Stage III, the cancer has generally spread to the lymph nodes in near proximity to the site of the primary lesion. Cancers that have spread to a distant part of the body, such as the liver, bone, brain or other site, are Stage IV, the most advanced stage.

[0198] The polynucleotides and corresponding genes and gene products described herein can facilitate fine-tuning of the staging process by identifying markers for the aggressiveness of a cancer, e.g. the metastatic potential, as well as the presence in different areas of the body. Thus, a Stage II cancer with a polynucleotide signifying a high metastatic potential cancer can be used to change a borderline Stage II tumor to a Stage III tumor, justifying more aggressive therapy. Conversely, the presence of a polynucleotide signifying a lower metastatic potential allows more conservative staging of a tumor.

[0199] One type of breast cancer is ductal carcinoma in situ (DCIS): DCIS is when the breast cancer cells are completely contained within the breast ducts (the channels in the breast that carry milk to the nipple), and have not spread into the surrounding breast tissue. This may also be referred to as non-invasive or intraductal cancer, as the cancer cells have not yet spread into the surrounding breast tissue and so usually have not spread into any other part of the body.

[0200] Lobular carcinoma in situ breast cancer (LCIS) means that cell changes are found in the lining of the lobules of the breast. It can be present in both breasts. It is also referred to as non-invasive cancer as it has not spread into the surrounding breast tissue.

[0201] Invasive breast cancer can be staged as follows: Stage 1 tumours: these measure less than two centimetres. The lymph glands in the armpit are not affected and there are no signs that the cancer has spread elsewhere in the body; Stage 2 tumours: these measure between two and five centimetres, or the lymph glands in the armpit are affected, or both. However, there are no signs that the cancer has spread further; Stage 3 tumours: these are larger than five centimetres and may be attached to surrounding structures such as the muscle or skin. The lymph glands are usually affected, but there are no signs that the cancer has spread beyond the breast or the lymph glands in the armpit; Stage 4 tumours: these are of any size, but the lymph glands are usually affected and the cancer has spread to other parts of the body. This is secondary breast cancer.

[0202] Grading of cancers. Grade is a term used to describe how closely a tumor resembles normal tissue of its same type. The microscopic appearance of a tumor is used to identify tumor grade based on parameters such as cell morphology, cellular organization, and other markers of differentiation. As a general rule, the grade of a tumor corresponds to its rate of growth or aggressiveness, with undifferentiated or high-grade tumors generally being more aggressive than well-differentiated or low-grade tumors.

[0203] The polynucleotides of the Sequence Listing, and their corresponding genes and gene products, can be especially valuable in determining the grade of the tumor, as they not only can aid in determining the differentiation status of the cells of a tumor, they can also identify factors other than differentiation that are valuable in determining the aggressiveness of a tumor, such as metastatic potential.

[0204] Low grade means that the cancer cells look very like the normal cells. They are usually slowly growing and are less likely to spread. In high grade tumors the cells look very abnormal. They are likely to grow more quickly and are more likely to spread.

[0205] Assessment of proliferation of cells in tumor. The differential expression level of the polynucleotides described herein can facilitate assessment of the rate of proliferation of tumor cells, and thus provide an indicator of the aggressiveness of the rate of tumor growth. For example, assessment of the relative expression levels of genes involved in cell cycle can provide an indication of cellular proliferation, and thus serve as a marker of proliferation.

[0206] Detection of Cancer.

[0207] The polynucleotides corresponding to genes that exhibit the appropriate expression pattern can be used to detect cancer in a subject. The expression of appropriate polynucleotides can be used in the diagnosis, prognosis and management of cancer. Detection of cancer can be determined using expression levels of any of these sequences alone or in combination with the levels of expression of other known cancer genes. Determination of the aggressive nature and/or the metastatic potential of a cancer can be determined by comparing levels of one or more gene products of the genes corresponding to the polynucleotides described herein, and comparing total levels of another sequence known to vary in cancerous tissue, e.g., expression of p53, DCC, ras, FAP (see, e.g., Fearon ER, et al., Cell (1990) 61(5):759; Hamilton SR et al., Cancer (1993) 72:957; Bodmer W, et al., Nat Genet. (1994) 4(3):217; Fearon E R, Ann N Y Acad Sci. (1995) 768:101). For example, development of cancer can be detected by examining the level of expression of a gene corresponding to a polynucleotides described herein to the levels of oncogenes (e.g. ras) or tumor suppressor genes (e.g. FAP or p53). Thus expression of specific marker polynucleotides can be used to discriminate between normal and cancerous tissue, to discriminate between cancers with different cells of origin, to discriminate between cancers with different potential metastatic rates, etc. For a review of other markers of cancer, see, e.g., Hanahan et al. (2000) Cell 100:57-70.

[0208] Treatment of Cancer

[0209] The invention further provides methods for reducing growth of cancer cells. The methods provide for decreasing the expression of a gene that is differentially expressed in a cancer cell or decreasing the level of and/or decreasing an activity of a cancer-associated polypeptide. In general, the methods comprise contacting a cancer cell with a substance that modulates (1) expression of a gene that is differentially expressed in cancer; or (2) a level of and/or an activity of a cancer-associated polypeptide.

[0210] “Reducing growth of cancer cells” includes, but is not limited to, reducing proliferation of cancer cells, and reducing the incidence of a non-cancerous cell becoming a cancerous cell. Whether a reduction in cancer cell growth has been achieved can be readily determined using any known assay, including, but not limited to, [³H]-thymidine incorporation; counting cell number over a period of time; detecting and/or measuring a marker associated with breast cancer (e.g., PSA).

[0211] The present invention provides methods for treating cancer, generally comprising administering to an individual in need thereof a substance that reduces cancer cell growth, in an amount sufficient to reduce cancer cell growth and treat the cancer. Whether a substance, or a specific amount of the substance, is effective in treating cancer can be assessed using any of a variety of known diagnostic assays for cancer, including, but not limited to, proctoscopy, rectal examination, biopsy, contrast radiographic studies, CAT scan, and detection of a tumor marker associated with cancer in the blood of the individual (e.g., PSA (breast-specific antigen)). The substance can be administered systemically or locally. Thus, in some embodiments, the substance is administered locally, and cancer growth is decreased at the site of administration. Local administration may be useful in treating, e.g., a solid tumor.

[0212] A substance that reduces cancer cell growth can be targeted to a cancer cell. Thus, in some embodiments, the invention provides a method of delivering a drug to a cancer cell, comprising administering a drug-antibody complex to a subject, wherein the antibody is specific for a cancer-associated polypeptide, and the drug is one that reduces cancer cell growth, a variety of which are known in the art. Targeting can be accomplished by coupling (e.g., linking, directly or via a linker molecule, either covalently or non-covalently, so as to form a drug-antibody complex) a drug to an antibody specific for a cancer-associated polypeptide. Methods of coupling a drug to an antibody are well known in the art and need not be elaborated upon herein.

[0213] Tumor Classification and Patient Stratification

[0214] The invention further provides for methods of classifying tumors, and thus grouping or “stratifying” patients, according to the expression profile of selected differentially expressed genes in a tumor. Differentially expressed genes can be analyzed for correlation with other differentially expressed genes in a single tumor type or across tumor types. Genes that demonstrate consistent correlation in expression profile in a given cancer cell type (e.g., in a cancer cell or type of cancer) can be grouped together, e.g., when one gene is overexpressed in a tumor, a second gene is also usually overexpressed. Tumors can then be classified according to the expression profile of one or more genes selected from one or more groups.

[0215] The tumor of each patient in a pool of potential patients can be classified as described above. Patients having similarly classified tumors can then be selected for participation in an investigative or clinical trial of a cancer therapeutic where a homogeneous population is desired. The tumor classification of a patient can also be used in assessing the efficacy of a cancer therapeutic in a heterogeneous patient population. In addition, therapy for a patient having a tumor of a given expression profile can then be selected accordingly.

[0216] In another embodiment, differentially expressed gene products (e.g., polypeptides or polynucleotides encoding such polypeptides) may be effectively used in treatment through vaccination. The growth of cancer cells is naturally limited in part due to immune surveillance. Stimulation of the immune system using a particular tumor-specific antigen enhances the effect towards the tumor expressing the antigen. An active vaccine comprising a polypeptide encoded by the cDNA of this invention would be appropriately administered to subjects having an alteration, e.g., overabundance, of the corresponding. RNA, or those predisposed for developing cancer cells with an alteration of the same RNA. Polypeptide antigens are typically combined with an adjuvant as part of a vaccine composition. The vaccine is preferably administered first as a priming dose, and then again as a boosting dose, usually at least four weeks later. Further boosting doses may be given to enhance the effect. The dose and its timing are usually determined by the person responsible for the treatment.

[0217] The invention also encompasses the selection of a therapeutic regimen based upon the expression profile of differentially expressed genes in the patient's tumor. For example, a tumor can be analyzed for its expression profile of the genes corresponding to SEQ ID NOS: 1-13996 as described herein, e.g., the tumor is analyzed to determine which genes are expressed at elevated levels or at decreased levels relative to normal cells of the same tissue type. The expression patterns of the tumor are then compared to the expression patterns of tumors that respond to a selected therapy. Where the expression profiles of the test tumor cell and the expression profile of a tumor cell of known drug responsivity at least substantially match (e.g., selected sets of genes at elevated levels in the tumor of known drug responsivity and are also at elevated levels in the test tumor cell), then the therapeutic agent selected for therapy is the drug to which tumors with that expression pattern respond.

[0218] Pattern Matching in Diagnosis Using Arrays

[0219] In another embodiment, the diagnostic and/or prognostic methods of the invention involve detection of expression of a selected set of genes in a test sample to produce a test expression pattern (TEP). The TEP is compared to a reference expression pattern (REP), which is generated by detection of expression of the selected set of genes in a reference sample (e.g., a positive or negative control sample). The selected set of genes includes at least one of the genes of the invention, which genes correspond to the polynucleotide sequences described herein. Of particular interest is a selected set of genes that includes gene differentially expressed in the disease for which the test sample is to be screened.

Identification of Therapeutic Targets and Anti-Cancer Therapeutic Agents

[0220] The present invention also encompasses methods for identification of agents having the ability to modulate activity of a differentially expressed gene product, as well as methods for identifying a differentially expressed gene product as a therapeutic target for treatment of cancer.

[0221] Identification of compounds that modulate activity of a differentially expressed gene product can be accomplished using any of a variety of drug screening techniques. Such agents are candidates for development of cancer therapies. Of particular interest are screening assays for agents that have tolerable toxicity for normal, non-cancerous human cells. The screening assays of the invention are generally based upon the ability of the agent to modulate an activity of a differentially expressed gene product and/or to inhibit or suppress phenomenon associated with cancer (e.g. cell proliferation, colony formation, cell cycle arrest, metastasis, and the like).

[0222] Screening of Candidate Agents

[0223] Screening assays can be based upon any of a variety of techniques readily available and known fo one of ordinary skill in the art. In general, the screening assays involve contacting a cancerous cell with a candidate agent, and assessing the effect upon biological activity of a differentially expressed gene product. The effect upon a biological activity can be detected by, for example, detection of expression of a gene product of a differentially expressed gene (e.g., a decrease in mRNA or polypeptide levels, would in turn cause a decrease in biological activity of the gene product). Alternatively or in addition, the effect of the candidate agent can be assessed by examining the effect of the candidate agent in a functional assay. For example, where the differentially expressed gene product is an enzyme, then the effect upon biological activity can be assessed by detecting a level of enzymatic activity associated with the differentially expressed gene product. The functional assay will be selected according to the differentially expressed gene product. In general, where the differentially expressed gene is increased in expression in a cancerous cell, agents of interest are those that decrease activity of the differentially expressed gene product.

[0224] Assays described infra can be readily adapted in the screening assay embodiments of the invention. Exemplary assays useful in screening candidate agents include, but are not limited to, hybridization-based assays (e.g., use of nucleic acid probes or primers to assess expression levels), antibody-based assays (e.g., to assess levels of polypeptide gene products), binding assays (e.g., to detect interaction of a candidate agent with a differentially expressed polypeptide, which assays may be competitive assays where a natural or synthetic ligand for the polypeptide is available), and the like. Additional exemplary assays include, but are not necessarily limited to, cell proliferation assays, antisense knockout assays, assays to detect inhibition of cell cycle, assays of induction of cell death/apoptosis, and the like. Generally such assays are conducted in vitro, but many assays can be adapted for in vivo analyses, e.g., in an animal model of the cancer.

[0225] Identification of Therapeutic Targets

[0226] In another embodiment, the invention contemplates identification of differentially expressed genes and gene products as therapeutic targets. In-some respects, this is the converse of the assays described above for identification of agents having activity in modulating (e.g., decreasing or increasing) activity of a differentially expressed gene product.

[0227] In this embodiment, therapeutic targets are identified by examining the effect(s) of an agent that can be demonstrated or has been demonstrated to modulate a cancerous phenotype (e.g., inhibit or suppress or prevent development of a cancerous phenotype). Such agents are generally referred to herein as an “anti-cancer agent”, which agents encompass chemotherapeutic agents. For example, the agent can be an antisense oligonucleotide that is specific for a selected gene transcript. For example, the antisense oligonucleotide may have a sequence corresponding to a sequence of a differentially expressed gene described herein, e.g., a sequence of one of SEQ ID NOS: 1-13996.

[0228] Assays for identification of therapeutic targets can be conducted in a variety of ways using methods that are well known to one of ordinary skill in the art. For example, a test cancerous cell that expresses or overexpresses a differentially expressed gene is contacted with an anti-cancer agent, the effect upon a cancerous phenotype and a biological activity of the candidate gene product assessed. The biological activity of the candidate gene product can be assayed be examining, for example, modulation of expression of a gene encoding the candidate gene product (e.g., as detected by, for example, an increase or decrease in transcript levels or polypeptide levels), or modulation of an enzymatic or other activity of the gene product. The cancerous phenotype can be, for example, cellular proliferation, loss of contact inhibition of growth (e.g., colony formation), tumor growth (in vitro or in vivo), and the like. Alternatively or in addition, the effect of modulation of a biological activity of the candidate target gene upon cell death/apoptosis or cell cycle regulation can be assessed.

[0229] Inhibition or suppression of a cancerous phenotype, or an increase in cell death or apoptosis as a result of modulation of biological activity of a candidate gene product indicates that the candidate gene product is a suitable target for cancer therapy. Assays described infra can be readily adapted for assays for identification of therapeutic targets. Generally such assays are conducted in vitro, but many assays can be adapted for in vivo analyses, e.g., in an appropriate, art-accepted animal model of the cancer.

[0230] Candidate Agents

[0231] The term “agent” as used herein describes any molecule, e.g. protein or pharmaceutical., with the capability of modulating a biological activity of a gene product of a differentially expressed gene. Generally a plurality of assay mixtures are run in parallel with different agent concentrations to obtain a differential response to the various concentrations. Typically, one of these concentrations serves as a negative control, i.e. at zero concentration or below the level of detection.

[0232] Candidate agents encompass numerous chemical classes, though typically they are organic molecules, preferably small organic compounds having a molecular weight of more than 50 and less than about 2,500 daltons. Candidate agents comprise functional groups necessary for structural interaction with proteins, particularly hydrogen bonding, and typically include at least an amine, carbonyl, hydroxyl or carboxyl group, preferably at least two of the functional chemical groups. The candidate agents often comprise cyclical carbon or heterocyclic structures and/or aromatic or polyaromatic structures substituted with one or more of the above functional groups. Candidate agents are also found among biomolecules including, but not limited to: peptides, saccharides, fatty acids, steroids, purines, pyrimidines, derivatives, structural analogs or combinations thereof.

[0233] Candidate agents are obtained from a wide variety of sources including libraries of synthetic or natural compounds. For example, numerous means are available for random and directed synthesis of a wide variety of organic compounds and biomolecules, including expression of randomized oligonucleotides and oligopeptides. Alternatively, libraries of natural compounds in the form of bacterial, fungal, plant and animal extracts (including extracts from human tissue to identify endogenous factors affecting differentially expressed gene products) are available or readily produced. Additionally, natural or synthetically produced libraries and compounds are readily modified through conventional chemical, physical and biochemical means, and may be used to produce combinatorial libraries. Known pharmacological agents may be subjected to directed or random chemical modifications, such as acylation, alkylation, esterification, amidification, etc. to produce structural analogs.

[0234] Exemplary candidate agents of particular interest include, but are not limited to, antisense and RNAi polynucleotides, and antibodies, soluble receptors, and the like. Antibodies and soluble receptors are of particular interest as candidate agents where the target differentially expressed gene product is secreted or accessible at the cell-surface (e.g., receptors and other molecule stably-associated with the outer cell membrane).

[0235] For method that involve RNAi (RNA interference), a double stranded RNA (dsRNA) molecule is usually used. The dsRNA is prepared to be substantially identical to at least a segment of a subject polynucleotide (e.g. a cDNA or gene). In general, the dsRNA is selected to have at least 70%, 75%, 80%, 85% or 90% sequence identity with the subject polynucleotide over at least a segment of the candidate gene. In other instances, the sequence identity is even higher, such as 95%, 97% or 99%, and in still other instances, there is 100% sequence identity with the subject polynucleotide over at least a segment of the subject polynucleotide. The size of the segment over which there is sequence identity can vary depending upon the size of the subject polynucleotide. In general, however, there is substantial sequence identity over at least 15, 20, 25, 30, 35, 40 or 50 nucleotides. In other instances, there is substantial sequence identity over at least 100, 200, 300, 400, 500 or 1000 nucleotides; in still other instances, there is substantial sequence identity over the entire length of the subject polynucleotide, i.e., the coding and non-coding region of the candidate gene.

[0236] Because only substantial sequence similarity between the subject polynucleotide and the dsRNA is necessary, sequence variations between these two species arising from genetic mutations, evolutionary divergence and polymorphisms can be tolerated. Moreover, as described further infra, the dsRNA can include various modified or nucleotide analogs.

[0237] Usually the dsRNA consists of two separate complementary RNA strands. However, in some instances, the dsRNA may be formed by a single strand of RNA that is self-complementary, such that the strand loops back upon itself to form a hairpin loop. Regardless of form, RNA duplex formation can occur inside or outside of a cell.

[0238] The size of the dsRNA that is utilized varies according to the size of the subject polynucleotide whose expression is to be suppressed and is sufficiently long to be effective in reducing expression of the subject polynucleotide in a cell. Generally, the dsRNA is at least 10-15 nucleotides long. In certain applications, the dsRNA is less than 20, 21, 22, 23, 24 or 25 nucleotides in length. In other instances, the dsRNA is at least 50, 100, 150 or 200 nucleotides in length. The dsRNA can be longer still in certain other applications, such as at least 300, 400, 500 or 600 nucleotides. Typically, the dsRNA is not longer than 3000 nucleotides. The optimal size for any particular subject polynucleotide can be determined by one of ordinary skill in the art without undue experimentation by varying the size of the dsRNA in a systematic fashion and determining whether the size selected is effective in interfering with expression of the subject polynucleotide.

[0239] dsRNA can be prepared according to any of a number of methods that are known in the art, including in vitro and in vivo methods, as well as by synthetic chemistry approaches.

[0240] In vitro methods. Certain methods generally involve inserting the segment corresponding to the candidate gene that is to be transcribed between a promoter or pair of promoters that are oriented to drive transcription of the inserted segment and then utilizing an appropriate RNA polymerase to carry out transcription. One such arrangement involves positioning a DNA fragment corresponding to the candidate gene or segment thereof into a vector such that it is flanked by two opposable polymerase-specific promoters that can be same or different. Transcription from such promoters produces two complementary RNA strands that can subsequently anneal to form the desired dsRNA. Exemplary plasmids for use in such systems include the plasmid (PCR 4.0 TOPO) (available from Invitrogen). Another example is the vector pGEM-T (Promega, Madison, Wis.) in which the oppositely oriented promoters are T7 and SP6; the T3 promoter can also be utilized.

[0241] In a second arrangement, DNA fragments corresponding to the segment of the subject polynucleotide that is to be transcribed is inserted both in the sense and antisense orientation downstream of a single promoter. In this system, the sense and antisense fragments are cotranscribed to generate a single RNA strand that is self-complementary and thus can form dsRNA.

[0242] Various other in vitro methods have been described. Examples of such methods include, but are not limited to, the methods described by Sadher et al. (Biochem. Int. 14:1015, 1987); by Bhattacharyya (Nature 343:484, 1990); and by Livache, et al. (U.S. Pat. No. 5,795,715), each of which is incorporated herein by reference in its entirety.

[0243] Single-stranded RNA can also be produced using a combination of enzymatic and organic synthesis or by total organic synthesis. The use of synthetic chemical methods enable one to introduce desired modified nucleotides or nucleotide analogs into the dsRNA.

[0244] In vivo methods. dsRNA can also be prepared in vivo according to a number of established methods (see, e.g., Sambrook, et al. (1989) Molecular Cloning: A Laboratory Manual, 2^{nd} ed.; Transcription and Translation (B. D. Hames, and S. J. Higgins, Eds., 1984); DNA Cloning, volumes I and II (D. N. Glover, Ed., 1985); and Oligonucleotide Synthesis (M. J. Gait, Ed., 1984, each of which is incorporated herein by reference in its entirety).

[0245] Once the single-stranded RNA has been formed, the complementary strands are allowed to anneal to form duplex RNA. Transcripts are typically treated with DNAase and further purified according to established protocols to remove proteins. Usually such purification methods are not conducted with phenol:chloroform. The resulting purified transcripts are subsequently dissolved in RNAase free water or a buffer of suitable composition.

[0246] dsRNA is generated by annealing the sense and anti-sense RNA in vitro. Generally, the strands are initially denatured to keep the strands separate and to avoid self-annealing. During the annealing process, typically certain ratios of the sense and antisense strands are combined to facilitate the annealing process. In some instances, a molar ratio of sense to antisense strands of 3:7 is used; in other instances, a ratio of 4:6 is utilized; and in still other instances, the ratio is 1:1.

[0247] The buffer composition utilized during the annealing process can in some instances affect the efficacy of the annealing process and subsequent transfection procedure. While some have indicated that the buffered solution used to carry out the annealing process should include a potassium salt such as potassium chloride (e.g. at a concentration of about 80 mM). In some embodiments, the buffer is substantially postassium free. Once single-stranded RNA has annealed to form duplex RNA, typically any single-strand overhangs are removed using an enzyme that specifically cleaves such overhangs (e.g., RNAase A or RNAase T).

[0248] Once the dsRNA has been formed, it is introduced into a reference cell, which can include an individual cell or a population of cells (e.g., a tissue, an embryo and an entire organism). The cell can be from essentially any source, including animal, plant, viral, bacterial, fungal and other sources. If a tissue, the tissue can include dividing or nondividing and differentiated or undifferentiated cells. Further, the tissue can include germ line cells and somatic cells. Examples of differentiated cells that can be utilized include, but are not limited to, neurons, glial cells, blood cells, megakaryocytes, lymphocytes, macrophages, neutrophils, eosinophils, basophils, mast cells, leukocytes, granulocytes, keratinocytes, adipocytes, osteoblasts, osteoclasts, hepatocytes, cells of the endocrine or exocrine glands, fibroblasts, myocytes, cardiomyocytes, and endothelial cells. The cell can be an individual cell of an embryo, and can be a blastocyte or an oocyte.

[0249] Certain methods are conducted using model systems for particular cellular states (e.g., a disease). For instance, certain methods provided herein are conducted with a cancer cell lines that serves as a model system for investigating genes that are correlated with various cancers.

[0250] A number of options can be utilized to deliver the dsRNA into a cell or population of cells such as in a cell culture, tissue or embryo. For instance, RNA can be directly introduced intracellularly. Various physical methods are generally utilized in such instances, such as administration by microinjection (see, e.g., Zemicka-Goetz, et al. (1997) Development 124:1133-1137; and Wianny, et al. (1998) Chromosoma 107: 430-439).

[0251] Other options for cellular delivery include permeabilizing the cell membrane and electroporation in the presence of the dsRNA, liposome-mediated transfection, or transfection using chemicals such as calcium phosphate. A number of established gene therapy techniques can also be utilized to introduce the dsRNA into a cell. By introducing a viral construct within a viral particle, for instance, one can achieve efficient introduction of an expression construct into the cell and transcription of the RNA encoded by the construct.

[0252] If the dsRNA is to be introduced into an organism or tissue, gene gun technology is an option that can be employed. This generally involves immobilizing the dsRNA on a gold particle which is subsequently fired into the desired tissue. Research has also shown that mammalian cells have transport mechanisms for taking in dsRNA (see, e.g., Asher, et al. (1969) Nature 223:715-717). Consequently, another delivery option is to administer the dsRNA extracellularly into a body cavity, interstitial space or into the blood system of the mammal for subsequent uptake by such transport processes. The lood and lymph systems and the cerebrospinal fluid are potential sites for injecting dsRNA. Oral, topical, parenteral, rectal and intraperitoneal administration are also possible modes of administration.

[0253] The composition introduced can also include various other agents in addition to the dsRNA. Examples of such agents include, but are not limited to, those that stabilize the dsRNA, enhance cellular uptake and/or increase the extent of interference. Typically, the dsRNA is introduced in a buffer that is compatible with the composition of the cell into which the RNA is introduced to prevent the cell from being shocked. The minimum size of the dsRNA that effectively achieves gene silencing can also influence the choice of delivery system and solution composition.

[0254] Sufficient dsRNA is introduced into the tissue to cause a detectable change in expression of a taget gene (assuming the candidate gene is in fact being expressed in the cell into which the dsRNA is introduced) using available detection methodologies. Thus, in some instances, sufficient dsRNA is introduced to achieve at least a 5-10% reduction in candidate gene expression as compared to a cell in which the dsRNA is not introduced. In other instances, inhibition is at least 20, 30, 40 or 50%. In still other instances, the inhibition is at least 60, 70, 80, 90 or 95%. Expression in some instances is essentially completely inhibited to undetectable levels.

[0255] The amount of dsRNA introduced depends upon various factors such as the mode of administration utilized, the size of the dsRNA, the number of cells into which dsRNA is administered, and the age and size of an animal if dsRNA is introduced into an animal. An appropriate amount can be determined by those of ordinary skill in the art by initially administering dsRNA at several different concentrations for example, for example. In certain instances when dsRNA is introduced into a cell culture, the amount of dsRNA introduced into the cells varies from about 0.5 to 3 μg per 10⁶ cells.

[0256] A number of options are available to detect interference of candidate gene expression (i.e., to detect candidate gene silencing). In general, inhibition in expression is detected by detecting a decrease in the level of the protein encoded by the candidate gene, determining the level of mRNA transcribed from the gene and/or detecting a change in phenotype associated with candidate gene expression.

[0257] Use of Polypeptides to Screen for Peptide Analogs and Antagonists

[0258] Polypeptides encoded by differentially expressed genes identified herein can be used to screen peptide libraries to identify binding partners, such as receptors, from among the encoded polypeptides. Peptide libraries can be synthesized according to methods known in the art (see, e.g., U.S. Pat. No. 5,010,175 and WO 91/17823).

[0259] Agonists or antagonists of the polypeptides of the invention can be screened using any available method known in the art, such as signal transduction, antibody binding, receptor binding, mitogenic assays, chemotaxis assays, etc. The assay conditions ideally should resemble the conditions under which the native activity is exhibited in vivo, that is, under physiologic pH, temperature, and ionic strength. Suitable agonists or antagonists will exhibit strong inhibition or enhancement of the native activity at concentrations that do not cause toxic side effects in the subject. Agonists or antagonists that compete for binding to the native polypeptide can require concentrations equal to or greater than the native concentration, while inhibitors capable of binding irreversibly to the polypeptide can be added in concentrations on the order of the native concentration.

[0260] Such screening and experimentation can lead to identification of a polypeptide binding partner, such as a receptor, encoded by a gene or a cDNA corresponding to a polynucleotide described herein, and at least one peptide agonist or antagonist of the binding partner. Such agonists and antagonists can be used to modulate, enhance, or inhibit receptor function in cells to which the receptor is native, or in cells that possess the receptor as a result of genetic engineering. Further, if the receptor shares biologically important characteristics with a known receptor, information about agonist/antagonist binding can facilitate development of improved agonists/antagonists of the known receptor.

[0261] Vaccines and Uses

[0262] The differentially expressed nucleic acids and polypeptides produced by the nucleic acids of the invention can also be used to modulate primary immune response to prevent or treat cancer. Every immune response is a complex and intricately regulated sequence of events involving several cell types. It is triggered when an antigen enters the body and encounters a specialized class of cells called antigen-presenting cells (APCs). These APCs capture a minute amount of the antigen and display it in a form that can be recognized by antigen-specific helper T lymphocytes. The helper (Th) cells become activated and, in turn, promote the activation of other classes of lymphocytes, such as B cells or cytotoxic T cells. The activated lymphocytes then proliferate and carry out their specific effector functions, which in many cases successfully activate or eliminate the antigen. Thus, activating the immune response to a particular antigen associated with a cancer cell can protect the patient from developing cancer or result in lymphocytes eliminating cancer cells expressing the antigen.

[0263] Gene products, including polypeptides, mRNA (particularly mRNAs having distinct secondary and/or tertiary structures), cDNA, or complete gene, can be prepared and used in vaccines for the treatment or prevention of hyperproliferative disorders and cancers. The nucleic acids and polypeptides can be utilized to enhance the immune response, prevent tumor progression, prevent hyperproliferative cell growth, and the like. Methods for selecting nucleic acids and polypeptides that are capable of enhancing the immune response are known in the art. Preferably, the gene products for use in a vaccine are gene products which are present on the surface of a cell and are recognizable by lymphocytes and antibodies.

[0264] The gene products may be formulated with pharmaceutically acceptable carriers into pharmaceutical compositions by methods known in the art. The composition is useful as a vaccine to prevent or treat cancer. The composition may further comprise at least one co-immunostimulatory molecule, including but not limited to one or more major histocompatibility complex (MHC) molecules, such as a class I or class II molecule, preferably a class I molecule. The composition may further comprise other stimulator molecules including B7.1, B7.2, ICAM-1, ICAM-2, LFA-1, LFA-3, CD72 and the like, immunostimulatory polynucleotides (which comprise an 5′-CG-3′ wherein the cytosine is unmethylated), and cytokines which include but are not limited to IL-1 through IL-15, TNF-α, IFN-γ, RANTES, G-CSF, M-CSF, IFN-α, CTAP III, ENA-78, GRO, 1-309, PF-4, IP-10, LD-78, MGSA, MIP-1α, MIP-1β, or combination thereof, and the like for immunopotentiation. In one embodiment, the immunopotentiators of particular interest are those that facilitate a Th1 immune response.

[0265] The gene products may also be prepared with a carrier that will protect the gene products against rapid elimination from the body, such as a controlled release formulation, including implants and microencapsulated delivery systems. Biodegradable polymers can be used, such as ethylene vinyl acetate, polyanhydrides, polyglycolic acid, collagen, polyorthoesters, polylactic acid, and the like. Methods for preparation of such formulations are known in the art.

[0266] In the methods of preventing or treating cancer, the gene products may be administered via one of several routes including but not limited to transdermal, transmucosal, intravenous, intramuscular, subcutaneous, intradermal, intraperitoneal, intrathecal, intrapleural, intrauterine, rectal, vaginal, topical, intratumor, and the like. For transmucosal or transdermal administration, penetrants appropriate to the barrier to be permeated are used in the formulation. Such penetrants are generally known in the art, and include, for example, administration bile salts and fusidic acid derivatives. In addition, detergents may be used to facilitate permeation. Transmucosal administration may be by nasal sprays or suppositories. For oral administration, the gene products are formulated into conventional oral administration form such as capsules, tablets, elixirs and the like.

[0267] The gene product is administered to a patient in an amount effective to prevent or treat cancer. In general, it is desirable to provide the patient with a dosage of gene product of at least about 1 pg per Kg body weight, preferably at least about 1 ng per Kg body weight, more preferably at least about 1 μg or greater per Kg body weight of the recipient. A range of from about 1 ng per Kg body weight to about 100 mg per Kg body weight is preferred although a lower or higher dose mlay be administered. The dose is effective to prime, stimulate and/or cause the clonal expansion of antigen-specific T lymphocytes, preferably cytotoxic T lymphocytes, which in turn are capable of preventing or treating cancer in the recipient. The dose is administered at least once and may be provided as a bolus or a continuous administration. Multiple administrations of the dose over a period of several weeks to months may be preferable. Subsequent doses may be administered as indicated.

[0268] In another method of treatment, autologous cytotoxic lymphocytes or tumor infiltrating lymphocytes may be obtained from a patient with cancer. The lymphocytes are grown in culture, and antigen-specific lymphocytes are expanded by culturing in the presence of the specific gene products alone or in combination with at least one co-immunostimulatory molecule with cytokines. The antigen-specific lymphocytes are then infused back into the patient in an amount effective to reduce or eliminate the tumors in the patient. Cancer vaccines and their uses are further described in U.S. Pat. No. 5,961,978; U.S. Pat. No. 5,993,829; U.S. Pat. No. 6,132,980; and WO 00/38706.

[0269] Pharmaceutical Compositions and Uses

[0270] Pharmaceutical compositions can comprise polypeptides, receptors that specifically bind a polypeptide produced by a differentially expressed gene (e.g., antibodies, or polynucleotides (including antisense nucleotides and ribozymes) of the claimed invention in a therapeutically effective amount. The compositions can be used to treat primary tumors as well as metastases of primary tumors. In addition, the pharmaceutical compositions can be used in conjunction with conventional methods of cancer treatment, e.g., to sensitize tumors to radiation or conventional chemotherapy.

[0271] Where the pharmaceutical composition comprises a receptor (such as an antibody) that specifically binds to a gene product encoded by a differentially expressed gene, the receptor can be coupled to a drug for delivery to a treatment site or coupled to a detectable label to facilitate imaging of a site comprising cancer cells. Methods for coupling antibodies to drugs and detectable labels are well known in the art, as are methods for imaging using detectable labels.

[0272] The term “therapeutically effective amount” as used herein refers to an amount of a therapeutic agent to treat, ameliorate, or prevent a desired disease or condition, or to exhibit a detectable therapeutic or preventative effect. The effect can be detected by, for example, chemical markers or antigen levels. Therapeutic effects also include reduction in physical symptoms, such as decreased body temperature.

[0273] The precise effective amount for a subject will depend upon the subject's size and health, the nature and extent of the condition, and the therapeutics or combination of therapeutics selected for administration. Thus, it is not useful to specify an exact effective amount in advance. However, the effective amount for a given situation is determined by routine experimentation and is within the judgment of the clinician. For purposes of the present invention, an effective dose will generally be from about 0.01 mg/ kg to 50 mg/kg or 0.05 mg/kg to about 10 mg/kg of the DNA constructs in the individual to which it is administered.

[0274] A pharmaceutical composition can also contain a pharmaceutically acceptable carrier. The term “pharmaceutically acceptable carrier” refers to a carrier for administration of a therapeutic agent, such as antibodies or a polypeptide, genes, and other therapeutic agents. The term refers to any pharmaceutical carrier that does not itself induce the production of antibodies harmful to the individual receiving the composition, and which can be administered without undue toxicity. Suitable carriers can be large, slowly metabolized macromolecules such as proteins, polysaccharides, polylactic acids, polyglycolic acids, polymeric amino acids, amino acid copolymers, lipid aggregates and inactive virus particles. Such carriers are well known to those of ordinary skill in the art. Pharmaceutically acceptable carriers in therapeutic compositions can include liquids such as water, saline, glycerol and ethanol. Auxiliary substances, such as wetting or emulsifying agents, pH buffering substances, and the like, can also be present in such vehicles.

[0275] Typically, the therapeutic compositions are prepared as injectables, either as liquid solutions or suspensions; solid forms suitable for solution in, or suspension in, liquid vehicles prior to injection can also be prepared. Liposomes are included within the definition of a pharmaceutically acceptable carrier. Pharmaceutically acceptable salts can also be present in the pharmaceutical composition, e.g., mineral acid salts such as hydrochlorides, hydrobromides, phosphates, sulfates, and the like; and the salts of organic acids such as acetates, propionates, malonates, benzoates, and the like. A thorough discussion of pharmaceutically acceptable excipients is available in Remington: The Science and Practice of Pharmacy (1995) Alfonso Gennaro, Lippincott, Williams, & Wilkins.

[0276] Delivery Methods

[0277] Once formulated, the compositions contemplated by the invention can be (1) administered directly to the subject (e.g., as polynucleotide, polypeptides, small molecule agonists or antagonists, and the like); or (2) delivered ex vivo, to cells derived from the subject (e.g., as in ex vivo gene therapy). Direct delivery of the compositions will generally be accomplished by parenteral injection, e.g., subcutaneously, intraperitoneally, intravenously or intramuscularly, intratumoral or to the interstitial space of a tissue. Other modes of administration include oral and pulmonary administration, suppositories, and transdermal applications, needles, and gene guns or hyposprays. Dosage treatment can be a single dose schedule or a multiple dose schedule.

[0278] Methods for the ex vivo delivery and reimplantation of transformed cells into a subject are known in the art and described in e.g., International Publication No. WO 93/14778. Examples of cells useful in ex vivo applications include, for example, stem cells, particularly hematopoetic, lymph cells, macrophages, dendritic cells, or tumor cells. Generally, delivery of nucleic acids for both ex vivo and in vitro applications can be accomplished by, for example, dextran-mediated transfection, calcium phosphate precipitation, polybrene mediated transfection, protoplast fusion, electroporation, encapsulation of the polynucleotide(s) in liposomes, and direct microinjection of the DNA into nuclei, all well known in the art.

[0279] Once differential expression of a gene corresponding to a polynucleotide described herein has been found to correlate with a proliferative disorder, such as neoplasia, dysplasia, and hyperplasia, the disorder can be amenable to treatment by administration of a therapeutic agent based on the provided polynucleotide, corresponding polypeptide or other corresponding molecule (e.g., antisense, ribozyme, etc.). In other embodiments, the disorder can be amenable to treatment by administration of a small molecule drug that, for example, serves as an inhibitor (antagonist) of the function of the encoded gene product of a gene having increased expression in cancerous cells relative to normal cells or as an agonist for gene products that are decreased in expression in cancerous cells (e.g., to promote the activity of gene products that act as tumor suppressors).

[0280] The dose and the means of administration of the inventive pharmaceutical compositions are determined based on the specific qualities of the therapeutic composition, the condition, age, and weight of the patient, the progression of the disease, and other relevant factors. For example, administration of polynucleotide therapeutic composition agents includes local or systemic administration, including injection, oral administration, particle gun or catheterized administration, and topical administration. In general, the therapeutic polynucleotide composition contains an expression construct comprising a promoter operably linked to a polynucleotide of at least 12, 22, 25, 30, or 35 contiguous nt of the polynucleotide disclosed herein. Various methods can be used to administer the therapeutic composition directly to a specific site in the body. For example, a small metastatic lesion is located and the therapeutic composition injected several times in several different locations within the body of the tumor. Alternatively, arteries which serve a tumor are identified, and the therapeutic composition injected into such an artery, in order to deliver the composition directly into the tumor. A tumor that has a necrotic center is aspirated and the composition injected directly into the now empty center of the tumor. The antisense composition is directly administered to the surface of the tumor, for example, by topical application of the composition. X-ray imaging is used to assist in certain of the above delivery methods.

[0281] Targeted delivery of therapeutic compositions containing an antisense polynucleotide, subgenomic polynucleotides, or antibodies to specific tissues can also be used. Receptor-mediated DNA delivery techniques are described in, for example, Findeis et al., Trends Biotechnol. (1993) 11:202; Chiou et al., Gene Therapeutics: Methods And Applications Of Direct Gene Transfer (J. A. Wolff, ed.) (1994); Wu et al., J. Biol. Chem. (1988) 263:621; Wu et al., J. Biol. Chem. (1994) 269:542; Zenke et al., Proc. Natl. Acad. Sci. (USA) (1990) 87:3655; Wu et al., J. Biol. Chem. (1991) 266:338. Therapeutic compositions containing a polynucleotide are administered in a range of about 100 ng to about 200 mg of DNA for local administration in a gene therapy protocol. Concentration ranges of about 500 ng to about 50 mg, about 1 μg to about 2 mg, about 5 μg to about 500 pg, and about 20 μg to about 100 :g of DNA can also be used during a gene therapy protocol. Factors such as method of action (e.g., for enhancing or inhibiting levels of the encoded gene product) and efficacy of transformation and expression are considerations that will affect the dosage required for ultimate efficacy of the antisense subgenomic polynucleotides.

[0282] The therapeutic polynucleotides and polypeptides of the present invention can be delivered using gene delivery vehicles. The gene delivery vehicle can be of viral or non-viral origin (see generally, Jolly, Cancer Gene Therapy (1994) 1:51; Kimura, Human Gene Therapy (1994) 5:845; Connelly, Human Gene Therapy (1995) 1:185; and Kaplitt, Nature Genetics (1994) 6:148). Expression of such coding sequences can be induced using endogenous mammalian or heterologous promoters. Expression of the coding sequence can be either constitutive or regulated.

[0283] Viral-based vectors for delivery of a desired polynucleotide and expression in a desired cell are well known in the art. Exemplary viral-based vehicles include, but are not limited to, recombinant retroviruses (see, e.g., WO 90/07936; WO 94/03622; WO 93/25698; WO 93/25234; U.S. Pat. No. 5,219,740; WO 93/11230; WO 93/10218; U.S. Pat. No. 4,777,127; GB Patent No. 2,200,651; EP 0 345 242; and WO 91/02805), alphavirus-based vectors (e.g., Sindbis virus vectors, Semliki forest virus (ATCC VR-67; ATCC VR-1247), Ross River virus (ATCC VR-373; ATCC VR-1246) and Venezuelan equine encephalitis virus (ATCC VR-923; ATCC VR-1250; ATCC VR 1249; ATCC VR-532), and adeno-associated virus (AAV) vectors (see, e.g., WO 94/12649, WO 93/03769; WO 93/19191; WO 94/28938; WO 95/11984 and WO 95/00655). Administration of DNA linked to killed adenovirus as described in Curiel, Hum. Gene Ther. (1992) 3:147 can also be employed.

[0284] Non-viral delivery vehicles and methods can also be employed, including, but not limited to, polycationic condensed DNA linked or unlinked to killed adenovirus alone (see, e.g., Curiel, Hum. Gene Ther. (1992) 3:147); ligand-linked DNA (see, e.g., Wu, J. Biol. Chem. (1989) 264:16985); eukaryotic cell delivery vehicles cells (see, e.g., U.S. Pat. No. 5,814,482; WO 95/07994; WO 96/17072; WO 95/30763; and WO 97/42338) and nucleic charge neutralization or fusion with cell membranes. Naked DNA can also be employed. Exemplary naked DNA introduction methods are described in WO 90/11092 and U.S. Pat. No. 5,580,859. Liposomes that can act as gene delivery vehicles are described in U.S. Pat. No. 5,422,120; WO 95/13796; WO 94/23697; WO 91/14445; and EP 0524968. Additional approaches are described in Philip, Mol. Cell Biol. (1994) 14:2411, and in Woffendin, Proc. Natl. Acad. Sci. (1994) 91:1581.

Tumor Classification and Patient Stratification

[0285] The invention further provides for methods of classifying tumors, and thus grouping or “stratifying” patients, according to the expression profile of selected differentially expressed genes in a tumor. The expression patterns of differentially expressed genes can be analyzed for correlation with the expression patterns of other differentially expressed genes in a single tumor type or across tumor types. Genes that demonstrate consistent correlation can be grouped together, e.g., genes are grouped together where if one gene is overexpressed in a tumor, a second gene is also usually overexpressed. Tumors can then be classified according to the expression profile of one or more genes selected from one or more groups.

[0286] For example, a colon tumor can be classified according to expression level of a gene product of one or more genes selected from one or more of the following groups: 1) Group I, which comprises the genes IGF2, TTK, MAPKAPK2, MARCKS, BBS2, CETN2 CGI-148 protein, FGFR4, FHL3, FLJ22066, KIP2, MGC:29604, NQO2, and OGG1; and 2) Group II, which comprises the genes IFITM (I-8U; 1-8D; 9-27), ITAK, and BIRC3/H-IAP 1.

[0287] A Group I-type colon tumor has increased expression of at least one, usually at least two, more usually at least three, even more usually at least four, preferably at least five, more preferably at least six or more, but usually not more than 12, 10, or 8, Group I genes relative to a non-cancerous colon cell, where the expression is increased at least about 1.5-fold, at least about 2-fold, at least about 5-fold, or at least about 10-fold, and can be as high 50-fold, but is usually not more than 20-fold or 30-fold.

[0288] A Group II-type colon tumor is increased in expression of at least one, usually at least two, more usually at least three, Group II genes relative to a non-cancerous colon cells, where the expression is increased at least about 1.5-fold, at least about 2-fold, at least about 5-fold, or at least about 10-fold, and can be as high 50-fold, but is usually not more than 20-fold or 30-fold.

[0289] A Group I+II-type colon tumor is increased in expression of at least one, usually at least two, more usually at least three, even more usually at least four, preferably at least five, more preferably at least six or more, but usually not more than 12, 10, or 8, Group I genes relative to a non-cancerous colon cell, and has increased expression of at least one, usually at least two, more usually at least three, Group II genes relative to a non-cancerous colon cells, where expression of both the Group I and Group II genes is increased at least about 1.5-fold, at least about 2-fold, at least about 5-fold, or at least about 10-fold, and can be as high 50-fold, but is usually not more than 20-fold or 30-fold.

[0290] The tumor of each patient in a pool of potential patients for a clinical trial can be classified as described above. Patients having similarly classified tumors can then be selected for participation in an investigative or clinical trial of a cancer therapeutic where a homogeneous population is desired. The tumor classification of a patient can also be used in assessing the efficacy of a cancer therapeutic in a heterogeneous patient population. Thus, comparison of an individual's expression profile to the population profile for a type of cancer, permits the selection or design of drugs or other therapeutic regimens that are expected to be safe and efficacious for a particular patient or patient population (i.e., a group of patients having the same type of cancer).

[0291] In addition, the ability to target populations expected to show the most clinical benefit, based on expression profile can enable: 1) the repositioning of already marketed drugs; 2) the rescue of drug candidates whose clinical development has been discontinued as a result of safety or efficacy limitations, which are patient subgroup-specific; and 3) an accelerated and less costly development for candidate therapeutics and more optimal drug labeling (e.g. since measuring the effect of various doses of an agent on patients with a particular expression profile is useful for optimizing effective dose).

[0292] A certain embodiment of the invention is based on the discovery of genes differentially expressed in cancerous colon cells relative to normal cells, particularly metastatic or pre-metastatic cancerous colon cells relative to normal cells of the same tissue type. The genes of particular interest are those described in the Examples below. The invention is further based on the discovery that colon tumors can be classified according to the expression pattern of one or more of genes, and that patients can thus be classified and diagnosed, and therapy selected accordingly, according to these expression patterns. The gene(s) for analysis of expression of a gene product encoded by at least one gene selected from at least one of the following groups: 1) Group I, which comprises the genes IGF2, TTK, MAPKAPK2, MARCKS, BBS2, CETN2 CGI-148 protein, FGFR4, FHL3, FLJ22066, KIP2, MGC:29604, NQO2, and OGGI; and 2) Group II, which comprises the genes IFITM (I-8U; 1-8D; 9-27), ITAK, and BIRC3/H-IAP1. A tumor can then be classified as a Group I-type, Group II-type, or Group I+II-type tumor based on the expression profile of the tumor. The expression patterns associated with colon cancer, and which provide the basis for tumor classification and patient stratification, are described in the Examples below.

[0293] The methods of the invention can be carried out using any suitable probe for detection of a gene product that is differentially expressed in colon cancer cells. For example, mRNA (or cDNA generated from mRNA) expressed from a differentially expressed gene can be detected using polynucleotide probes. In another example, the differentially expressed gene product is a polypeptide, which polypeptides can be detected using, for example, antibodies that specifically bind such polypeptides or an antigenic portion thereof.

[0294] The present invention relates to methods and compositions useful in diagnosis of colon cancer, design of rational therapy, and the selection of patient populations for the purposes of clinical trials. The invention is based on the discovery that colon tumors of a patient can be classified according to an expression profile of one or more selected genes, which genes are differentially expressed in tumor cells relative to normal cells of the same tissue. Polynucleotides that correspond to the selected differentially expressed genes can be used in diagnostic assays to provide for diagnosis of cancer at the molecular level, and to provide for the basis for rational therapy (e.g., therapy is selected according to the expression pattern of a selected set of genes in the tumor). The gene products encoded by differentially expressed genes can also serve as therapeutic targets, and candidate agents effective against such targets screened by, for example, analyzing the ability of candidate agents to modulate activity of differentially expressed gene products.

[0295] In one aspect, the selected gene(s) for tumor cell (and thus patient) analysis of expression of a gene product encoded by at least one gene selected from at least one of the following groups: 1) Group I, which comprises the genes IGF2, TTK, MAPKAPK2, MARCKS, BBS2, CETN2 CGI-148 protein, FGFR4, FHL3, FLJ22066, KIP2, MGC:29604, NQO2, and OGGI; and 2) Group II, which comprises the genes IFITM (1-8U; 1-8D; 9-27), ITAK, and BIRC3/H-IAP1.

[0296] In another aspect, the invention provides a method for classifying a tumor that shares selected characteristics with respect to a tumor expression profile. In one embodiment, the invention provides a method for classifying a tumor according to an expression profile of one or more genes comprising detecting expression of at least a first Group I gene in a test colon cell sample. Detection of increased expression of the first gene in the test colon cell sample relative to expression of the gene in a control non-cancer cell sample indicates that the tumor is a Group I-type tumor.

[0297] In one embodiment, the first Group I gene is an IGF2 gene. In other specific embodiments, the method further comprises detecting expression of a second Group I gene in the test colon cell sample. Detection of increased expression of the first and second genes in the test colon cell sample relative to expression of the first and second genes, respectively, in a control non-cancer cell sample indicates that the tumor is a Group I-type tumor.

[0298] In another embodiment, the method further comprises detecting expression of a second and third Group I gene in the test colon cell sample. Detection of increased expression of the first, second, and third genes in the test colon cell sample relative to expression of the first, second, and third genes, respectively, in a control non-cancer cell sample indicates that the tumor is a Group I-type tumor. In other embodiments, the expression of the gene(s) is increased about 1.5-fold, about 2-fold, about 5-fold, or about 10-fold in the test sample relative to the control sample.

[0299] In another embodiment, the invention provides a method for classifying a tumor according to an expression profile of one or more genes comprising detecting expression of at least a first Group II gene in a test colon cell sample. Detection of increased expression of the first gene in the test colon cell sample relative to expression of the gene in a control non-cancer cell sample indicates that the tumor is a Group II-type tumor.

[0300] In another embodiment, the first Group II gene is a member of the IF ITM family of genes. In other specific embodiments, the method further comprises detecting expression of a second Group II gene in the test colon cell sample. Detection of increased expression of the first and second genes in the test colon cell sample relative to expression of the first and second genes, respectively, in a control non-cancer cell sample indicates that the tumor is a Group II-type tumor. In other embodiments, the expression of the gene(s) is increased about 1.5-fold, about 2-fold, about 5-fold, or about 10-fold in the test sample relative to the control sample. In yet other specific embodiments, the first Group II gene is 1-8U, 1-8D, or 9-27.

[0301] In another embodiment, the invention provides a method for classifying a tumor according to an expression profile of two or more genes, the method comprising analyzing a test colon cell sample for expression of at least one Group I gene and at least one Group II gene. Detection of increased expression of the at least one Group I gene and the at least one Group II gene in the test cell sample relative to expression of the at least one Group I gene and the at least one Group II gene, respectively, in a control non-cancer cell sample indicates the tumor is a Group I+II-type tumor. In other embodiments, the Group I gene is an IGF2 gene and the Group II gene is a member of the IFITM family of genes. In yet other embodiments, the expression of the genes is increased about 1.5-fold, about 2-fold, about 5-fold, or about 10-fold in the test sample relative to the control sample.

[0302] In another aspect, the invention provides methods for selection of a patient population having a tumor that shares selected characteristics, with respect to a tumor expression profile. This method, referred to herein as “patient stratification,” can be used to improve the design of a clinical trial by providing a patient population that is more homogenous with respect to the tumor type that is to be tested for responsiveness to a new therapy; and in selecting the best therapeutic regiment for a patient in view of an expression profile of the subject's tumor (e.g., rational therapy).

[0303] In another aspect, the invention provides a method for selecting an individual for inclusion in a clinical trial, the method comprising the steps of: detecting a level of expression of a gene product in a test colon cell sample or serum obtained from a subject, the gene product being encoded by at least one gene selected from the group consisting of IGF2, TTK, MAPKAPK2, MARCKS, BBS2, CETN2 CGI-148 protein, FGFR4, FHL3, FLJ22066, KIP2, MGC:29604, NQO2, and OGGI; and comparing the level of expression of the gene product in the test sample to a level of expression in a normal colon cell; wherein detection of a level of expression of the gene product that is significantly higher in the test sample than in a normal cell is a positive indicator for inclusion of the subject in the test population for the clinical trial.

[0304] In another aspect the invention provides a method for selecting an individual for inclusion in a clinical trial, the method comprising the steps of: detecting a level of expression of a gene product in a test colon cell sample obtained from a subject, the gene product being encoded by at least one gene selected from the group consisting of: IFITM 1-8U; 1-8D; 9-27), ITAK, and BIRC3/H-IAP1; and comparing the level of expression of the gene product in the test sample to a level of expression in a normal colon cell; wherein detection of a level of expression of the gene product that is significantly higher in the test sample than in a normal cell is a positive indicator for inclusion of the subject in the test population for the clinical trial.

[0305] In related aspects the invention provides methods of reducing growth of cancerous colon cells by modulation of expression of one or more gene products corresponding to a gene selected from: 1) Group I, which comprises the genes IGF2, TTK, MAPKAPK2, MARCKS, BBS2, CETN2 CGI-148 protein, FGFR4, FHL3, FLJ22066, KIP2, MGC:29604, NQO2, and OGGI; and 2) Group II, which comprises the genes IFITM (I-8U; 1-8D; 9-27), ITAK, and BIRC3/H-IAPI. These methods are useful for treating colon cancer.

[0306] In another aspect, the present invention provides methods for disease detection by analysis of gene expression. In general, diagnostic and prognostic methods of the invention can involve obtaining a test cell from a subject, e.g., colon cells; detecting the level of expression of any one gene or a selected set of genes in the test cell, where the gene(s) are differentially expressed in a colon tumor cell relative to a normal colon cell; and comparing the expression levels of the gene(s) in the test cell to a control level (e.g., a level of expression in a normal (non-cancerous) colon cell). Detection of a level of expression in the test cell that differs from that found in a normal cell indicates that the test cell is a cancerous cell. The method of the invention permits, for example, detection of a small increase or decrease in gene product production from a gene whose overexpression or underexpression (compared to a reference gene) is associated with cancer or the predisposition for a cancer.

[0307] In another aspect the invention provides a method for detecting a cancerous colon cell comprising contacting a sample obtained from a test colon cell with a probe for detection of a gene product of a gene differentially expressed in colon cancer, wherein the gene corresponds to a polynucleotide having a sequence selected from the group consisting of SEQ ID NOS: 1-20, and where contacting is for a time sufficient for binding of the probe to the gene product; and comparing a level of binding of the probe to the sample with a level of probe binding to a control sample obtained from a control colon cell, wherein the control colon cell is of known cancerous state. An increased level of binding of the probe in the test colon cell sample relative to the level of binding in a control sample is indicative of the cancerous state of the test colon cell. In specific embodiments, the probe is a polynucleotide probe and the gene product is nucleic acid. In other specific embodiments, the gene product is a polypeptide. In further embodiments, the gene product or the probe is immobilized on an array.

[0308] In another aspect, the invention provides a method for assessing the cancerous phenotype (e.g., metastasis, aberrant cellular proliferation, and the like) of a colon cell comprising detecting expression of a gene product in a test colon cell sample, wherein the gene comprises a sequence selected from the group consisting of SEQ ID NOS: 1-20; and comparing a level of expression of the gene product in the test colon cell sample with a level of expression of the gene in a control cell sample. Comparison of the level of expression of the gene in the test cell sample relative to the level of expression in the control cell sample is indicative of the cancerous phenotype of the test cell sample. In specific embodiments, detection of expression of the gene is by detecting a level of an RNA transcript in the test cell sample. In other specific embodiments detection of expression of the gene is by detecting a level of a polypeptide in a test sample.

[0309] In another aspect, the invention provides a method for suppressing or inhibiting a cancerous phenotype of a cancerous cell, the method comprising introducing into a mammalian cell an antisense polynucleotide for inhibition of expression of a gene comprising a sequence selected from the group consisting of SEQ ID NOS: 1-20. Inhibition of expression of the gene inhibits development of a cancerous phenotype in the cell. In specific embodiments, the cancerous phenotype is metastasis, aberrant cellular proliferation relative to a normal cell, or loss of contact inhibition of cell growth.

[0310] In another aspect, the invention provides a method for assessing the tumor burden of a subject, the method comprising detecting a level of a differentially expressed gene product in a test sample from a subject suspected of or having a tumor, the differentially expressed gene product comprising a sequence selected from the group consisting of SEQ ID NOS: 1-20. Detection of the level of the gene product in the test sample is indicative of the tumor burden in the subject.

[0311] In another aspect, the invention provides a method for identifying a gene product as a target for a cancer therapeutic, the method comprising contacting a cancerous cell expressing a candidate gene product with an anti-cancer agent, wherein the candidate gene product corresponds to a sequence selected from the group consisting of SEQ ID NOS: 1-20; and analyzing the effect of the anti-cancer agent upon a biological activity of the candidate gene product and upon a cancerous phenotype of the cancerous cell. Modulation of the biological activity of the candidate gene product and modulation of the cancerous phenotype of the cancerous cell indicates the candidate gene product is a target for a cancer therapeutic. In specific embodiments, the cancerous cell is a cancerous colon cell. In other specific embodiments, the inhibitor is an antisense oligonucleotide. In further embodiments, the cancerous phenotype is aberrant cellular proliferation relative to a normal cell, or colony formation due to loss of contact inhibition of cell growth.

[0312] In another aspect, the invention provides a method for identifying agents that decrease biological activity of a gene product differentially expressed in a cancerous cell, the method comprising contacting a candidate agent with a differentially expressed gene product, the differentially expressed gene product corresponding to a sequence selected from the group consisting of SEQ ID NOS: 1-20; and detecting a decrease in a biological activity of the gene product relative to a level of biological activity of the gene product in the absence of the candidate agent. In specific embodiments, the detecting is by detection of a decrease in expression of the differentially expressed gene product. In other specific embodiments, the gene product is mRNA or cDNA prepared from the mRNA gene product. In further embodiments, the gene product is a polypeptide.

[0313] In all embodiments of the invention, analysis of expression of a gene product of a selected gene can be accomplished by analysis of gene transcription (e.g., by generating cDNA clones from mRNAs isolated from a cell suspected of being cancerous and comparing the number of cDNA clones corresponding to the gene in the sample relative to a number of clones present in a non-cancer cell of the same tissue type), detection of an encoded gene product (e.g., assessing a level of polypeptide encoded by a selected gene present in the test cell suspected of being cancerous relative to a level of the polypeptide in a non-cancer cell of the same tissue type), detection of a biological activity of a gene product encoded by a selected gene, and the like.

[0314] In all embodiments of the invention, comparison of gene product expression of a selected gene in a tumor cell can involve, for example, comparison to an “internal” control cell (e.g., a non-cancer cell of the same tissue type obtained from the same patient from whom the sample suspected of having a tumor cell was obtained), comparison to a control cell analyzed in parallel in the assay (e.g., a non-cancer cell, normally of the same tissue type as the test cell or a cancerous cell, normally of the same tissue type as the test cell), or comparison to a level of gene product expression known to be associated with a normal cell or a cancerous cell, normally of the same tissue type (e.g., a level of gene product expression is compared to a known level or range of levels of gene product expression for a normal cell or a cancerous cell, which can be provided in the form of, for example, a standard).

[0315] The sequences disclosed in this patent application were disclosed in several earlier patent applications. The relationship between the SEQ ID NOS in those earlier application and the SEQ ID NOS disclosed herein is shown in Tables 68.

TABLE 68
relationship between SEQ ID NOs. this patent application
and SEQ ID NOs of parent patent applications

| | | | SEQ | corresponding |
|---|---|---|---|---|
| | parent | | IDs in | SEQ IDs |
| | application | | parent | in this patent |
| parent case | no. | filing date | case | application |
| 15805CON | 10/616,900 | Jul. 9, 2003 | 1-321 | 1-321 |
| 16335 | 10/081,519 | Feb. 21, 2002 | 1-20 | 322-341 |
| 18095 | 10/310,673 | Dec. 4, 2002 | 1-2164 | 342-2505 |
| 17767 | 10/501,187 | Jul. 8, 2004 | 1-516 | 2506-3021 |
| 16336 | 10/081,124 | Feb. 21, 2002 | 1-1303 | 3022-4324 |
| 18376 | US04/15421 | May 13, 2004 | 1-9672 | 4325-13996 |

[0316] The disclosures of all prior U.S. applications to which the present application claims priority, which includes those U.S. applications referenced in the table above as well as their respective priority applications, are each incorporated herein by referenced in their entireties for all purposes, including the disclosures found in the Sequence Listings, tables, figures and Examples.

### EXAMPLES

[0317] The following examples are put forth so as to provide those of ordinary skill in the art with a complete disclosure and description of how to make and use the present invention, and are not intended to limit the scope of what the inventors regard as their invention nor are they intended to represent that the experiments below are all or the only experiments performed. Efforts have been made to ensure accuracy with respect to numbers used (e.g. amounts, temperature, etc.) but some experimental errors and deviations should be accounted for. Unless indicated otherwise, parts are parts by weight, molecular weight is weight average molecular weight, temperature is in degrees Centigrade, and pressure is at or near atmospheric.

### Example 1

### Source of Biological Materials and Isolation of Polynucleotides Expressed by the Biological Materials

[0318] Candidate polynucleotides that may represent genes differentially expressed in cancer were obtained from both publicly available sources and from cDNA libraries generted from selected cell lines and patient tissues. In order to obtain the latter ploynucleotides, mRNA was isolated from several selected cell lines and patient tissues, and used to construct cDNA libraries. The cells and tissues that served as sources for these CDNA libraries are summarized in Table 1 below.

TABLE 1
Description of cDNA Libraries

| | | Number of |
|---|---|---|
| Library | | Clones in |
| (lib #) | Description | Library |
| 1 | Human Colon Cell Line Km12 L4: High Metastatic | 308731 |
| | Potential (derived from Km12C) | |
| 2 | Human Colon Cell Line Km12C: Low Metastatic | 284771 |
| | Potential | |
| 3 | Human Breast Cancer Cell Line MDA-MB-231: | 326937 |
| | High Metastatic Potential; micro-mets in lung | |
| 4 | Human Breast Cancer Cell Line MCF7: Non | 318979 |
| | Metastatic | |
| 8 | Human Lung Cancer Cell Line MV-522: High | 223620 |
| | Metastatic Potential | |
| 9 | Human Lung Cancer Cell Line UCP-3: Low | 312503 |
| | Metastatic Potential | |
| 12 | Human microvascular endothelial cells (HMVEC) - | 41938 |
| | UNTREATED (PCR (OligodT) cDNA library) | |
| 13 | Human microvascular endothelial cells (HMVEC) - | 42100 |
| | bFGF TREATED (PCR (OligodT) cDNA library) | |
| 14 | Human microvascular endothelial cells (HMVEC) - | 42825 |
| | VEGF TREATED (PCR (OligodT) cDNA library) | |
| 15 | Normal Colon - UC#2 Patient (MICRODISSECTED | 248436 |
| | PCR (OligodT) cDNA library) | |
| 16 | Colon Tumor - UC#2 Patient (MICRODISSECTED | 263206 |
| | PCR (OligodT) cDNA library) | |
| 17 | Liver Metastasis from Colon Tumor of UC#2 | 266482 |
| | Patient (MICRODISSECTED | |
| | PCR (OligodT) cDNA library) | |
| 18 | Normal Colon - UC#3 Patient (MICRODISSECTED | 36216 |
| | PCR (OligodT) cDNA library) | |
| 19 | Colon Tumor - UC#3 Patient (MICRODISSECTED | 41388 |
| | PCR (OligodT) cDNA library) | |
| 20 | Liver Metastasis from Colon Tumor of UC#3 | 30956 |
| | Patient (MICRODISSECTED | |
| | PCR (OligodT) cDNA library) | |
| 21 | GRRpz Cells derived from normal | 164801 |
| | prostate epithelium | |
| 22 | WOca Cells derived from Gleason Grade 4 prostate | 162088 |
| | cancer epithelium | |
| 23 | Normal Lung Epithelium of Patient #1006 | 306197 |
| | (MICRODISSECTED PCR | |
| | (OligodT) cDNA library) | |
| 24 | Primary tumor, Large Cell Carcinoma of Patient | 309349 |
| | #1006 (MICRODISSECTED PCR (OligodT) cDNA | |
| | library) | |

[0319] The human colon cancer cell line Kml2L4-A (Morikawa, et al., Cancer Research (1988) 6863) is derived from the KM12C cell line. The KM12C cell line (Morikawa et. al Cancer Res. (1988) 48:1943-1948), which is poorly metastatic (low metastatic) was established in culture from a Dukes stage B2 surgical specimen (Morikawa et al. Cancer Res. (1988) 48:6863). The KML4-A is a highly metastatic subline derived from KM12C (Yeatman et al. Nucl. Acids. Res. (1995) 23:4007; Bao-Ling et al. Proc. Annu. Meet. Am. Assoc. Cancer. Res. (1995) 21:3269). The KM12C and KM12C-derived cell lines (e.g., KM12L4, KM12L4-A, etc.) are well-recognized in the art as a model cell line for the study of colon cancer (see, e.g., Moriakawa et al., supra; Radinsky et al. Clin. Cancer Res. (1995) 1:19; Yeatman et al., (1995) supra; Yeatman et al. Clin. Exp. Metastasis (1996)14:246).

[0320] The MDA-MB-231 cell line (Brinkley et al. Cancer Res. (1980) 40:3118-3129) was originally isolated from pleural effusions (Cailleau, J. Natl. Cancer. Inst. (1974) 53;661) is of high metastatic potential, and forms poorly differentiated adenocarcinoma grage II in nude mice consistent with breast carcinoma. The MCF7 cell line was derived from a pleural effusion of a breast adenocarcinoma and is non-metastatic. The MV-522 cell line is derived from a human lung carcinoma and is of high metastatic potential. The UCP-3 cell line is a low metastatic human lung carcinoma cell line; the MV-522 is a high metastatic variant of UCP-3. These cell lines are well-recognized in the art as models for the study of human breast and lung cancer (see, e.g., Chandrasekaran et al., Cancer Res. (1979) 9:870 (MDA-MB-231 and MCF-7); Gastpar et al., J Med Chem (1998) 41:4965 MDA-MB-231 and MCF-7); Ranson et al., Br J Cancer (1998) 77:1586 (MDA-MB-231 and MCF-7); Kuang et al., Nucleic Acids Res (1998) 26:1116 (MDA-MB-231 and MCF-7); Varki et al., Int J Cancer (1987) 40:46 (UCP-3); Varki etal., Tumour Biol. (1990) 11:327; (MV-522 and UCP-3); Varki et al., Anticancer Res. (1990) 10:637; (MV-522); Kelner et al., Anticancer Res (1995) 15:867 (MV-522); and Zhang et al., Anticancer Drugs (1997) 8:696 (MV522)).

[0321] The samples of libraries 15-20 are derived from two different patients (UC#2, and UC#3). The bFGF-treated HMVEC were prepared by incubation with bFGF at 10 ng/ml for 2 hrs; the VEGF-treated HMVEC were prepared by incubation with 20 ng/ml VEGF for 2 hrs. Following incubation with the respective growth factor, the cells were washed and lysis buffer added for RNA preparation. The GRRpz and WOca cell lines were provided by Dr. Donna M. Peehl, Department of Medicine, Stanford University School of Medicine. GRRpz was derived from normal prostate epithelium. The WOca cell line is a Gleason Grade 4 cell line.

[0322] Characterization of Sequences in the Libraries

[0323] The sequences of the isolated polynucleotides were first masked to eliminate low complexity sequences using the XBLAST masking program (Claverie “Effective Large-Scale Scale Sequence Similarity Searches,” In: Computer Methods for Macromolecular Sequence Analysis, Doolittle, ed., Meth. Enzymol. 266:212-227 Academic Press, NY, N.Y. (1996); see particularly Claverie, in “Automated DNA Sequencing and Analysis Techniques” Adams et al., eds., Chap. 36, p. 267 Academic Press, San Diego, 1994 and Claverie et al. Comput. Chem. (1993) 17:191 ). Generally, masking does not influence the final search results, except to eliminate sequences of relative little interest due to their low complexity, and to eliminate multiple “hits” based on similarity to repetitive regions common to multiple sequences, e.g., Alu repeats. Masking resulted in the elimination of several sequences. The remaining sequences were then used in a BLASTN vs. GenBank search. Gene assignment for the query sequences was determined based on best hit from the GenBank database; expectancy values are provided with the hit.

[0324] Summary of Polynucleotides Described Herein

[0325] Table 2 (inserted before the claims) provides a summary of polynucleotides isolated as described above and identified as corresponding to a differentially expressed gene (see Example 2 below), as well as those polynucleotides obtained from publicly available sources. Specifically, Table 2 provides: 1) the SEQ ID NO assigned to each sequence for use in the present specification; 2) the Candidate Identification Number (“CID”) to which the sequence is assigned and which number is based on the selection of the candidate for further evaluation in the differential expression in cancerous cells relative to normal cells; 3) the Sequence Name assigned to each sequence; and 4) the name assigned to the sample or clone from which the sequence was isolated. The sequences corresponding to SEQ ID NOS are provided in the Sequence Listing. Because at least some of the provided polynucleotides represent partial mRNA transcripts, two or more polynucleotides may represent different regions of the same mRNA transcript and the same gene and/or may be contained within the same clone. Thus, if two or more SEQ ID NOS are identified as belonging to the same clone, then either sequence can be used to obtain the full-length mRNA or gene. It should be noted that not all cDNA libraries described above are represented on an array in the examples described below.

TABLE 2

| SEQ ID NO | CID | Sequence Name | Sample Name or Clone Name |
|---|---|---|---|
| 1 | 114 | 016824.Seq | M00003814C:C11 |
| 2 | 123 | 019.G3.sp6_128473 | M00006883D:H12 |
| 3 | 114 | 020.B11.sp6_128613 | M00003814C:C11 |
| 4 | 1 | 1222317 | I:1222317:15A02:C02 |
| 5 | 2 | 1227385 | I:1227385:14B01:G05 |
| 6 | 3 | 1297179 | I:1297179:05A02:F02 |
| 7 | 4 | 1298021 | I:1298021:05A01:G10 |
| 8 | 5 | 1358285 | I:1358285:04A02:F11 |
| 9 | 6 | 1384823 | I:1384823:01B02:F08 |
| 10 | 7 | 1395918 | I:1395918:04A01:G10 |
| 11 | 8 | 1402615 | I:1402615:09A02:E03 |
| 12 | 9 | 1421929 | I:1421929:05A01:D02 |
| 13 | 10 | 1431819 | I:1431819:14B01:D05 |
| 14 | 11 | 1443877 | I:1443877:03B02:B08 |
| 15 | 12 | 1450639 | I:1450639:03B02:E09 |
| 16 | 13 | 1480159 | I:1480159:06B02:E03 |
| 17 | 14 | 1509602 | I:1509602:04A01:A11 |
| 18 | 15 | 1516301 | I:1516301:05B01:C10 |
| 19 | 167 | 1598.C19.gz43_212821 | M00055583C:B07 |
| 20 | 16 | 1600586 | I:1600586:05B02:F04 |
| 21 | 17 | 1609538 | I:1609538:06A02:F04 |
| 22 | 18 | 1613615 | I:1613615:03B01:D10 |
| 23 | 19 | 1630804 | I:1630804:06A02:F10 |
| 24 | 20 | 1633286 | I:1633286:06A02:E04 |
| 25 | 21 | 1666080 | I:1666080:07B02:D04 |
| 26 | 22 | 1699587 | I:1699587:06A02:F11 |
| 27 | 23 | 1702266 | I:1702266:02B01:D09 |
| 28 | 24 | 1712592 | I:1712592:04A01:E03 |
| 29 | 25 | 1723834 | I:1723834:01A01:C02 |
| 30 | 26 | 1743234 | I:1743234:16B01:D09 |
| 31 | 170 | 1744.K05.gz43_221934 | M00056250C:B02 |
| 32 | 27 | 1749417 | I:1749417:04A02:D10 |
| 33 | 28 | 1749883 | I:1749883:05B01:D04 |
| 34 | 29 | 1750782 | I:1750782:02A01:A08 |
| 35 | 30 | 1758241 | I:1758241:15B02:G04 |
| 36 | 31 | 1809385 | I:1809385:02A02:G04 |
| 37 | 32 | 1810640 | I:1810640:01A02:D06 |
| 38 | 33 | 1817434 | I:1817434:02B01:C02 |
| 39 | 34 | 1833191 | I:1833191:14A01:G05 |
| 40 | 35 | 1854245 | I:1854245:02B02:E10 |
| 41 | 36 | 1854558 | I:1854558:03A01:C11 |
| 42 | 37 | 1857563 | I:1857563:05B02:D01 |
| 43 | 38 | 1920522 | I:1920522:15B02:F02 |
| 44 | 39 | 1920650 | I:1920650:16A01:B01 |
| 45 | 41 | 1923490 | I:1923490:18B01:H08 |
| 46 | 42 | 1923769 | I:1923769:16B01:F01 |
| 47 | 43 | 1926006 | I:1926006:15A01:F09 |
| 48 | 44 | 1931371 | I:1931371:02B02:D12 |
| 49 | 45 | 1960722 | I:1960722:13B02:D11 |
| 50 | 46 | 1963753 | I:1963753:18B01:E07 |
| 51 | 47 | 1965257 | I:1965257:18B02:B04 |
| 52 | 48 | 1967543 | I:1967543:16B02:F06 |
| 53 | 49 | 1968921 | I:1968921:15A02:D06 |
| 54 | 50 | 1969044 | I:1969044:18B01:E12 |
| 56 | 53 | 1996180 | I:1996180:19B01:C11 |
| 57 | 54 | 2054678 | I:2054678:19A01:F10 |
| 58 | 55 | 2055926 | I:2055926:14A01:F11 |
| 59 | 56 | 2056395 | I:2056395:13A02:B07 |
| 60 | 58 | 2060725 | I:2060725:13A01:G10 |
| 61 | 59 | 2079906 | I:2079906:01A02:A06 |
| 62 | 60 | 2152363 | I:2152363:04A02:A08 |
| 63 | 63 | 2239819 | I:2239819:04A02:B11 |
| 64 | 64 | 2359588 | I:2359588:18A01:F03 |
| 65 | 65 | 2458926 | I:2458926:03B01:C07 |
| 66 | 66 | 2483109 | I:2483109:05A01:A06 |
| 67 | 67 | 2499479 | I:2499479:05A01:D06 |
| 68 | 68 | 2499976 | I:2499976:01B02:E09 |
| 70 | 71 | 2615513 | I:2615513:04B01:D09 |
| 71 | 74 | 2675481 | I:2675481:05A01:G06 |
| 73 | 100 | 268.H2.sp6_144757 | M00001341B:A11 |
| 74 | 105 | 270.B6.sp6_145073 | M00001402B:C12 |
| 75 | 106 | 270.C6.sp6_145085 | M00001402C:B01 |
| 76 | 104 | 270.H3.sp6_145142 | M00001393D:F01 |
| 77 | 75 | 2759046 | I:2759046:19B02:C05 |
| 78 | 76 | 2825369 | I:2825369:07A02:F09 |
| 79 | 77 | 2840195 | I:2840195:01B02:G11 |
| 80 | 78 | 2902903 | I:2902903:12A02:F02 |
| 81 | 79 | 2914605 | I:2914605:04B01:G06 |
| 82 | 80 | 2914719 | I:2914719:04B02:B05 |
| 83 | 81 | 3229778 | I:3229778:02B01:B07 |
| 84 | 109 | 323.B1.sp6_145452 | M00001489B:G04 |
| 85 | 110 | 323.C3.sp6_145466 | M00001496A:G03 |
| 86 | 111 | 324.H1.sp6_145716 | M00001558C:B06 |
| 87 | 121 | 325.H11.sp6_145918 | M00005360A:A07 |
| 88 | 118 | 325.H4.sp6_145911 | M00004031B:D12 |
| 89 | 41 | 344.B2.sp6_146237 | M00022742A:F08 |
| 90 | 139 | 344.C4.sp6_146251 | M00023363C:A04 |
| 91 | 83 | 3518380 | I:3518380:16A01:B07 |
| 92 | 85 | 4072558 | I:4072558:12B01:A07 |
| 93 | 117 | 414.A11.sp6_149879 | M00003961B:H05 |
| 94 | 113 | 414.F2.sp6_149930 | M00001675B:G05 |
| 95 | 87 | 549299 | I:549299:17B02:F06 |
| 96 | 88 | 605019 | I:605019:13B02:D03 |
| 97 | 89 | 620494 | I:620494:16A01:C10 |
| 98 | 125 | 626.D8.sp6_157447 | M00007965C:G08 |
| 99 | 128 | 627.E8.sp6_157651 | M00007987D:D04 |
| 100 | 127 | 627.G6.sp6_157673 | M00007985B:A03 |
| 101 | 129 | 628.D12.sp6_157835 | M00008049B:A12 |
| 102 | 130 | 634.H4.sp6_155966 | M00008099D:A05 |
| 104 | 136 | 642.C6.sp6_156292 | M00022168B:F02 |
| 106 | 5 | 642.D8.sp6_156306 | M00022180D:E11 |
| 107 | 137 | 642.H11.sp6_156357 | M00022215C:A10 |
| 108 | 138 | 653.A3.sp6_158944 | M00023283C:C06 |
| 109 | 141 | 655.B4.sp6_156470 | M00023431B:A01 |
| 110 | 90 | 659143 | I:659143:16B01:E06 |
| 111 | 145 | 661.B5.sp6_159726 | M00027066B:E09 |
| 112 | 91 | 750899 | I:750899:16A01:D04 |
| 113 | 92 | 763607 | I:763607:16A01:E09 |
| 114 | 93 | 901317 | I:901317:16A01:G01 |
| 116 | 100 | 919.H2.SP6_168750 | M00001341B:A11 |
| 118 | 123 | 956.B04.sp6_177996 | M00006883D:H12 |
| 119 | 94 | 956077 | I:956077:14B01:H04 |
| 120 | 95 | 970933 | I:970933:14B01:D03 |
| 121 | 96 | 986558 | I:986558:18A01:C09 |
| 122 | 98 | 998612 | I:998612:14B02:G06 |
| 123 | 103 | A061.ga43_378496 | M00001374A:A06 |
| 124 | 103 | A062.ga43_378497 | M00001374A:A06 |
| 125 | 133 | A121.ga43_378498 | M00022009A:A12 |
| 126 | 133 | A122.ga43_378499 | M00022009A:A12 |
| 130 | 115 | G022a.ga43_378503 | M00003852B:C01 |
| 131 | 106 | RTA00000179AF.k.22.1.Seq | M00001402C:B01 |
| 132 | 113 | RTA00000187AF.g.2.1.Seq | M00001675B:G05 |
| 133 | 113 | RTA00000187AR.g.2.2.Seq | M00001675B:G05 |
| 134 | 106 | RTA00000348R.j.10.1.Seq | M00001402C:B01 |
| 135 | 116 | RTA00000588F.l.02.2.Seq | M00003853B:G11 |
| 136 | 117 | RTA00000588F.o.23.1.Seq | M00003961B:H05 |
| 138 | 123 | RTA00000603F.d.06.1.Seq | M00006883D:H12 |
| 140 | 140 | RTA00000847F.n.19.3.Seq | M00023371A:G03 |
| 141 | 143 | RTA00000922F.g.12.1.Seq | M00026900D:F02 |
| 142 | 121 | RTA00001042F.o.18.1.Seq | M00005360A:A07 |
| 143 | 121 | RTA00001064F.c.16.1.Seq | M00005360A:A07 |
| 144 | 139 | RTA00001069F.c.03.1.Seq | M00023363C:A04 |
| 145 | 112 | RTA00002890F.d.16.1.P.Seq | M00001600C:B11 |
| 147 | 166 | RTA22200002F.b.15.1.P.Seq | M00055435B:A12 |
| 148 | 167 | RTA22200003F.b.13.1.P.Seq | M00055583C:B07 |
| 149 | 169 | RTA22200005F.d.14.1.P.Seq | M00055873C:B06 |
| 150 | 30 | RTA22200007F.j.17.2.P.Seq | M00056227B:G06 |
| 151 | 170 | RTA22200007F.m.02.1.P.Sequence | M00056250C:B02 |
| 152 | 171 | RTA22200008F.a.24.1.P.Seq | M00056301D:A04 |
| 153 | 171 | RTA22200008F.b.01.1.P.Seq | M00056301D:A04 |
| 154 | 172 | RTA22200008F.b.22.1.P.Sequence | M00056308A:F02 |
| 155 | 147 | RTA22200009F.b.03.2.P.Sequence | M00042439D:C11 |
| 156 | 149 | RTA22200009F.c.22.2.P.Seq | M00042756A:H02 |
| 157 | 150 | RTA22200009F.e.10.1.P.Seq | M00042770D:G04 |
| 158 | 151 | RTA22200009F.i.17.2.P.Seq | M00042818A:D05 |
| 159 | 173 | RTA22200009F.p.21.1.P.Seq | M00056350B:B03 |
| 161 | 175 | RTA22200010F.k.02.1.P.Seq | M00056478D:B07 |
| 162 | 176 | RTA22200010F.k.19.1.P.Seq | M00056483D:G07 |
| 163 | 177 | RTA22200010F.m.13.1.P.Seq | M00056500C:A07 |
| 164 | 178 | RTA22200011F.b.05.1.P.Seq | M00056533D:G07 |
| 165 | 179 | RTA22200011F.b.09.1.P.Seq | M00056534C:E08 |
| 166 | 180 | RTA22200011F.g.21.1.P.Seq | M00056585B:F04 |
| 168 | 182 | RTA22200011F.l.06.1.P.Seq | M00056619A:H02 |
| 169 | 183 | RTA22200011F.l.15.1.P.Seq | M00056622B:F12 |
| 170 | 184 | RTA22200011F.m.13.1.P.Seq | M00056632B:H10 |
| 171 | 185 | RTA22200011F.n.24.1.P.Seq | M00056645C:D11 |
| 172 | 185 | RTA22200011F.o.01.1.P.Seq | M00056645C:D11 |
| 173 | 186 | RTA22200011F.o.03.1.P.Seq | M00056646B:F07 |
| 174 | 187 | RTA22200012F.c.01.1.P.Seq | M00056679B:H03 |
| 176 | 189 | RTA22200012F.f.15.1.P.Seq | M00056709B:D03 |
| 177 | 190 | RTA22200012F.i.14.1.P.Seq | M00056728C:G02 |
| 179 | 192 | RTA22200013F.b.20.1.P.Seq | M00056810A:A02 |
| 180 | 193 | RTA22200013F.c.06.1.P.Seq | M00056812D:A08 |
| 181 | 194 | RTA22200013F.d.15.1.P.Seq | M00056822A:E08 |
| 182 | 195 | RTA22200013F.o.17.1.P.Seq | M00056908A:H05 |
| 183 | 196 | RTA22200013F.p.24.1.P.Seq | M00056918C:F09 |
| 184 | 197 | RTA22200014F.b.18.1.P.Seq | M00056937C:C10 |
| 185 | 197 | RTA22200014F.b.18.2.P.Seq | M00056937C:C10 |
| 190 | 199 | RTA22200014F.j.08.1.P.Seq | M00056992C:F12 |
| 191 | 199 | RTA22200014F.j.08.2.P.Seq | M00056992C:F12 |
| 192 | 200 | RTA22200015F.a.18.1.P.Seq | M00057044D:G03 |
| 193 | 176 | RTA22200015F.a.23.1.P.Seq | M00057046A:G09 |
| 194 | 201 | RTA22200015F.f.17.1.P.Seq | M00057081B:H03 |
| 196 | 118 | RTA22200015F.k.10.1.P.Seq | M00057112B:E11 |
| 198 | 204 | RTA22200015F.m.15.1.P.Seq | M00057127B:B09 |
| 200 | 206 | RTA22200016F.i.21.1.P.Seq | M00057231A:G04 |
| 201 | 207 | RTA22200016F.k.08.1.P.Seq | M00057241C:F03 |
| 202 | 152 | RTA22200019F.h.04.1.P.Seq | M00054500D:C08 |
| 204 | 151 | RTA22200019F.j.24.1.P.Seq | M00054520A:D04 |
| 205 | 151 | RTA22200019F.k.01.1.P.Seq | M00054520A:D04 |
| 206 | 153 | RTA22200019F.m.05.1.P.Seq | M00054538C:C01 |
| 207 | 154 | RTA22200020F.i.12.1.P.Seq | M00054639D:F05 |
| 208 | 155 | RTA22200020F.j.09.1.P.Seq | M00054647A:A09 |
| 209 | 156 | RTA22200020F.j.24.1.P.Seq | M00054650D:E04 |
| 210 | 157 | RTA22200021F.d.09.2.P.Seq | M00054742C:B12 |
| 211 | 158 | RTA22200021F.g.18.3.P.Seq | M00054769A:E05 |
| 212 | 159 | RTA22200021F.h.15.3.P.Seq | M00054777D:E09 |
| 213 | 160 | RTA22200021F.i.23.3.P.Seq | M00054806B:G03 |
| 214 | 161 | RTA22200022F.d.04.1.P.Seq | M00054893C:D03 |
| 215 | 162 | RTA22200022F.m.09.1.P.Seq | M00054971D:D07 |
| 217 | 195 | RTA22200024F.i.11.1.P.Seq | M00055209C:B07 |
| 218 | 164 | RTA22200024F.p.03.1.P.Seq | M00055258B:D12 |
| 220 | 65 | RTA22200026F.d.17.1.P.Seq | M00055423A:C07 |
| 222 | 124 | RTA22200231F.b.20.1.P.Seq | M00007935D:A05 |
| 223 | 126 | RTA22200231F.l.22.1.P.Seq | M00007985A:B08 |
| 224 | 132 | RTA22200232F.d.23.1.P.Seq | M00021956B:A09 |
| 225 | 291 | RTA22200232F.m.17.1.P.Seq | M00022140A:E11 |
| 226 | 142 | RTA22200241F.e.15.1.P.Seq | M00026888A:A03 |
| 227 | 144 | RTA22200241F.g.22.1.P.Seq | M00026903D:D11 |
| 228 | 115 | X2.ga43_378506 | M00003852B:C01 |
| 230 | 255 | gb\|AA024920.1\|AA024920 | RG:364972:10009:B06 |
| 231 | 262 | gb\|AA033519.1\|AA033519 | RG:471154:10009:H04 |
| 232 | 256 | gb\|AA039790.1\|AA039790 | RG:376554:10009:B12 |
| 233 | 263 | gb\|AA043829.1\|AA043829 | RG:487171:10009:H09 |
| 234 | 265 | gb\|AA070046.1\|AA070046 | RG:530002:10002:A08 |
| 235 | 264 | gb\|AA128438.1\|AA128438 | RG:526536:10002:A02 |
| 236 | 266 | gb\|AA179757.1\|AA179757 | RG:612874:10002:G02 |
| 239 | 269 | gb\|AA232253.1\|AA232253 | RG:666323:10010:B07 |
| 240 | 270 | gb\|AA234451.1\|AA234451 | RG:669110:10010:B12 |
| 242 | 273 | gb\|AA399596.1\|AA399596 | RG:729913:10010:G11 |
| 243 | 276 | gb\|AA400338.1\|AA400338 | RG:742764:10011:A06 |
| 247 | 236 | gb\|AA431134.1\|AA431134 | RG:781507:10011:E01 |
| 248 | 277 | gb\|AA446295.1\|AA446295 | RG:781028:10011:D08 |
| 249 | 278 | gb\|AA448898.1\|AA448898 | RG:785368:10011:E11 |
| 250 | 278 | gb\|AA449542.1\|AA449542 | RG:785846:10011:F02 |
| 252 | 274 | gb\|AA477696.1\|AA477696 | RG:740831:10010:H12 |
| 253 | 280 | gb\|AA530983.1\|AA530983 | RG:985973:10012:B09 |
| 254 | 259 | gb\|AA679027.1\|AA679027 | RG:432960:10009:E11 |
| 255 | 210 | gb\|AA723679.1\|AA723679 | RG:1325847:10012:H07 |
| 256 | 213 | gb\|AA829074.1\|AA829074 | RG:1374447:20004:G01 |
| 257 | 212 | gb\|AA830348.1\|AA830348 | RG:1353123:10013:A06 |
| 258 | 214 | gb\|AA885302.1\|AA885302 | RG:1461567:10013:E03 |
| 260 | 216 | gb\|AA926951.1\|AA926951 | RG:1552386:10013:G04 |
| 262 | 219 | gb\|AI004332.1\|AI004332 | RG:1631867:10014:B06 |
| 263 | 252 | gb\|AI015644.1\|AI015644 | RG:1635546:10014:B08 |
| 264 | 220 | gb\|AI017336.1\|AI017336 | RG:1638979:10014:C04 |
| 265 | 218 | gb\|AI018495.1\|AI018495 | RG:1630930:10014:B05 |
| 266 | 221 | gb\|AI031810.1\|AI031810 | RG:1645945:10014:D05 |
| 267 | 226 | gb\|AI054129.1\|AI054129 | RG:1861510:20001:B03 |
| 268 | 212 | gb\|AI066521.1\|AI066521 | RG:1637619:10014:C02 |
| 269 | 223 | gb\|AI076187.1\|AI076187 | RG:1674098:10014:H01 |
| 270 | 221 | gb\|AI079570.1\|AI079570 | RG:1674393:10014:H02 |
| 271 | 206 | gb\|AI123832.1\|AI123832 | RG:1651303:10014:E01 |
| 272 | 225 | gb\|AI207972.1\|AI207972 | RG:1838677:10015:E10 |
| 273 | 231 | gb\|AI224731.1\|AI224731 | RG:2002384:20003:E01 |
| 274 | 233 | gb\|AI265824.1\|AI265824 | RG:2006592:20003:F12 |
| 275 | 232 | gb\|AI279390.1\|AI279390 | RG:2006302:20003:F08 |
| 276 | 227 | gb\|AI298668.1\|AI298668 | RG:1895716:10015:G09 |
| 277 | 229 | gb\|AI305997.1\|AI305997 | RG:1996788:20003:C10 |
| 278 | 230 | gb\|AI306323.1\|AI306323 | RG:1996901:20003:D01 |
| 279 | 239 | gb\|AI335279.1\|AI335279 | RG:2055807:10016:B09 |
| 280 | 238 | gb\|AI336511.1\|AI336511 | RG:2051667:20003:H05 |
| 281 | 228 | gb\|AI347995.1\|AI347995 | RG:1927470:10015:H08 |
| 282 | 235 | gb\|AI356632.1\|AI356632 | RG:2012168:10016:B05 |
| 283 | 237 | gb\|AI375104.1\|AI375104 | RG:2048081:10016:B08 |
| 284 | 241 | gb\|AI421409.1\|AI421409 | RG:2097257:10016:C07 |
| 285 | 242 | gb\|AI421521.1\|AI421521 | RG:2097294:10016:C08 |
| 286 | 243 | gb\|AI523571.1\|AI523571 | RG:2117694:10016:E01 |
| 287 | 258 | gb\|H00135.1\|H00135 | RG:43296:10005:C03 |
| 288 | 261 | gb\|H08424.1\|H08424 | RG:45623:10005:D09 |
| 289 | 260 | gb\|H12948.1\|H12948 | RG:43534:10005:C04 |
| 290 | 236 | gb\|H54104.1\|H54104 | RG:203031:10007:A09 |
| 293 | 246 | gb\|N55598.1\|N55598 | RG:244601:10007:E02 |
| 294 | 245 | gb\|N75655.1\|N75655 | RG:244132:10007:E01 |
| 295 | 248 | gb\|N98702.1\|N98702 | RG:278409:10008:B10 |
| 296 | 129 | gb\|R12138.1\|R12138 | RG:25258:10004:D09 |
| 298 | 2 | gb\|R17980.1\|R17980 | RG:32281:10004:G05 |
| 299 | 254 | gb\|R21293.1\|R21293 | RG:35892:10004:H10 |
| 300 | 249 | gb\|R41558.1\|R41558 | RG:29739:10004:F02 |
| 301 | 2 | gb\|R56713.1\|R56713 | RG:41097:10005:B10 |
| 302 | 224 | gb\|R85309.1\|R85309 | RG:180296:10006:G03 |
| 303 | 222 | gb\|R87679.1\|R87679 | RG:166410:10006:F01 |
| 304 | 208 | gb\|T83145.1\|T83145 | RG:110764:10005:H04 |
| 305 | 250 | gb\|W16960.1\|W16960 | RG:301608:10008:D09 |
| 306 | 251 | gb\|W24201.1\|W24201 | RG:306813:10008:E12 |
| 307 | 252 | gb\|W45587.1\|W45587 | RG:323425:10008:F11 |
| 308 | 253 | gb\|W69496.1\|W69496 | RG:343821:10008:H05 |
| 309 | 257 | gb\|W87460.1\|W87460 | RG:417109:10009:D09 |

[0326] Summary of Blast Search Results

[0327] Table 3 (inserted before the claims) provides the results of BLASTN searches of the Cenbank database using the sequences of the polynucleotides as described above. Table 3 includes 1) the SEQ ID NO; 2) the “CID” or Candidate Identification Number to which the sequence is assigned; 3) the GenBank accession number of the Blast hit; 4) a description of the gene encoded by the Blast hit (“HitDesc”) having the closest sequence homology to the sequence on the array (and in some instances contains a sequence identical to the sequence on the array); 5) the Blast score (“Score”), which value is obtained by adding the similarities and differences of an alignment between the sequence and the database sequence, wherein a “match” is a positive value and a “mismatch” or “no-match” is a negative value; 6) the “Length” of the sequence, which represents the number of nucleotides in the database “hit”; 7) the Expect value (E) which describes the number of hits or matches “expected” if the database was random sequence, i.e. the E value describes the random background noise that exists for matches between sequences; and 8) the “Identities” ratio which is a ratio of number of bases in the query sequence that exactly match the number of bases in the database sequence when aligned.

TABLE 3

| SEQ | | GenBank | | | | | |
|---|---|---|---|---|---|---|---|
| ID | | Accession | | | | | |
| NO | CID | No. | HitDesc | Score | Length | Expect | Identities |
| 1 | 114 | D29958 | gi\|473948\|dbj\|D29958.1\|HUMORFA10 | 573 | 1011 | 1E−162 | 289/289 |
| | | | Human mRNA for KIAA0116 gene, | | | | |
| | | | partial cds | | | | |
| 2 | 123 | NM_020510 | gi\|10048405\|ref\|NM_020510.1\| Mus | 77.8 | 2112 | 3E−12 | 39/39 |
| | | | musculus frizzled homolog 10 | | | | |
| | | | (Drosophila) (Fzd10), mRNA | | | | |
| 3 | 114 | D29958 | gi\|473948\|dbj\|D29958.1\|HUMORFA10 | 969 | 1011 | 0 | 559/575 |
| | | | Human mRNA for KIAA0116 gene, | | | | |
| | | | partial cds | | | | |
| 4 | 1 | XM_001344 | gi\|11421753\|ref\|XM_001344.1\| Homo | 464 | 512 | 1E−129 | 234/234 |
| | | | sapiens S100 calcium-binding protein A4 | | | | |
| | | | (calcium protein, calvasculin, metastasin, | | | | |
| | | | murine placental homolog) (S100A4), | | | | |
| | | | mRNA | | | | |
| 5 | 2 | NM_004443 | gi\|4758287\|ref\|NM_004443.1\| Homo | 194 | 3805 | 3E−48 | 137/145 |
| | | | sapiens EphB3 (EPHB3) mRNA | | | | |
| 6 | 3 | BC001014 | gi\|12654380\|gb\|BC001014.1\|BC001014 | 444 | 1378 | 1E−123 | 224/224 |
| | | | Homo sapiens, Similar to | | | | |
| | | | methylenetetrahydrofolate | | | | |
| | | | dehydrogenase (NADP+ dependent), | | | | |
| | | | methenyltetrahydrofolate | | | | |
| | | | cyclohydrolase, formyltetrahydrofolate | | | | |
| | | | synthetase, clone IMAGE: 3344724, | | | | |
| | | | mRNA, partial cds | | | | |
| 7 | 4 | NM_001363 | gi\|4503336\|ref\|NM_001363.1\| Homo | 513 | 2422 | 1E−144 | 259/259 |
| | | | sapiens dyskeratosis congenita 1, | | | | |
| | | | dyskerin (DKC1), mRNA | | | | |
| 8 | 5 | NM_001699 | gi\|11863124\|ref\|NM_001699.2\| Homo | 543 | 4986 | 1E−153 | 281/282 |
| | | | sapiens AXL receptor tyrosine kinase | | | | |
| | | | (AXL), transcript variant 2, mRNA | | | | |
| 9 | 6 | NM_001827 | gi\|4502858\|ref\|NM_001827.1\| Homo | 535 | 627 | 1E−150 | 279/282 |
| | | | sapiens CDC28 protein kinase 2 (CKS2), | | | | |
| | | | mRNA | | | | |
| 10 | 7 | XM_011126 | gi\|12730374\|ref\|XM_011126.1\| Homo | 515 | 2219 | 1E−144 | 260/260 |
| | | | sapiens Arg/Abl-interacting protein | | | | |
| | | | ArgBP2 (ARGBP2), mRNA | | | | |
| 11 | 8 | BC002718 | gi\|12803760\|gb\|BC002718.1\|BC002718 | 299 | 1028 | 1E−79 | 223/236 |
| | | | Homo sapiens, type I transmembrane | | | | |
| | | | protein Fn14, clone MGC: 3386, mRNA, | | | | |
| | | | complete cds | | | | |
| 12 | 9 | XM_007891 | gi\|11430799\|ref\|XM_007891.1\| Homo | 317 | 3171 | 3E−85 | 160/160 |
| | | | sapiens cadherin 3, type 1, P-cadherin | | | | |
| | | | (placental) (CDH3), mRNA | | | | |
| 13 | 10 | BC001883 | gi\|12804870\|gb\|BC001883.1\|BC001883 | 490 | 2464 | 1E−137 | 255/259 |
| | | | Homo sapiens, nucleolar phosphoprotein | | | | |
| | | | p130, clone MGC: 1494, mRNA, | | | | |
| | | | complete cds | | | | |
| 14 | 11 | XM_002532 | gi\|11429973\|ref\|XM_002532.1\| Homo | 440 | 1132 | 1E−122 | 244/255 |
| | | | sapiens 26S proteasome-associated pad1 | | | | |
| | | | homolog (POH1), mRNA | | | | |
| 15 | 12 | BC005334 | gi\|13529121\|gb\|BC005334.1\|BC005334 | 494 | 1047 | 1E−138 | 258/260 |
| | | | Homo sapiens, centrin, EF-hand protein, | | | | |
| | | | 2, clone MGC: 12421, mRNA, complete | | | | |
| | | | cds | | | | |
| 16 | 13 | XM_009001 | gi\|12742166\|ref\|XM_009001.2\| Homo | 462 | 1506 | 1E−128 | 233/233 |
| | | | sapiens kallikrein 6 (neurosin, zyme) | | | | |
| | | | (KLK6), mRNA | | | | |
| 17 | 14 | XM_005818 | gi\|12735488\|ref\|XM_005818.2\| Homo | 373 | 2420 | 1E−102 | 188/188 |
| | | | sapiens arachidonate 5-lipoxygenase | | | | |
| | | | (ALOX5), mRNA | | | | |
| 18 | 15 | XM_012273 | gi\|12737900\|ref\|XM_012273.1\| Homo | 396 | 3314 | 1E−109 | 200/200 |
| | | | sapiens forkhead box M1 (FOXM1), | | | | |
| | | | mRNA | | | | |
| 19 | 167 | AK000140 | gi\|7020034\|dbj\|AK000140.1\|AK000140 | 1114 | 1403 | 0 | 587/596 |
| | | | Homo sapiens cDNA FLJ20133 fis, | | | | |
| | | | clone COL06539 | | | | |
| 20 | 16 | BC003146 | gi\|13111946\|gb\|BC003146.1\|BC003146 | 432 | 1720 | 1E−119 | 218/218 |
| | | | Homo sapiens, splicing factor 3b, | | | | |
| | | | subunit 3, 130 kD, clone MGC: 3924, | | | | |
| | | | mRNA, complete cds | | | | |
| 21 | 17 | BC001763 | gi\|12804676\|gb\|BC001763.1\|BC001763 | 404 | 1917 | 1E−111 | 206/207 |
| | | | Homo sapiens, Similar to translocase of | | | | |
| | | | outer mitochondrial membrane 34, clone | | | | |
| | | | MGC: 1252, mRNA, complete cds | | | | |
| 22 | 18 | XM_007326 | gi\|11434291\|ref\|XM_007326.1\| Homo | 404 | 1944 | 1E−111 | 204/204 |
| | | | sapiens bone morphogenetic protein 4 | | | | |
| | | | (BMP4), mRNA | | | | |
| 23 | 19 | XM_005376 | gi\|12734932\|ref\|XM_005376.2\| Homo | 371 | 1503 | 1E−101 | 192/194 |
| | | | sapiens Friedreich ataxia (FRDA), | | | | |
| | | | mRNA | | | | |
| 24 | 20 | XM_010945 | gi\|12729201\|ref\|XM_010945.1\| Homo | 452 | 614 | 1E−125 | 228/228 |
| | | | sapiens hypothetical gene supported by | | | | |
| | | | XM_010945 (LOC65371), mRNA | | | | |
| 25 | 21 | AK018953 | gi\|12858931\|dbj\|AK018953.1\|AK018953 | 174 | 1297 | 5E−42 | 174/203 |
| | | | Mus musculus adult male testis cDNA, | | | | |
| | | | RIKEN full-length enriched library, | | | | |
| | | | clone: 1700111D04, full insert sequence | | | | |
| 26 | 22 | BC003635 | gi\|13177711\|gb\|BC003635.1\|BC003635 | 456 | 1140 | 1E−127 | 230/230 |
| | | | Homo sapiens, matrix metalloproteinase | | | | |
| | | | 7 (matrilysin, uterine), clone MGC: 3913, | | | | |
| | | | mRNA, complete cds | | | | |
| 27 | 23 | XM_008589 | gi\|11427373\|ref\|XM_008589.1\| Homo | 440 | 1790 | 1E−122 | 224/225 |
| | | | sapiens pyrroline-5-carboxylate | | | | |
| | | | reductase 1 (PYCR1), mRNA | | | | |
| 28 | 24 | BC001880 | gi\|12804864\|gb\|BC001880.1\|BC001880 | 379 | 1469 | 1E−103 | 191/191 |
| | | | Homo sapiens, Similar to insulin induced | | | | |
| | | | gene 1, clone MGC: 1405, mRNA, | | | | |
| | | | complete cds | | | | |
| 29 | 25 | XM_003047 | gi\|12729625\|ref\|XM_003047.2\| Homo | 353 | 3383 | 7E−96 | 178/178 |
| | | | sapiens minichromosome maintenance | | | | |
| | | | deficient (S. cerevisiae) 2 (mitotin) | | | | |
| | | | (MCM2), mRNA | | | | |
| 30 | 26 | NC_002548 | gi\|10314009\|ref\|NC_002548.1\| Acute bee | 38.2 | 9491 | 0.68 | 19/19 |
| | | | paralysis virus, complete genome | | | | |
| 31 | 170 | NM_004219 | gi\|11038651\|ref\|NM_004219.2\| Homo | 1314 | 728 | 0 | 667/669 |
| | | | sapiens pituitary tumor-transforming 1 | | | | |
| | | | (PTTG1), mRNA | | | | |
| 32 | 27 | BC002479 | gi\|12803322\|gb\|BC002479.1\|BC002479 | 613 | 1479 | 1E−174 | 309/309 |
| | | | Homo sapiens, cathepsin H, clone | | | | |
| | | | MGC: 1519, mRNA, complete cds | | | | |
| 33 | 28 | BC000123 | gi\|12652744\|gb\|BC000123.1\|BC000123 | 545 | 1331 | 1E−153 | 275/275 |
| | | | Homo sapiens, pyridoxal (pyridoxine, | | | | |
| | | | vitamin B6) kinase, clone MGC: 3128, | | | | |
| | | | mRNA, complete cds | | | | |
| 34 | 29 | AK000836 | gi\|7021154\|dbj\|AK000836.1\|AK000836 | 406 | 1703 | 1E−112 | 205/205 |
| | | | Homo sapiens cDNA FLJ20829 fis, | | | | |
| | | | clone ADKA03163, highly similar to | | | | |
| | | | D26488 Human mRNA for KIAA0007 | | | | |
| | | | gene | | | | |
| 35 | 30 | BC001425 | gi\|12655140\|gb\|BC001425.1\|BC001425 | 504 | 2499 | 1E−141 | 256/257 |
| | | | Homo sapiens, Similar to differential | | | | |
| | | | display and activated by p53, clone | | | | |
| | | | MGC: 1780, mRNA, complete cds | | | | |
| 36 | 31 | BC005301 | gi\|13529028\|gb\|BC005301.1\|BC005301 | 442 | 998 | 1E−122 | 225/226 |
| | | | Homo sapiens, integrin beta 3 binding | | | | |
| | | | protein (beta3-endonexin), clone | | | | |
| | | | MGC: 12370, mRNA, complete cds | | | | |
| 37 | 32 | Z27409 | gi\|482916\|emb\|Z27409.1\|HSRTKEPH | 529 | 2398 | 1E−149 | 276/278 |
| | | | H. sapiens mRNA for receptor tyrosine | | | | |
| | | | kinase eph (partial) | | | | |
| 38 | 33 | XM_003107 | gi\|12729732\|ref\|XM_003107.2\| Homo | 436 | 1985 | 1E−120 | 227/228 |
| | | | sapiens transketolase (Wernicke- | | | | |
| | | | Korsakoff syndrome) (TKT), mRNA | | | | |
| 39 | 34 | AB002297 | gi\|2224538\|dbj\|AB002297.1\|AB002297 | 387 | 8063 | 1E−106 | 208/211 |
| | | | Human mRNA for KIAA0299 gene, | | | | |
| | | | partial cds | | | | |
| 40 | 35 | XM_002591 | gi\|12728749\|ref\|XM_002591.2\| Homo | 502 | 4732 | 1E−140 | 253/253 |
| | | | sapiens KIAA0173 gene product | | | | |
| | | | (KIAA0173), mRNA | | | | |
| 41 | 36 | XM_009101 | gi\|11425196\|ref\|XM_009101.1\| Homo | 523 | 3374 | 1E−147 | 271/272 |
| | | | sapiens fucosyltransferase 1 (galactoside | | | | |
| | | | 2-alpha-L-fucosyltransferase, Bombay | | | | |
| | | | phenotype included) (FUT1), mRNA | | | | |
| 42 | 37 | AF082858 | gi\|4587463\|gb\|AF082858.1\|AF082858 | 494 | 829 | 1E−138 | 249/249 |
| | | | Homo sapiens pterin carbinolamine | | | | |
| | | | dehydratase (PCD) mRNA, complete cds | | | | |
| 43 | 38 | BC001600 | gi\|12804396\|gb\|BC001600.1\|BC001600 | 533 | 1316 | 1E−150 | 269/269 |
| | | | Homo sapiens, D123 gene product, clone | | | | |
| | | | MGC: 1935, mRNA, complete cds | | | | |
| 44 | 39 | BC000871 | gi\|12654114\|gb\|BC000871.1\|BC000871 | 609 | 1489 | 1E−172 | 307/307 |
| | | | Homo sapiens, annexin A3, clone | | | | |
| | | | MGC: 5043, mRNA, complete cds | | | | |
| 45 | 41 | AL136600 | gi\|13276700\|emb\|AL136600.1\|HSM8015 | 504 | 1552 | 1E−141 | 254/254 |
| | | | 74 Homo sapiens mRNA; cDNA | | | | |
| | | | DKFZp564I1216 (from clone | | | | |
| | | | DKFZp564I1216); complete cds | | | | |
| 46 | 42 | AK024772 | gi\|10437149\|dbj\|AK024772.1\|AK024772 | 484 | 864 | 1E−135 | 246/247 |
| | | | Homo sapiens cDNA: FLJ21119 fis, | | | | |
| | | | clone CAS05644, highly similar to | | | | |
| | | | HSA272196 Homo sapiens mRNA for | | | | |
| | | | hypothetical protein | | | | |
| 47 | 43 | BC004246 | gi\|13279007\|gb\|BC004246.1\|BC004246 | 438 | 4249 | 1E−121 | 221/221 |
| | | | Homo sapiens, mutS (E. coli) homolog | | | | |
| | | | 6, clone MGC: 10498, mRNA, complete | | | | |
| | | | cds | | | | |
| 48 | 44 | X92474 | gi\|1045056\|emb\|X92474.1\|HSCHTOG | 238 | 6449 | 2E−61 | 122/123 |
| | | | H. sapiens mRNA for ch-TOG protein | | | | |
| 49 | 45 | BC002994 | gi\|12804270\|gb\|BC002994.1\|BC002994 | 476 | 2238 | 1E−132 | 246/248 |
| | | | Homo sapiens, clone MGC: 3823, | | | | |
| | | | mRNA, complete cds | | | | |
| 50 | 46 | AK025062 | gi\|10437501\|dbj\|AK025062.1\|AK025062 | 327 | 2692 | 4E−88 | 174/176 |
| | | | Homo sapiens cDNA: FLJ21409 fis, | | | | |
| | | | clone COL03924 | | | | |
| 51 | 47 | AP001247 | gi\|10121151\|dbj\|AP001247.3\|AP001247 | 36.2 | 16950 | 2.8 | 20/21 |
| | | | Homo sapiens genomic DNA, | | | | |
| | | | chromosome 2p11.2, clone: lambda316 | | | | |
| 52 | 48 | AF131838 | gi\|4406677\|gb\|AF131838.1\|AF131838 | 498 | 1462 | 1E−139 | 251/251 |
| | | | Homo sapiens clone 25107 mRNA | | | | |
| | | | sequence | | | | |
| 53 | 49 | XM_007647 | gi\|11432476\|ref\|XM_007647.1\| Homo | 531 | 2111 | 1E−149 | 268/268 |
| | | | sapiens immunoglobulin superfamily | | | | |
| | | | containing leucine-rich repeat (ISLR), | | | | |
| | | | mRNA | | | | |
| 54 | 50 | AB048286 | gi\|13537296\|dbj\|AB048286.1\|AB048286 | 476 | 2713 | 1E−132 | 247/248 |
| | | | Homo sapiens GS1999full mRNA, | | | | |
| | | | complete cds | | | | |
| 56 | 53 | AK001515 | gi\|7022818\|dbj\|AK001515.1\|AK001515 | 333 | 884 | 6E−90 | 168/168 |
| | | | Homo sapiens cDNA FLJ10653 fis, | | | | |
| | | | clone NT2RP2005890 | | | | |
| 57 | 54 | AB023156 | gi\|4589521\|dbj\|AB023156.1\|AB023156 | 42.1 | 5537 | 0.055 | 24/25 |
| | | | Homo sapiens mRNA for KIAA0939 | | | | |
| | | | protein, partial cds | | | | |
| 58 | 55 | XM_008622 | gi\|12740774\|ref\|XM_008622.2\| Homo | 507 | 1427 | 1E−142 | 256/256 |
| | | | sapiens thymidine kinase 1, soluble | | | | |
| | | | (TK1), mRNA | | | | |
| 59 | 56 | XM_003758 | gi\|11416585\|ref\|XM_003758.1\| Homo | 422 | 2691 | 1E−116 | 215/216 |
| | | | sapiens transforming growth factor, beta- | | | | |
| | | | induced, 68 kD (TGFBI), mRNA | | | | |
| 60 | 58 | XM_001732 | gi\|11423748\|ref\|XM_001732.1\| Homo | 500 | 2435 | 1E−140 | 252/252 |
| | | | sapiens calcyclin binding protein | | | | |
| | | | (CACYBP), mRNA | | | | |
| 61 | 59 | BC001866 | gi\|12804840\|gb\|BC001866.1\|BC001866 | 396 | 2097 | 1E−109 | 239/256 |
| | | | Homo sapiens, replication factor C | | | | |
| | | | (activator 1) 5 (36.5 kD), clone | | | | |
| | | | MGC: 1155, mRNA, complete cds | | | | |
| 62 | 60 | BC000293 | gi\|12653056\|gb\|BC000293.1\|BC000293 | 87.7 | 733 | 2E−16 | 58/65 |
| | | | Homo sapiens, non-metastatic cells 1, | | | | |
| | | | protein (NM23A) expressed in, clone | | | | |
| | | | MGC: 8334, mRNA, complete cds | | | | |
| 63 | 63 | XM_008043 | gi\|12739769\|ref\|XM_008043.2\| Homo | 519 | 1739 | 1E−146 | 262/262 |
| | | | sapiens dipeptidase 1 (renal) (DPEP1), | | | | |
| | | | mRNA | | | | |
| 64 | 64 | AB052751 | gi\|11967903\|dbj\|AB052751.1\|AB052751 | 527 | 1863 | 1E−148 | 266/266 |
| | | | Homo sapiens Axin2 mRNA for | | | | |
| | | | conductin, partial cds and 3′UTR | | | | |
| 65 | 65 | BC005832 | gi\|13543336\|gb\|BC005832.1\|BC005832 | 460 | 1444 | 1E−128 | 232/232 |
| | | | Homo sapiens, KIAA0101 gene product, | | | | |
| | | | clone MGC: 2250, mRNA, complete cds | | | | |
| 66 | 66 | XM_002190 | gi\|11428365\|ref\|XM_002190.1\| Homo | 472 | 3152 | 1E−131 | 238/238 |
| | | | sapiens chromosome 1 open reading | | | | |
| | | | frame 2 (C1ORF2), mRNA | | | | |
| 67 | 67 | XM_010360 | gi\|12743462\|ref\|XM_010360.2\| Homo | 505 | 3746 | 1E−141 | 255/255 |
| | | | sapiens transcription factor NRF (NRF), | | | | |
| | | | mRNA | | | | |
| 68 | 68 | AL122064 | gi\|6102857\|emb\|AL122064.1\|HSM801208 | 502 | 1320 | 1E−140 | 257/259 |
| | | | Homo sapiens mRNA; cDNA | | | | |
| | | | DKFZp434M231 (from clone | | | | |
| | | | DKFZp434M231); partial cds | | | | |
| 70 | 71 | XM_005226 | gi\|11425871\|ref\|XM_005226.1\| Homo | 507 | 2619 | 1E−142 | 256/256 |
| | | | sapiens antizyme inhibitor (LOC51582), | | | | |
| | | | mRNA | | | | |
| 71 | 74 | BC002956 | gi\|12804196\|gb\|BC002956.1\|BC002956 | 484 | 1185 | 1E−135 | 244/244 |
| | | | Homo sapiens, ClpP (caseinolytic | | | | |
| | | | protease, ATP-dependent, proteolytic | | | | |
| | | | subunit, E. coli) homolog, clone | | | | |
| | | | MGC: 1379, mRNA, complete cds | | | | |
| 73 | 100 | NM_014791 | gi\|7661973\|ref\|NM_014791.1\| Homo | 1211 | 2470 | 0 | 691/708 |
| | | | sapiens KIAA0175 gene product | | | | |
| | | | (KIAA0175), mRNA | | | | |
| 74 | 105 | BC005864 | gi\|13543414\|gb\|BC005864.1\|BC005864 | 1108 | 1430 | 0 | 621/635 |
| | | | Homo sapiens, cyclin-dependent kinase | | | | |
| | | | 4, clone MGC: 3719, mRNA, complete | | | | |
| | | | cds | | | | |
| 75 | 106 | XM_005404 | gi\|11428250\|ref\|XM_005404.1\| Homo | 1203 | 2446 | 0 | 631/638 |
| | | | sapiens catenin (cadherin-associated | | | | |
| | | | protein), alpha-like 1 (CTNNAL1), | | | | |
| | | | mRNA | | | | |
| 76 | 104 | BC002362 | gi\|12803116\|gb\|BC002362.1\|BC002362 | 1269 | 1318 | 0 | 643/644 |
| | | | Homo sapiens, lactate dehydrogenase B, | | | | |
| | | | clone MGC: 8627, mRNA, complete cds | | | | |
| 77 | 75 | AF065389 | gi\|3152702\|gb\|AF065389.1\|AF065389 | 434 | 1405 | 1E−120 | 236/244 |
| | | | Homo sapiens tetraspan NET-4 mRNA, | | | | |
| | | | complete cds | | | | |
| 78 | 76 | BC004863 | gi\|13436073\|gb\|BC004863.1\|BC004863 | 587 | 2229 | 1E−166 | 303/304 |
| | | | Homo sapiens, Similar to phosphoserine | | | | |
| | | | aminotransferase, clone MGC: 10519, | | | | |
| | | | mRNA, complete cds | | | | |
| 79 | 77 | XM_011917 | gi\|12735709\|ref\|XM_011917.1\| Homo | 509 | 1414 | 1E−143 | 259/260 |
| | | | sapiens adenosine kinase (ADK), mRNA | | | | |
| 80 | 78 | BC000897 | gi\|12654158\|gb\|BC000897.1\|BC000897 | 143 | 683 | 8E−33 | 102/107 |
| | | | Homo sapiens, interferon induced | | | | |
| | | | transmembrane protein 1 (9-27), clone | | | | |
| | | | MGC: 5195, mRNA, complete cds | | | | |
| 81 | 79 | NM_014641 | gi\|7661965\|ref\|NM_014641.1\| Homo | 335 | 6940 | 3E−90 | 196/206 |
| | | | sapiens KIAA0170 gene product | | | | |
| | | | (KIAA0170), mRNA | | | | |
| 82 | 80 | XM_012967 | gi\|12742527\|ref\|XM_012967.1\| Homo | 430 | 1188 | 1E−119 | 231/233 |
| | | | sapiens RAE1 (RNA export 1, S. pombe) | | | | |
| | | | homolog (RAE1), mRNA | | | | |
| 83 | 81 | XM_003913 | gi\|12719136\|ref\|XM_003913.2\| Homo | 571 | 5348 | 1E−161 | 288/288 |
| | | | sapiens integrin, alpha 2 (CD49B, alpha | | | | |
| | | | 2 subunit of VLA-2 receptor) (ITGA2), | | | | |
| | | | mRNA | | | | |
| 84 | 109 | AK024039 | gi\|10436304\|dbj\|AK024039.1\|AK024039 | 422 | 2224 | 1E−116 | 377/443 |
| | | | Homo sapiens cDNA FLJ13977 fis, | | | | |
| | | | clone Y79AA1001603, weakly similar to | | | | |
| | | | POLYPEPTIDE N- | | | | |
| | | | ACETYLGALACTOSAMINYLTRANSFERASE | | | | |
| | | | (EC 2.4.1.41) | | | | |
| 85 | 110 | XM_009492 | gi\|11420665\|ref\|XM_009492.1\| Homo | 852 | 2627 | 0 | 440/444 |
| | | | sapiens v-myb avian myeloblastosis viral | | | | |
| | | | oncogene homolog-like 2 (MYBL2), | | | | |
| | | | mRNA | | | | |
| 86 | 111 | XM_009587 | gi\|12742401\|ref\|XM_009587.2\| Homo | 749 | 2108 | 0 | 392/394 |
| | | | sapiens TH1 drosophila homolog | | | | |
| | | | (HSPC130), mRNA | | | | |
| 87 | 121 | NM_001408 | gi\|13325063\|ref\|NM_001408.1\| Homo | 1067 | 10531 | 0 | 627/660 |
| | | | sapiens cadherin, EGF LAG seven-pass | | | | |
| | | | G-type receptor 2, flamingo (Drosophila) | | | | |
| | | | homolog (CELSR2), mRNA | | | | |
| 88 | 118 | AF226998 | gi\|12655885\|gb\|AF226998.1\|AF226998 | 775 | 734 | 0 | 391/391 |
| | | | Homo sapiens dpy-30-like protein | | | | |
| | | | mRNA, complete cds | | | | |
| 89 | 41 | BC001106 | gi\|12654544\|gb\|BC001106.1\|BC001106 | 416 | 1542 | 1E−114 | 214/216 |
| | | | Homo sapiens, hypothetical protein, | | | | |
| | | | clone MGC: 891, mRNA, complete cds | | | | |
| 90 | 139 | XM_009005 | gi\|11424670\|ref\|XM_009005.1\| Homo | 1112 | 1186 | 0 | 617/630 |
| | | | sapiens kallikrein 11 (KLK11), mRNA | | | | |
| 91 | 83 | XM_006067 | gi\|12736004\|ref\|XM_006067.2\| Homo | 321 | 2525 | 4E−86 | 189/194 |
| | | | sapiens 7-dehydrocholesterol reductase | | | | |
| | | | (DHCR7), mRNA | | | | |
| 92 | 85 | AF092569 | gi\|3986473\|gb\|AF092569.1\|HSEIFP1 | 87.7 | 299 | 2E−16 | 74/79 |
| | | | Homo sapiens translation initiation factor | | | | |
| | | | eIF3 p40 subunit gene, exon 1 | | | | |
| 93 | 117 | BC004264 | gi\|13279061\|gb\|BC004264.1\|BC004264 | 1021 | 3138 | 0 | 564/582 |
| | | | Homo sapiens, Similar to EphB4, clone | | | | |
| | | | IMAGE: 3611312, mRNA, partial cds | | | | |
| 94 | 113 | BC000277 | gi\|12802987\|gb\|BC000277.1\|BC000277 | 1011 | 2947 | 0 | 586/618 |
| | | | Homo sapiens, clone MGC: 1892, | | | | |
| | | | mRNA, complete cds | | | | |
| 95 | 87 | NM_015339 | gi\|12229216\|ref\|NM_015339.1\| Homo | 599 | 4713 | 1E−169 | 302/302 |
| | | | sapiens activity-dependent | | | | |
| | | | neuroproctective protein (ADNP), mRNA | | | | |
| 96 | 88 | XM_009845 | gi\|11526339\|ref\|XM_009845.1\| Homo | 505 | 1291 | 1E−141 | 255/255 |
| | | | sapiens catechol-O-methyltransferase | | | | |
| | | | (COMT), mRNA | | | | |
| 97 | 89 | BC000509 | gi\|12653474\|gb\|BC000509.1\|BC000509 | 517 | 1008 | 1E−145 | 261/261 |
| | | | Homo sapiens, proteasome (prosome, | | | | |
| | | | macropain) subunit, beta type, 7, clone | | | | |
| | | | MGC: 8507, mRNA, complete cds | | | | |
| 98 | 125 | AK024618 | gi\|10436934\|dbj\|AK024618.1\|AK024618 | 1199 | 1804 | 0 | 662/676 |
| | | | Homo sapiens cDNA: FLJ20965 fis, | | | | |
| | | | clone ADSH01104 | | | | |
| 99 | 128 | D80001 | gi\|1136417\|dbj\|D80001.1\|D80001 | 1138 | 4994 | 0 | 639/663 |
| | | | Human mRNA for KIAA0179 gene, | | | | |
| | | | partial cds | | | | |
| 100 | 127 | BC004899 | gi\|13436169\|gb\|BC004899.1\|BC004899 | 930 | 1688 | 0 | 579/619 |
| | | | Homo sapiens, sigma receptor (SR31747 | | | | |
| | | | binding protein 1), clone MGC: 3851, | | | | |
| | | | mRNA, complete cds | | | | |
| 101 | 129 | BC003129 | gi\|13111916\|gb\|BC003129.1\|BC003129 | 1043 | 1882 | 0 | 583/602 |
| | | | Homo sapiens, non-POU-domain- | | | | |
| | | | containing, octamer-binding, clone | | | | |
| | | | MGC: 3380, mRNA, complete cds | | | | |
| 102 | 130 | XM_009690 | gi\|12742251\|ref\|XM_009690.2\| Homo | 438 | 2277 | 1E−121 | 367/404 |
| | | | sapiens hypothetical protein FLJ10850 | | | | |
| | | | (FLJ10850), mRNA | | | | |
| 104 | 136 | XM_005908 | gi\|11432093\|ref\|XM_005908.1\| Homo | 1235 | 2237 | 0 | 642/646 |
| | | | sapiens hypothetical protein FLJ10540 | | | | |
| | | | (FLJ10540), mRNA | | | | |
| 106 | 5 | NM_001699 | gi\|11863124\|ref\|NM_001699.2\| Homo | 922 | 4986 | 0 | 550/572 |
| | | | sapiens AXL receptor tyrosine kinase | | | | |
| | | | (AXL), transcript variant 2, mRNA | | | | |
| 107 | 137 | NM_025927 | gi\|13385417\|ref\|NM_025927.1\| Mus | 228 | 1486 | 1E−57 | 223/259 |
| | | | musculus RIKEN cDNA 2600005P05 | | | | |
| | | | gene (2600005P05Rik), mRNA | | | | |
| 108 | 138 | AK023154 | gi\|10434948\|dbj\|AK023154.1\|AK023154 | 924 | 3040 | 0 | 524/541 |
| | | | Homo sapiens cDNA FLJ13092 fis, | | | | |
| | | | clone NT2RP3002147 | | | | |
| 109 | 141 | AB017710 | gi\|5821114\|dbj\|AB017710.1\|AB017710 | 1067 | 2353 | 0 | 570/582 |
| | | | Homo sapiens U50HG genes for U50′ | | | | |
| | | | snoRNA and U50 snoRNA, complete | | | | |
| | | | sequence | | | | |
| 110 | 90 | NM_011775 | gi\|6756080\|ref\|NM_011775.1\| Mus | 40.1 | 2185 | 0.21 | 20/20 |
| | | | musculus zona pellucida glycoprotein 2 | | | | |
| | | | (Zp2), mRNA | | | | |
| 111 | 145 | AF086315 | gi\|3483660\|gb\|AF086315.1\|HUMZD52F10 | 841 | 600 | 0 | 467/480 |
| | | | Homo sapiens full length insert | | | | |
| | | | cDNA clone ZD52F10 | | | | |
| 112 | 91 | XM_002596 | gi\|12728741\|ref\|XM_002596.2\| Homo | 361 | 2877 | 4E−98 | 201/209 |
| | | | sapiens protein tyrosine phosphatase, | | | | |
| | | | receptor type, N (PTPRN), mRNA | | | | |
| 113 | 92 | XM_004484 | gi\|11418942\|ref\|XM_004484.1\| Homo | 482 | 1325 | 1E−134 | 243/243 |
| | | | sapiens tumor protein D52-like 1 | | | | |
| | | | (TPD52L1), mRNA | | | | |
| 114 | 93 | BC000331 | gi\|12653128\|gb\|BC000331.1\|BC000331 | 583 | 935 | 1E−165 | 305/310 |
| | | | Homo sapiens, proteasome (prosome, | | | | |
| | | | macropain) subunit, beta type, 4, clone | | | | |
| | | | MGC: 8522, mRNA, complete cds | | | | |
| 116 | 100 | NM_014791 | gi\|7661973\|ref\|NM_014791.1\| Homo | 1185 | 2470 | 0 | 644/664 |
| | | | sapiens KIAA0175 gene product | | | | |
| | | | (KIAA0175), mRNA | | | | |
| 118 | 123 | XM_004185 | gi\|12731991\|ref\|XM_004185.2\| Homo | 751 | 4092 | 0 | 463/481 |
| | | | sapiens valyl-tRNA synthetase 2 | | | | |
| | | | (VARS2), mRNA | | | | |
| 119 | 94 | XM_004750 | gi\|12733059\|ref\|XM_004750.2\| Homo | 484 | 629 | 1E−135 | 244/244 |
| | | | sapiens nudix (nucleoside diphosphate | | | | |
| | | | linked moiety X)-type motif 1 (NUDT1), | | | | |
| | | | mRNA | | | | |
| 120 | 95 | XM_006928 | gi\|12737727\|ref\|XM_006928.2\| Homo | 412 | 4870 | 1E−113 | 239/248 |
| | | | sapiens FOXJ2 forkhead factor | | | | |
| | | | (LOC55810), mRNA | | | | |
| 121 | 96 | AL133104 | gi\|6453587\|emb\|AL133104.1\|HSM801384 | 601 | 1186 | 1E−170 | 303/303 |
| | | | Homo sapiens mRNA; cDNA | | | | |
| | | | DKFZp434E1822 (from clone | | | | |
| | | | DKFZp434E1822); partial cds | | | | |
| 122 | 98 | BC004528 | gi\|1358647\|gb\|BC004528.1\|BC004528 | 466 | 2751 | 1E−129 | 244/246 |
| | | | Homo sapiens, clone MGC: 3017, | | | | |
| | | | mRNA, complete cds | | | | |
| 123 | 103 | AF097514 | gi\|4808600\|gb\|AF097514.1\|AF097514 | 1302 | 5221 | 0 | 721/738 |
| | | | Homo sapiens stearoyl-CoA desaturase | | | | |
| | | | (SCD) mRNA, complete cds | | | | |
| 124 | 103 | AF097514 | gi\|4808600\|gb\|AF097514.1\|AF097514 | 1328 | 5221 | 0 | 720/734 |
| | | | Homo sapiens stearoyl-CoA desaturase | | | | |
| | | | (SCD) mRNA, complete cds | | | | |
| 125 | 133 | AF220656 | gi\|7107358\|gb\|AF220656.1\|AF220656 | 936 | 3227 | 0 | 529/539 |
| | | | Homo sapiens apoptosis-associated | | | | |
| | | | nuclear protein PHLDA1 (PHLDA1) | | | | |
| | | | mRNA, partial cds | | | | |
| 126 | 133 | AF220656 | gi\|7107358\|gb\|AF220656.1\|AF220656 | 969 | 3227 | 0 | 544/555 |
| | | | Homo sapiens apoptosis-associated | | | | |
| | | | nuclear protein PHLDA1 (PHLDA1) | | | | |
| | | | mRNA, partial cds | | | | |
| 130 | 115 | AF019770 | gi\|2674084\|gb\|AF019770.1\|AF019770 | 1277 | 1202 | 0 | 735/751 |
| | | | Homo sapiens macrophage inhibitory | | | | |
| | | | cytokine-1 (MIC-1) mRNA, complete | | | | |
| | | | cds | | | | |
| 131 | 106 | AK022926 | gi\|10434597\|dbj\|AK022926.1\|AK022926 | 589 | 2455 | 1E−166 | 299/300 |
| | | | Homo sapiens cDNA FLJ12864 fis, | | | | |
| | | | clone NT2RP2003604, highly similar to | | | | |
| | | | Homo sapiens alpha-catenin-like protein | | | | |
| | | | (CTNNAL1) mRNA | | | | |
| 132 | 113 | BC000277 | gi\|12802987\|gb\|BC000277.1\|BC000277 | 513 | 2947 | 1E−144 | 262/263 |
| | | | Homo sapiens, clone MGC: 1892, | | | | |
| | | | mRNA, complete cds | | | | |
| 133 | 113 | XM_006213 | gi\|12736410\|ref\|XM_006213.2\| Homo | 579 | 6477 | 1E−163 | 299/300 |
| | | | sapiens KIAA0712 gene product | | | | |
| | | | (KIAA0712), mRNA | | | | |
| 134 | 106 | XM_005404 | gi\|11428250\|ref\|XM_005404.1\| Homo | 561 | 2446 | 1E−158 | 300/306 |
| | | | sapiens catenin (cadherin-associated | | | | |
| | | | protein), alpha-like 1 (CTNNAL1), | | | | |
| | | | mRNA | | | | |
| 135 | 116 | BC001068 | gi\|12654476\|gb\|BC001068.1\|BC001068 | 595 | 2333 | 1E−168 | 300/300 |
| | | | Homo sapiens, clone IMAGE: 2823731, | | | | |
| | | | mRNA, partial cds | | | | |
| 136 | 117 | BC004264 | gi\|13279061\|gb\|BC004264.1\|BC004264 | 486 | 3138 | 1E−135 | 250/252 |
| | | | Homo sapiens, Similar to EphB4, clone | | | | |
| | | | IMAGE: 3611312, mRNA, partial cds | | | | |
| 138 | 123 | Y09668 | gi\|1834428\|emb\|Y09668.1\|DRTKLELF1 | 36.2 | 2272 | 3.5 | 18/18 |
| | | | D. rerio mRNA for tyrosine kinase ligand | | | | |
| | | | (elf-1) | | | | |
| 140 | 140 | XM_008802 | gi\|12741169\|ref\|XM_008802.2\| Homo | 710 | 3185 | 0 | 358/358 |
| | | | sapiens retinoblastoma-binding protein 8 | | | | |
| | | | (RBBP8), mRNA | | | | |
| 141 | 143 | XM_009111 | gi\|12741675\|ref\|XM_009111.2\| Homo | 672 | 1453 | 0 | 362/367 |
| | | | sapiens sulfotransferase family, | | | | |
| | | | cytosolic, 2B, member 1 (SULT2B1), | | | | |
| | | | mRNA | | | | |
| 142 | 121 | NM_001408 | gi\|13325063\|ref\|NM_001408.1\| Homo | 755 | 10531 | 0 | 388/389 |
| | | | sapiens cadherin, EGF LAG seven-pass | | | | |
| | | | G-type receptor 2, flamingo (Drosophila) | | | | |
| | | | homolog (CELSR2), mRNA | | | | |
| 143 | 121 | NM_001408 | gi\|13325063\|ref\|NM_001408.1\| Homo | 741 | 10531 | 0 | 376/377 |
| | | | sapiens cadherin, EGF LAG seven-pass | | | | |
| | | | G-type receptor 2, flamingo (Drosophila) | | | | |
| | | | homolog (CELSR2), mRNA | | | | |
| 144 | 139 | XM_009005 | gi\|11424670\|ref\|XM_009005.1\| Homo | 622 | 1186 | 1E−176 | 340/346 |
| | | | sapiens kallikrein 11 (KLK11), mRNA | | | | |
| 145 | 112 | XM_003733 | gi\|12731080\|ref\|XM_003733.2\| Homo | 753 | 2088 | 0 | 380/380 |
| | | | sapiens DEAD-box protein abstrakt | | | | |
| | | | (ABS), mRNA | | | | |
| 147 | 166 | AF216754 | gi\|6707650\|gb\|AF216754.1\|AF216754 | 567 | 354 | 1E−160 | 296/298 |
| | | | Homo sapiens over-expressed breast | | | | |
| | | | tumor protein (OBTP) mRNA, complete | | | | |
| | | | cds | | | | |
| 148 | 167 | XM_003384 | gi\|12730453\|ref\|XM_003384.2\| Homo | 640 | 748 | 0 | 323/323 |
| | | | sapiens hypothetical protein | | | | |
| | | | (LOC51316), mRNA | | | | |
| 149 | 169 | XM_009527 | gi\|11420875\|ref\|XM_009527.1\| Homo | 751 | 594 | 0 | 382/383 |
| | | | sapiens secretory leukocyte protease | | | | |
| | | | inhibitor (antileukoproteinase) (SLPI), | | | | |
| | | | mRNA | | | | |
| 150 | 30 | AF279897 | gi\|12751120\|gb\|AF279897.1\|AF279897 | 654 | 727 | 0 | 333/334 |
| | | | Homo sapiens PNAS-143 mRNA, | | | | |
| | | | complete cds | | | | |
| 151 | 170 | NM_004219 | gi\|11038651\|ref\|NM_004219.2\| Homo | 730 | 728 | 0 | 368/368 |
| | | | sapiens pituitary tumor-transforming 1 | | | | |
| | | | (PTTG1), mRNA | | | | |
| 152 | 171 | S76771 | gi\|914225\|gb\|S76771.1\|S76771 | 210 | 6849 | 1E−52 | 168/185 |
| | | | TPO = thrombopoietin [human, Genomic, | | | | |
| | | | 6849 nt] | | | | |
| 153 | 171 | M81890 | gi\|186274\|gb\|M81890.1\|HUMIL11A | 216 | 6870 | 2E−54 | 180/203 |
| | | | Human interleukin 11 (IL11) gene, | | | | |
| | | | complete mRNA | | | | |
| 154 | 172 | XM_004952 | gi\|12733392\|ref\|XM_004952.2\| Homo | 603 | 2861 | 1E−171 | 310/312 |
| | | | sapiens solute carrier family 26, member | | | | |
| | | | 3 (SLC26A3), mRNA | | | | |
| 155 | 147 | XM_009488 | gi\|12742285\|ref\|XM_009488.21\| Homo | 716 | 770 | 0 | 361/361 |
| | | | sapiens ubiquitin carrier protein E2-C | | | | |
| | | | (UBCH10), mRNA | | | | |
| 156 | 149 | XM_011755 | gi\|12734624\|ref\|XM_011755.1\| Homo | 733 | 2566 | 0 | 370/370 |
| | | | sapiens SET translocation (myeloid | | | | |
| | | | leukemia-associated) (SET), mRNA | | | | |
| 157 | 150 | L19183 | gi\|307154\|gb\|L19183.1\|HUMMAC30X | 593 | 2002 | 1E−168 | 323/331 |
| | | | Human MAC30 mRNA, 3′ end | | | | |
| 158 | 151 | AK024303 | gi\|10436651\|dbj\|AK024303.1\|AK024303 | 698 | 1591 | 0 | 352/352 |
| | | | Homo sapiens cDNA FLJ14241 fis, | | | | |
| | | | clone OVARC1000533 | | | | |
| 159 | 173 | BC001410 | gi\|12655116\|gb\|BC001410.1\|BC001410 | 682 | 577 | 0 | 354/356 |
| | | | Homo sapiens, S100 calcium-binding | | | | |
| | | | protein A11 (calgizzarin), clone | | | | |
| | | | MGC: 2149, mRNA, complete cds | | | | |
| 161 | 175 | BC001308 | gi\|12654922\|gb\|BC001308.1\|BC001308 | 646 | 2263 | 0 | 353/362 |
| | | | Homo sapiens, clone HQ0310 | | | | |
| | | | PRO0310p1, clone MGC: 5505, mRNA, | | | | |
| | | | complete cds | | | | |
| 162 | 176 | XM_009004 | gi\|12742171\|ref\|XM_009004.2\| Homo | 458 | 1448 | 1E−127 | 231/231 |
| | | | sapiens kallikrein 10 (KLK10), mRNA | | | | |
| 163 | 177 | XM_006705 | gi\|12737366\|ref\|XM_006705.2\| Homo | 630 | 784 | 1E−179 | 324/326 |
| | | | sapiens nascent-polypeptide-associated | | | | |
| | | | complex alpha polypeptide (NACA), | | | | |
| | | | mRNA | | | | |
| 164 | 178 | AF102848 | gi\|12641918\|gb\|AF102848.1\|AF102848 | 739 | 1649 | 0 | 379/381 |
| | | | Homo sapiens keratin 23 (KRT23) | | | | |
| | | | mRNA, complete cds | | | | |
| 165 | 179 | XM_003512 | gi\|12730699\|ref\|XM_003512.2\| Homo | 718 | 1231 | 0 | 371/374 |
| | | | sapiens amphiregulin (schwannoma- | | | | |
| | | | derived growth factor) (AREG), mRNA | | | | |
| 166 | 180 | XM_005313 | gi\|12734542\|ref\|XM_005313.2\| Homo | 652 | 1275 | 0 | 335/337 |
| | | | sapiens gamma-glutamyl hydrolase | | | | |
| | | | (conjugase, folylpolygammaglutamyl | | | | |
| | | | hydrolase) (GGH), mRNA | | | | |
| 168 | 182 | XM_010117 | gi\|11419764\|ref\|XM_010117.1\| Homo | 690 | 2519 | 0 | 360/364 |
| | | | sapiens plastin 3 (T isoform) (PLS3), | | | | |
| | | | mRNA | | | | |
| 169 | 183 | L47277 | gi\|986911\|gb\|L47277.1\|HUMTOPATRA | 646 | 994 | 0 | 353/362 |
| | | | Homo sapiens (cell line HepG2, HeLa) | | | | |
| | | | alpha topoisomerase truncated-form | | | | |
| | | | mRNA, 3′UTR | | | | |
| 170 | 184 | XM_012941 | gi\|12742342\|ref\|XM_012941.1\| Homo | 670 | 3071 | 0 | 341/342 |
| | | | sapiens chromosome 20 open reading | | | | |
| | | | frame 1 (C20ORF1), mRNA | | | | |
| 171 | 185 | NM_000581 | gi\|10834975\|ref\|NM_000581.1\| Homo | 640 | 1134 | 0 | 339/343 |
| | | | sapiens glutathione peroxidase 1 | | | | |
| | | | (GPX1), mRNA | | | | |
| 172 | 185 | NM_000581 | gi\|10834975\|ref\|NM_000581.1\| Homo | 640 | 1134 | 0 | 338/343 |
| | | | sapiens glutathione peroxidase 1 | | | | |
| | | | (GPX1), mRNA | | | | |
| 173 | 186 | X06705 | gi\|35511\|emb\|X06705.1\|HSPLAX | 700 | 883 | 0 | 353/353 |
| | | | Human PLA-X mRNA | | | | |
| 174 | 187 | D45915 | gi\|1483130\|dbj\|D45915.1\|D45915 | 666 | 2584 | 0 | 336/336 |
| | | | Human mRNA for p80 protein, complete | | | | |
| | | | cds | | | | |
| 176 | 189 | BC000242 | gi\|12652962\|gb\|BC000242.1\|BC000242 | 521 | 849 | 1E−146 | 280/286 |
| | | | Homo sapiens, CGI-138 protein, clone | | | | |
| | | | MGC: 676, mRNA, complete cds | | | | |
| 177 | 190 | BC005945 | gi\|13543585\|gb\|BC005945.1\|BC005945 | 567 | 1391 | 1E−160 | 295/298 |
| | | | Homo sapiens, MAD2 (mitotic arrest | | | | |
| | | | deficient, yeast, homolog)-like 1, clone | | | | |
| | | | MGC: 14577, mRNA, complete cds | | | | |
| 179 | 192 | XM_010835 | gi\|12728550\|ref\|XM_010835.1\| Homo | 452 | 1679 | 1E−125 | 313/340 |
| | | | sapiens similar to hypothetical protein | | | | |
| | | | (H. sapiens) (LOC65349), mRNA | | | | |
| 180 | 193 | XM_009475 | gi\|11420562\|ref\|XM_009475.1\| Homo | 668 | 2110 | 0 | 340/341 |
| | | | sapiens S-adenosylhomocysteine | | | | |
| | | | hydrolase (AHCY), mRNA | | | | |
| 181 | 194 | AF054183 | gi\|4092053\|gb\|AF054183.1\|AF054183 | 690 | 1148 | 0 | 351/352 |
| | | | Homo sapiens GTP binding protein | | | | |
| | | | mRNA, complete cds | | | | |
| 182 | 195 | BC005356 | gi\|13529175\|gb\|BC005356.1\|BC005356 | 396 | 1050 | 1E−108 | 200/200 |
| | | | Homo sapiens, Similar to hypothetical | | | | |
| | | | protein MGC3077, clone MGC: 12457, | | | | |
| | | | mRNA, complete cds | | | | |
| 183 | 196 | XM_006545 | gi\|12736918\|ref\|XM_006545.2\| Homo | 613 | 588 | 1E−173 | 309/309 |
| | | | sapiens hypothetical protein (HSPC152), | | | | |
| | | | mRNA | | | | |
| 184 | 197 | XM_003598 | gi\|12730828\|ref\|XM_003598.2\| Homo | 662 | 440 | 0 | 345/349 |
| | | | sapiens S100 calcium-binding protein P | | | | |
| | | | (S100P), mRNA | | | | |
| 185 | 197 | NM_005980 | gi\|5174662\|ref\|NM_005980.1\| Homo | 565 | 439 | 1E−159 | 291/293 |
| | | | sapiens S100 calcium-binding protein P | | | | |
| | | | (S100P), mRNA | | | | |
| 190 | 199 | M80340 | gi\|339767\|gb\|M80340.1\|HUMTNL12 | 539 | 6075 | 1E−151 | 351/377 |
| | | | Human transposon L1.1 with a base | | | | |
| | | | deletion relative to L1.2B resulting in a | | | | |
| | | | premature stop codon in the coding | | | | |
| | | | region | | | | |
| 191 | 199 | U93574 | gi\|2072975\|gb\|U93574.1\|HSU93574 | 404 | 5979 | 1E−111 | 290/318 |
| | | | Human L1 element L1.39 p40 and | | | | |
| | | | putative p150 genes, complete cds | | | | |
| 192 | 200 | AC002143 | gi\|2168303\|gb\|AC002143.1\|AC002143 | 214 | 4025 | 8E−54 | 235/275 |
| | | | Homo sapiens (subclone 4_b10 from | | | | |
| | | | BAC H102) DNA sequence, complete | | | | |
| | | | sequence | | | | |
| 193 | 176 | BC002710 | gi\|12803744\|gb\|BC002710.1\|BC002710 | 648 | 1542 | 0 | 327/327 |
| | | | Homo sapiens, kallikrein 10, clone | | | | |
| | | | MGC: 3667, mRNA, complete cds | | | | |
| 194 | 201 | XM_004286 | gi\|11418526\|ref\|XM_004286.1\| Homo | 561 | 700 | 1E−158 | 289/291 |
| | | | sapiens ribosomal protein L10a | | | | |
| | | | (RPL10A), mRNA | | | | |
| 196 | 118 | AF226998 | gi\|12655885\|gb\|AF226998.1\|AF226998 | 505 | 734 | 1E−141 | 255/255 |
| | | | Homo sapiens dpy-30-like protein | | | | |
| | | | mRNA, complete cds | | | | |
| 198 | 204 | AL3900221 | gi\|10862787\|emb\|AL390022.11\|AL390022 | 470 | 9277 | 1E−130 | 337/369 |
| | | | Human DNA sequence from clone | | | | |
| | | | RP11-370B6 on chromosome X, | | | | |
| | | | complete sequence [Homo sapiens] | | | | |
| 200 | 206 | BC002476 | gi\|12803316\|gb\|BC002476.1\|BC002476 | 615 | 695 | 1E−174 | 316/318 |
| | | | Homo sapiens, non-metastatic cells 2, | | | | |
| | | | protein (NM23B) expressed in, clone | | | | |
| | | | MGC: 2212, mRNA, complete cds | | | | |
| 201 | 207 | XM_005235 | gi\|12734360\|ref\|XM_005235.2\| Homo | 605 | 1507 | 1E−171 | 311/313 |
| | | | sapiens eukaryotic translation initiation | | | | |
| | | | factor 3, subunit 6 (48 kD) (EIF3S6), | | | | |
| | | | mRNA | | | | |
| 202 | 152 | BC004427 | gi\|13325215\|gb\|BC004427.1\|BC004427 | 611 | 967 | 1E−173 | 321/324 |
| | | | Homo sapiens, proteasome (prosome, | | | | |
| | | | macropain) subunit, alpha type, 7, clone | | | | |
| | | | MGC: 3755, mRNA, complete cds | | | | |
| 204 | 151 | AK024303 | gi\|10436651\|dbj\|AK024303.1\|AK024303 | 585 | 1591 | 1E−165 | 295/295 |
| | | | Homo sapiens cDNA FLJ14241 fis, | | | | |
| | | | clone OVARC1000533 | | | | |
| 205 | 151 | AK024303 | gi\|10436651\|dbj\|AK024303.1\|AK024303 | 591 | 1591 | 1E−167 | 298/298 |
| | | | Homo sapiens cDNA FLJ14241 fis, | | | | |
| | | | clone OVARC1000533 | | | | |
| 206 | 153 | XM_003927 | gi\|11417090\|ref\|XM_003927.1\| Homo | 656 | 473 | 0 | 337/339 |
| | | | sapiens Apg12 (autophagy 12, S. cerevisiae)- | | | | |
| | | | like (APG12L), mRNA | | | | |
| 207 | 154 | BC000947 | gi\|13111828\|gb\|BC000947.2\|BC000947 | 644 | 1608 | 0 | 336/340 |
| | | | Homo sapiens, clone IMAGE: 3450586, | | | | |
| | | | mRNA, partial cds | | | | |
| 208 | 155 | XM_004478 | gi\|12732587\|ref\|XM_004478.2\| Homo | 660 | 1993 | 0 | 339/341 |
| | | | sapiens glyoxalase I (GLO1), mRNA | | | | |
| 209 | 156 | L36587 | gi\|598241\|gb\|L36587.1\|HUMUHGA | 664 | 1357 | 0 | 335/335 |
| | | | Homo sapiens spliced UHG RNA | | | | |
| 210 | 157 | BC000447 | gi\|12653354\|gb\|BC000447.1\|BC000447 | 656 | 585 | 0 | 334/335 |
| | | | Homo sapiens, macrophage migration | | | | |
| | | | inhibitory factor (glycosylation- | | | | |
| | | | inhibiting factor), clone MGC: 8444, | | | | |
| | | | mRNA, complete cds | | | | |
| 211 | 158 | BC001708 | gi\|12804576\|gb\|BC001708.1\|BC001708 | 626 | 906 | 1E−178 | 319/320 |
| | | | Homo sapiens, ribosomal protein S3A, | | | | |
| | | | clone MGC: 1626, mRNA, complete cds | | | | |
| 212 | 159 | BC005008 | gi\|13477106\|gb\|BC005008.1\|BC005008 | 668 | 2249 | 0 | 337/337 |
| | | | Homo sapiens, carcinoembryonic | | | | |
| | | | antigen-related cell adhesion molecule 6 | | | | |
| | | | (non-specific cross reacting antigen), | | | | |
| | | | clone MGC: 10467, mRNA, complete cds | | | | |
| 213 | 160 | AL110141 | gi\|5817036\|emb\|AL110141.1\|HSM800785 | 519 | 656 | 1E−145 | 265/266 |
| | | | Homo sapiens mRNA; cDNA | | | | |
| | | | DKFZp564D0164 (from clone | | | | |
| | | | DKFZp564D0164) | | | | |
| 214 | 161 | NM_014366 | gi\|7657047\|ref\|NM_014366.1\| Homo | 634 | 2059 | 1E−180 | 335/343 |
| | | | sapiens putative nucleotide binding | | | | |
| | | | protein, estradiol-induced (E2IG3), | | | | |
| | | | mRNA | | | | |
| 215 | 162 | AL359585 | gi\|8655645\|emb\|AL359585.1\|HSM802687 | 129 | 2183 | 4E−28 | 68/69 |
| | | | Homo sapiens mRNA; cDNA | | | | |
| | | | DKFZp762B195 (from clone | | | | |
| | | | DKFZp762B195) | | | | |
| 217 | 195 | NM_024051 | gi\|13129017\|ref\|NM_024051.1\| Homo | 646 | 1195 | 0 | 329/330 |
| | | | sapiens hypothetical protein MGC3077 | | | | |
| | | | (MGC3077), mRNA | | | | |
| 218 | 164 | XM_006551 | gi\|11441541\|ref\|XM_006551.1\| Homo | 601 | 905 | 1E−170 | 321/327 |
| | | | sapiens interferon induced | | | | |
| | | | transmembrane protein 2 (1-8D) | | | | |
| | | | (IFITM2), mRNA | | | | |
| 220 | 65 | XM_007736 | gi\|11433251\|ref\|XM_007736.1\| Homo | 648 | 836 | 0 | 330/331 |
| | | | sapiens KIAA0101 gene product | | | | |
| | | | (KIAA0101), mRNA | | | | |
| 222 | 124 | U07571 | gi\|497170\|gb\|U07571.1\|HSU07571 | 46.1 | 392 | 0.005 | 23/23 |
| | | | Human clone S1X13-SS13A | | | | |
| | | | dinucleotide repeat at Xq21 | | | | |
| 223 | 126 | AF288394 | gi\|12620197\|gb\|AF288394.1\|AF288394 | 718 | 1961 | 0 | 377/382 |
| | | | Homo sapiens C1orf19 mRNA, partial | | | | |
| | | | cds | | | | |
| 224 | 132 | U35622 | gi\|5733846\|gb\|U35622.2\|HSU35622 | 779 | 2107 | 0 | 398/400 |
| | | | Homo sapiens EWS protein/E1A | | | | |
| | | | enhancer binding protein chimera | | | | |
| | | | mRNA, complete cds | | | | |
| 225 | 291 | BC004928 | gi\|13436256\|gb\|BC004928.1\|BC004928 | 793 | 2567 | 0 | 400/400 |
| | | | Homo sapiens, clone MGC: 10493, | | | | |
| | | | mRNA, complete cds | | | | |
| 226 | 142 | AL137736 | gi\|6808315\|emb\|AL137736.1\|HSM802318 | 692 | 2053 | 0 | 363/365 |
| | | | Homo sapiens mRNA; cDNA | | | | |
| | | | DKFZp586P2321 (from clone | | | | |
| | | | DKFZp586P2321) | | | | |
| 227 | 144 | XM_008130 | gi\|11424226\|ref\|XM_008130.1\| Homo | 785 | 1361 | 0 | 396/396 |
| | | | sapiens galactokinase 1 (GALK1), | | | | |
| | | | mRNA | | | | |
| 228 | 115 | AF019770 | gi\|2674084\|gb\|AF019770.1\|AF019770 | 1370 | 1202 | 0 | 721/729 |
| | | | Homo sapiens macrophage inhibitory | | | | |
| | | | cytokine-1 (MIC-1) mRNA, complete | | | | |
| | | | cds | | | | |
| 230 | 255 | AF179710 | gi\|9836821\|gb\|AF179710.1\|AF179710 | 40.1 | 1096 | 0.35 | 20/20 |
| | | | Pongo pygmaeus RH50 glycoprotein | | | | |
| | | | (RHAG) gene, intron 9 | | | | |
| 231 | 262 | XM_009943 | gi\|11418022\|ref\|XM_009943.1\| Homo | 864 | 5486 | 0 | 455/462 |
| | | | sapiens tissue inhibitor of | | | | |
| | | | metalloproteinase 3 (Sorsby fundus | | | | |
| | | | dystrophy, pseudoinflammatory) | | | | |
| | | | (TIMP3), mRNA | | | | |
| 232 | 256 | AF134904 | gi\|4809150\|gb\|AF134904.1\|AF134904 | 42.1 | 2558 | 0.097 | 21/21 |
| | | | Schistocerca gregaria semaphorin 2a | | | | |
| | | | mRNA, complete cds | | | | |
| 233 | 263 | BC003002 | gi\|12804286\|gb\|BC003002.1\|BC003002 | 523 | 2165 | 1E−147 | 284/294 |
| | | | Homo sapiens, polo (Drosophia)-like | | | | |
| | | | kinase, clone MGC: 3988, mRNA, | | | | |
| | | | complete cds | | | | |
| 234 | 265 | M68513 | gi\|199119\|gb\|M68513.1\|MUSMEK4 | 882 | 3197 | 0 | 491/503 |
| | | | Mouse eph-related receptor tyrosine | | | | |
| | | | kinase (Mek4) mRNA, complete cds | | | | |
| 235 | 264 | XM_007931 | gi\|12739533\|ref\|XM_007931.2\| Homo | 730 | 1593 | 0 | 407/414 |
| | | | sapiens solute carrier family 9 | | | | |
| | | | (sodium/hydrogen exchanger), isoform 3 | | | | |
| | | | regulatory factor 2 (SLC9A3R2), mRNA | | | | |
| 236 | 266 | XM_003748 | gi\|12731108\|ref\|XM_003748.2\| Homo | 387 | 2967 | 1E−106 | 267/302 |
| | | | sapiens serum-inducible kinase (SNK), | | | | |
| | | | mRNA | | | | |
| 239 | 269 | BC001401 | gi\|12655098\|gb\|BC001401.1\|BC001401 | 773 | 1571 | 0 | 396/398 |
| | | | Homo sapiens, Similar to sterile-alpha | | | | |
| | | | motif and leucine zipper containing | | | | |
| | | | kinase AZK, clone MGC: 808, mRNA, | | | | |
| | | | complete cds | | | | |
| 240 | 270 | S76617 | gi\|914203\|gb\|S76617.1\|S76617 | 38.2 | 2608 | 0.87 | 19/19 |
| | | | blk = protein tyrosine kinase [human, B | | | | |
| | | | lymphocytes, mRNA, 2608 nt] | | | | |
| 242 | 273 | AK006144 | gi\|12839086\|dbj\|AK006144.1\|AK006144 | 323 | 1387 | 1E−86 | 233/255 |
| | | | Mus musculus adult male testis cDNA, | | | | |
| | | | RIKEN full-length enriched library, | | | | |
| | | | clone: 1700020B19, full insert sequence | | | | |
| 243 | 276 | X91656 | gi\|2125862\|emb\|X91656.1\|MMSRP20 | 494 | 13121 | 1E−138 | 262/265 |
| | | | M. musculus Srp20 gene | | | | |
| 247 | 236 | BC002499 | gi\|12803360\|gb\|BC002499.1\|BC002499 | 640 | 2129 | 0 | 330/331 |
| | | | Homo sapiens, serine/threonine kinase | | | | |
| | | | 15, clone MGC: 1605, mRNA, complete | | | | |
| | | | cds | | | | |
| 248 | 277 | NM_003618 | gi\|4506376\|ref\|NM_003618.1\|Homo | 702 | 4380 | 0 | 361/362 |
| | | | sapiens mitogen-activated protein kinase | | | | |
| | | | kinase kinase kinase 3 (MAP4K3), | | | | |
| | | | mRNA | | | | |
| 249 | 278 | NM_018492 | gi\|8923876\|ref\|NM_018492.1\|Homo | 779 | 1548 | 0 | 400/401 |
| | | | sapiens PDZ-binding kinase; T-cell | | | | |
| | | | originated protein kinase (TOPK), | | | | |
| | | | mRNA | | | | |
| 250 | 278 | XM_005110 | gi\|12734111\|ref\|XM_005110.2\|Homo | 1003 | 1537 | 0 | 506/506 |
| | | | sapiens PDZ-binding kinase; T-cell | | | | |
| | | | originated protein kinase (TOPK), | | | | |
| | | | mRNA | | | | |
| 252 | 274 | BC002466 | gi\|12803300\|gb\|BC002466.1\|BC002466 | 1074 | 2451 | 0 | 575/581 |
| | | | Homo sapiens, v-raf murine sarcoma | | | | |
| | | | 3611 viral oncogene homolog 1, clone | | | | |
| | | | MGC: 2356, mRNA, complete cds | | | | |
| 253 | 280 | XM_001729 | gi\|11423735\|ref\|XM_001729.1\|Homo | 751 | 1658 | 0 | 385/387 |
| | | | sapiens v-akt murine thymoma viral | | | | |
| | | | oncogene homolog 3 (protein kinase B, | | | | |
| | | | gamma) (AKT3), mRNA | | | | |
| 254 | 259 | NM_002893 | gi\|13259504\|ref\|NM_002893.2\|Homo | 1164 | 1946 | 0 | 715/746 |
| | | | sapiens retinoblastoma-binding protein 7 | | | | |
| | | | (RBBP7), mRNA | | | | |
| 255 | 210 | AB056798 | gi\|13365896\|dbj\|AB056798.1\|AB056798 | 678 | 4521 | 0 | 435/461 |
| | | | Macaca fascicularis brain cDNA | | | | |
| | | | clone: QflA-11110, full insert sequence | | | | |
| 256 | 213 | AJ302649 | gi\|11140019\|emb\|AJ302649.1\|DRE302649 | 42.1 | 2188 | 0.058 | 21/21 |
| | | | Danio rerio mRNA for GABAA | | | | |
| | | | receptor betaZ2 subunit (gabaabeta2 | | | | |
| | | | gene) | | | | |
| 257 | 212 | L27711 | gi\|808006\|gb\|L27711.1\|HUMKAP1A | 1057 | 844 | 0 | 550/553 |
| | | | Human protein phosphatase (KAP1) | | | | |
| | | | mRNA, complete cds | | | | |
| 258 | 214 | NM_004336 | gi\|4757877\|ref\|NM_004336.1\|Homo | 1318 | 3446 | 0 | 694/701 |
| | | | sapiens budding uninhibited by | | | | |
| | | | benzimidazoles 1 (yeast homolog) | | | | |
| | | | (BUB1), mRNA | | | | |
| 260 | 216 | NM_004300 | gi\|4757713\|ref\|NM_004300.1\|Homo | 985 | 2222 | 0 | 621/656 |
| | | | sapiens acid phosphatase 1, soluble | | | | |
| | | | (ACP1), transcript variant a, mRNA | | | | |
| 262 | 219 | AK026166 | gi\|10438929\|dbj\|AK026166.1\|AK026166 | 1402 | 1813 | 0 | 838/871 |
| | | | Homo sapiens cDNA: FLJ22513 fis, | | | | |
| | | | clone HRC12111, highly similar to | | | | |
| | | | HUMKUP Human Ku (p70/p80) subunit | | | | |
| | | | mRNA | | | | |
| 263 | 252 | BC004937 | gi\|13436283\|gb\|BC004937.1\|BC004937 | 898 | 1032 | 0 | 475/480 |
| | | | Homo sapiens, clone MGC: 10779, | | | | |
| | | | mRNA, complete cds | | | | |
| 264 | 220 | XM_006375 | gi\|12736706\|ref\|XM_006375.2\|Homo | 1316 | 737 | 0 | 693/703 |
| | | | sapiens glutathione S-transferase pi | | | | |
| | | | (GSTP1), mRNA | | | | |
| 265 | 218 | BC001827 | gi\|12804774\|gb\|BC001827.1\|BC001827 | 1259 | 1073 | 0 | 672/683 |
| | | | Homo sapiens, Similar to | | | | |
| | | | deoxythymidylate kinase (thymidylate | | | | |
| | | | kinase), clone MGC: 3923, mRNA, | | | | |
| | | | complete cds | | | | |
| 266 | 221 | BC002900 | gi\|12804094\|gb\|BC002900.1\|BC002900 | 1217 | 867 | 0 | 699/728 |
| | | | Homo sapiens, Similar to proteasome | | | | |
| | | | (prosome, macropain) subunit, alpha | | | | |
| | | | type, 2, clone IMAGE: 3942625, mRNA, | | | | |
| | | | partial cds | | | | |
| 267 | 226 | AF064029 | gi\|4091894\|gb\|AF064029.1\|AF064029 | 60 | 779 | 0.0000002 | 30/30 |
| | | | Helianthus tuberosus lectin 1 mRNA, | | | | |
| | | | complete cds | | | | |
| 268 | 212 | L27711 | gi\|808006\|gb\|L27711.1\|HUMKAP1A | 1257 | 844 | 0 | 694/705 |
| | | | Human protein phosphatase (KAP1) | | | | |
| | | | mRNA, complete cds | | | | |
| 269 | 223 | XM_011470 | gi\|12732420\|ref\|XM_011470.1\|Homo | 1029 | 2591 | 0 | 519/519 |
| | | | sapiens myristoylated alanine-rich | | | | |
| | | | protein kinase C substrate (MARCKS, | | | | |
| | | | 80K-L) (MACS), mRNA | | | | |
| 270 | 221 | BC002900 | gi\|12804094\|gb\|BC002900.1\|BC002900 | 1330 | 867 | 0 | 724/739 |
| | | | Homo sapiens, Similar to proteasome | | | | |
| | | | (prosome, macropain) subunit, alpha | | | | |
| | | | type, 2, clone IMAGE: 3942625, mRNA, | | | | |
| | | | partial cds | | | | |
| 271 | 206 | BC002476 | gi\|12803316\|gb\|BC002476.1\|BC002476 | 1203 | 695 | 0 | 610/611 |
| | | | Homo sapiens, non-metastatic cells 2, | | | | |
| | | | protein (NM23B) expressed in, clone | | | | |
| | | | MGC: 2212, mRNA, complete cds | | | | |
| 272 | 225 | XM_007980 | gi\|12739602\|ref\|XM_007980.2\| Homo | 904 | 1866 | 0 | 481/487 |
| | | | sapiens membrane-associated tyrosine- | | | | |
| | | | and threonine-specific cdc2-inhibitory | | | | |
| | | | kinase (PKMYT1), mRNA | | | | |
| 273 | 231 | S50810 | gi\|262070\|gb\|S50810.1\|S50810 {satellite | 52 | 1086 | 0.00003 | 29/30 |
| | | | DNA} [Drosophila melanogaster, Doc | | | | |
| | | | mobile element, Transposon, 1086 nt] | | | | |
| 274 | 233 | AF217396 | gi\|8132773\|gb\|AF217396.1\|AF217396 | 46.1 | 2007 | 0.004 | 23/23 |
| | | | Drosophila melanogaster clone 2G2 | | | | |
| | | | unknown mRNA | | | | |
| 275 | 232 | L29057 | gi\|609636\|gb\|L29057.1\|XELCADH | 40.1 | 4097 | 0.081 | 20/20 |
| | | | Xenopus laevis (clone: XTCAD-1) | | | | |
| | | | cadherin gene, complete cds | | | | |
| 276 | 227 | XM_008475 | gi\|11426657\|ref\|XM_008475.1\| Homo | 40.1 | 6962 | 0.32 | 20/20 |
| | | | sapiens KIAA0100 gene product | | | | |
| | | | (KIAA0100), mRNA | | | | |
| 277 | 229 | M34230 | gi\|204651\|gb\|M34230.1\|RATHPA1 Rat | 56 | 3282 | 0.000002 | 28/28 |
| | | | haptoglobin (Hp) gene, exons 1, 2 and 3 | | | | |
| 278 | 230 | AJ302649 | gi\|11140019\|emb\|AJ302649.1\|DRE302649 | 50.1 | 2188 | 0.0002 | 25/25 |
| | | | Danio rerio mRNA for GABAA | | | | |
| | | | receptor betaZ2 subunit (gabaabeta2 | | | | |
| | | | gene) | | | | |
| 279 | 239 | NM_021158 | gi\|11056039\|ref\|NM_021158.1\| Homo | 710 | 2257 | 0 | 358/358 |
| | | | sapiens protein kinase domains | | | | |
| | | | containing protein similar to | | | | |
| | | | phosphoprotein C8FW (LOC57761), | | | | |
| | | | mRNA | | | | |
| 280 | 238 | AX030958 | gi\|10278361\|emb\|AX030958.1\|AX030958 | 56 | 3828 | 0.000005 | 28/28 |
| | | | Sequence 7 from Patent WO9800549 | | | | |
| 281 | 228 | XM_010102 | gi\|11419709\|ref\|XM_010102.1\| Homo | 1469 | 1767 | 0 | 839/865 |
| | | | sapiens phosphoglycerate kinase 1 | | | | |
| | | | (PGK1), mRNA | | | | |
| 282 | 235 | U00238 | gi\|404860\|gb\|U00238.1\|U00238 Homo | 1132 | 3600 | 0 | 653/677 |
| | | | sapiens glutamine PRPP | | | | |
| | | | amidotransferase (GPAT) mRNA, | | | | |
| | | | complete cds | | | | |
| 283 | 237 | NM_002753 | gi\|4506080\|ref\|NM_002753.1\| Homo | 733 | 2372 | 0 | 381/385 |
| | | | sapiens mitogen-activated protein kinase | | | | |
| | | | 10 (MAPK10), mRNA | | | | |
| 284 | 241 | XM_006151 | gi\|12736568\|ref\|XM_006151.2\| Homo | 979 | 1640 | 0 | 494/494 |
| | | | sapiens similar to serine protease, | | | | |
| | | | umbilical endothelium (H. sapiens) | | | | |
| | | | (LOC63320), mRNA | | | | |
| 285 | 242 | BC004215 | gi\|13278917\|gb\|BC004215.1\|BC004215 | 1106 | 3373 | 0 | 578/585 |
| | | | Homo sapiens, eukaryotic translation | | | | |
| | | | elongation factor 1 gamma, clone | | | | |
| | | | MGC: 4501, mRNA, complete cds | | | | |
| 286 | 243 | NM_000455 | gi\|4507270\|ref\|NM_000455.1\| Homo | 1243 | 2158 | 0 | 651/660 |
| | | | sapiens serine/threonine kinase 11 | | | | |
| | | | (Peutz-Jeghers syndrome) (STK11), | | | | |
| | | | mRNA | | | | |
| 287 | 258 | XM_004842 | gi\|12733228\|ref\|XM_004842.2\| Homo | 682 | 3715 | 0 | 381/387 |
| | | | sapiens SFRS protein kinase 2 (SRPK2), | | | | |
| | | | mRNA | | | | |
| 288 | 261 | NM_020197 | gi\|9910273\|ref\|NM_020197.1\| Homo | 561 | 1694 | 1E−158 | 346/355 |
| | | | sapiens HSKM-B protein (HSKM-B), | | | | |
| | | | mRNA | | | | |
| 289 | 260 | XM_001416 | gi\|12719345\|ref\|XM_001416.2\| Homo | 517 | 2966 | 1E−145 | 277/284 |
| | | | sapiens similar to ribosomal protein S6 | | | | |
| | | | kinase, 90 kD, polypeptide 1 (H. sapiens) | | | | |
| | | | (LOC65290), mRNA | | | | |
| 290 | 236 | BC002499 | gi\|12803360\|gb\|BC002499.1\|BC002499 | 618 | 2129 | 1E−175 | 358/366 |
| | | | Homo sapiens, serine/threonine kinase | | | | |
| | | | 15, clone MGC: 1605, mRNA, complete | | | | |
| | | | cds | | | | |
| 293 | 246 | XM_004679 | gi\|11419466\|ref\|XM_004679.1\| Homo | 383 | 987 | 1E−104 | 214/224 |
| | | | sapiens cyclin-dependent kinase 5 | | | | |
| | | | (CDK5), mRNA | | | | |
| 294 | 245 | XM_005258 | gi\|11426310\|ref\|XM_005258.1\| Homo | 902 | 2391 | 0 | 463/466 |
| | | | sapiens serum/glucocorticoid regulated | | | | |
| | | | kinase-like (SGKL), mRNA | | | | |
| 295 | 248 | XM_008654 | gi\|12740227\|ref\|XM_008654.2\| Homo | 662 | 3576 | 0 | 369/374 |
| | | | sapiens mitogen-activated protein kinase | | | | |
| | | | kinase 4 (MAP2K4), mRNA | | | | |
| 296 | 129 | BC002364 | gi\|12803120\|gb\|BC002364.1\|BC002364 | 688 | 2645 | 0 | 347/347 |
| | | | Homo sapiens, non-POU-domain- | | | | |
| | | | containing, octamer-binding, clone | | | | |
| | | | MGC: 8677, mRNA, complete cds | | | | |
| 298 | 2 | NM_004443 | gi\|4758287\|ref\|NM_004443.1\| Homo | 533 | 3805 | 1E−150 | 297/301 |
| | | | sapiens EphB3 (EPHB3) mRNA | | | | |
| 299 | 254 | XM_002383 | gi\|11429253\|ref\|XM_002383.1\| Homo | 571 | 2832 | 1E−161 | 333/340 |
| | | | sapiens activin A receptor, type I | | | | |
| | | | (ACVR1), mRNA | | | | |
| 300 | 249 | BC000633 | gi\|12653696\|gb\|BC000633.1\|BC000633 | 537 | 2993 | 1E−151 | 396/419 |
| | | | Homo sapiens, TTK protein kinase, | | | | |
| | | | clone MGC: 865, mRNA, complete cds | | | | |
| 301 | 2 | NM_004443 | gi\|4758287\|ref\|NM_004443.1\| Homo | 795 | 3805 | 0 | 453/467 |
| | | | sapiens EphB3 (EPHB3) mRNA | | | | |
| 302 | 224 | XM_005116 | gi\|12734122\|ref\|XM_005116.2\| Homo | 470 | 3396 | 1E−131 | 252/259 |
| | | | sapiens protein tyrosine kinase 2 beta | | | | |
| | | | (PTK2B), mRNA | | | | |
| 303 | 222 | AB056389 | gi\|13358639\|dbj\|AB056389.1\|AB056389 | 196 | 2038 | 9E−49 | 129/141 |
| | | | Macaca fascicularis brain cDNA, | | | | |
| | | | clone: QflA-12365 | | | | |
| 304 | 208 | BC002921 | gi\|12804134\|gb\|BC002921.1\|BC002921 | 446 | 2349 | 1E−123 | 260/274 |
| | | | Homo sapiens, Similar to protein kinase | | | | |
| | | | related to S. cerevisiae STE20, effector | | | | |
| | | | for Cdc42Hs, clone MGC: 10333, | | | | |
| | | | mRNA, complete cds | | | | |
| 305 | 250 | XM_004079 | gi\|11417431\|ref\|XM_004079.1\| Homo | 525 | 1719 | 1E−147 | 275/280 |
| | | | sapiens serine/threonine-protein kinase | | | | |
| | | | PRP4 homolog (PRP4), mRNA | | | | |
| 306 | 251 | XM_004306 | gi\|11418576\|ref\|XM_004306.1\| Homo | 317 | 7375 | 4E−85 | 160/160 |
| | | | sapiens v-ros avian UR2 sarcoma virus | | | | |
| | | | oncogene homolog 1 (ROS1), mRNA | | | | |
| 307 | 252 | BC004937 | gi\|13436283\|gb\|BC004937.1\|BC004937 | 975 | 1032 | 0 | 567/582 |
| | | | Homo sapiens, clone MGC: 10779, | | | | |
| | | | mRNA, complete cds | | | | |
| 308 | 253 | NM_006293 | gi\|5454141\|ref\|NM_006293.1\| Homo | 823 | 4364 | 0 | 457/466 |
| | | | sapiens TYRO3 protein tyrosine kinase | | | | |
| | | | (TYRO3), mRNA | | | | |
| 309 | 257 | X71765 | gi\|402221\|emb\|X71765.1\|PFCAATPAS | 38.2 | 5477 | 1.4 | 19/19 |
| | | | P. falciparum gene for Ca2+ - ATPase | | | | |

### Example 2

### Detection of Differential Expressions Using Arrays

[0328] mRNA isolated from samples of cancerous and normal colon tissue obtained from patients were analyzed to identify genes differentially expressed in cancerous and normal cells. Normal and cancerous cells collected from cryopreserved patient tissues were isolated using laser capture microdissection (LCM) techniques, which techniques are well known in the art (see, e.g., Ohyama et al. (2000) Biotechniques 29:530-6; Curran et al. 2000) Mol. Pathol. 53:64-8; Suarez-Quian et al. (1999) Biotechniques 26:328-35; Simone et al. (1998) Trends Genet 14:272-6; Conia et al. (1997) J. Clin. Lab. Anal. 11:28-38; Emmert-Buck et al. (1996) Science 274:998-1001).

[0329] Tables 4A and 4B (inserted before the claims) provides information about each patient from which the samples were isolated, including: the “Patient ID” and “Path ortID”, which are numbers assigned to the patient and the pathology reports for identification purposes; the “Group” to which the patients have been assigned; the anatomical location of the tumor (“Anatom Loc”); the “Primary Tumor Size”; the “Primary Tumor Grade”; the identification of the histopathological grade (“Histopath Grade”); a description of local sites to which the tumor had invaded (“Local Invasion”); the presence of lymph node metastases (“Lymph Node Met”); the incidence of lymph node metastases (provided as a number of lymph nodes positive for metastasis over the number of lymph nodes examined) (“Incidence Lymphnode Met”); the “Regional Lymphnode Grade”; the identification or detection of metastases to sites distant to the tumor and their location (“Distant Met & Loc”); a description of the distant metastases (“Descrip Distant Met”); the grade of distant metastasis (“Dist Met Grade”); and general comments about the patient or the tumor (“Comments”). Adenoma was not described in any of the patients; adenoma dysplasia (described as hyperplasia by the pathologist) was described in Patient ID No. 695. Extranodal extensions were described in two patients, Patient ID Nos. 784 and 791. Lymphovascular invasion was described in seven patients, Patient ID Nos. 128, 278, 517, 534, 784, 786, and 791. Crohn's-like infiltrates were described in seven patients, Patient ID Nos. 52, 264, 268, 392, 393, 784, and 791.

TABLE 4A

| | Path | | | Primary | Primary | | |
|---|---|---|---|---|---|---|---|
| Patient | Report | | | Tumor | Tumor | Histopath | |
| ID | ID | Group | Anatom Loc | Size | Grade | Grade | Local Invasion |
| 15 | 21 | III | Ascending | 4 | T3 | G2 | extending into |
| | | | colon | | | | subserosal adipose |
| | | | | | | | tissue |
| 52 | 71 | II | Ascending | 9 | T3 | G3 | Invasion through |
| | | | colon | | | | muscularis propria, |
| | | | | | | | subserosal |
| | | | | | | | involvement; ileocec. |
| | | | | | | | valve involvement |
| 121 | 140 | II | Sigmoid | 6 | T4 | G2 | Invasion of |
| | | | | | | | muscularis propria |
| | | | | | | | into serosa, involving |
| | | | | | | | submucosa of urinary |
| | | | | | | | bladder |
| 125 | 144 | II | Cecum | 6 | T3 | G2 | Invasion through the |
| | | | | | | | muscularis propria |
| | | | | | | | into suserosal adipose |
| | | | | | | | tissue. Ileocecal |
| | | | | | | | junction. |
| 128 | 147 | III | Transverse | 5 | T3 | G2 | Invasion of |
| | | | colon | | | | muscularis propria |
| | | | | | | | into percolonic fat |
| 130 | 149 | | Splenic | 5.5 | T3 | | through wall and into |
| | | | flexure | | | | surrounding adipose |
| | | | | | | | tissue |
| 133 | 152 | II | Rectum | 5 | T3 | G2 | Invasion through |
| | | | | | | | muscularis propria |
| | | | | | | | into non- |
| | | | | | | | peritonealized |
| | | | | | | | pericolic tissue; gross |
| | | | | | | | configuration is |
| | | | | | | | annular. |
| 141 | 160 | IV | Cecum | 5.5 | T3 | G2 | Invasion of |
| | | | | | | | muscularis propria |
| | | | | | | | into pericolonic |
| | | | | | | | adipose tissue, but |
| | | | | | | | not through serosa. |
| | | | | | | | Arising from tubular |
| | | | | | | | adenoma. |
| 156 | 175 | III | Hepatic | 3.8 | T3 | G2 | Invasion through |
| | | | flexure | | | | mucsularis propria |
| | | | | | | | into |
| | | | | | | | subserosa/pericolic |
| | | | | | | | adipose, no serosal |
| | | | | | | | involvement. Gross |
| | | | | | | | configuration |
| | | | | | | | annular. |
| 228 | 247 | III | Rectum | 5.8 | T3 | G2 to G3 | Invasion through |
| | | | | | | | muscularis propria to |
| | | | | | | | involve subserosal, |
| | | | | | | | perirectoal adipose, |
| | | | | | | | and serosa |
| 264 | 283 | II | Ascending | 5.5 | T3 | G2 | Invasion through |
| | | | colon | | | | muscularis propria |
| | | | | | | | into subserosal |
| | | | | | | | adipose tissue. |
| 266 | 285 | III | Transverse | 9 | T3 | G2 | Invades through |
| | | | colon | | | | muscularis propria to |
| | | | | | | | involve pericolonic |
| | | | | | | | adipose, extends to |
| | | | | | | | serosa. |
| 268 | 287 | I | Cecum | 6.5 | T2 | G2 | Invades full thickness |
| | | | | | | | of muscularis propria, |
| | | | | | | | but mesenteric |
| | | | | | | | adipose free of |
| | | | | | | | malignancy |
| 278 | 297 | III | Rectum | 4 | T3 | G2 | Invasion into |
| | | | | | | | perirectal adipose |
| | | | | | | | tissue. |
| 295 | 314 | II | Ascending | 5 | T3 | G2 | Invasion through |
| | | | colon | | | | muscularis propria |
| | | | | | | | into percolic adipose |
| | | | | | | | tissue. |
| 339 | 358 | II | Rectosigmoid | 6 | T3 | G2 | Extends into |
| | | | | | | | perirectal fat but |
| | | | | | | | does not reach serosa |
| 341 | 360 | II | Ascending | 2 cm | T3 | G2 | Invasion through |
| | | | colon | invasive | | | muscularis propria to |
| | | | | | | | involve pericolonic |
| | | | | | | | fat. Arising from |
| | | | | | | | villous adenoma. |
| 356 | 375 | II | Sigmoid | 6.5 | T3 | G2 | Through colon wall |
| | | | | | | | into subserosal |
| | | | | | | | adipose tissue. No |
| | | | | | | | serosal spread seen. |
| 360 | 412 | III | Ascending | 4.3 | T3 | G2 | Invasion thru |
| | | | colon | | | | muscularis propria to |
| | | | | | | | pericolonic fat |
| 392 | 444 | IV | Ascending | 2 | T3 | G2 | Invasion through |
| | | | colon | | | | muscularis propria |
| | | | | | | | into subserosal |
| | | | | | | | adipose tissue, not |
| | | | | | | | serosa. |
| 393 | 445 | II | Cecum | 6 | T3 | G2 | Cecum, invades |
| | | | | | | | through muscularis |
| | | | | | | | propria to involve |
| | | | | | | | subserosal adipose |
| | | | | | | | tissue but not serosa. |
| 413 | 465 | IV | Ascending | 4.8 | T3 | G2 | Invasive through |
| | | | colon | | | | muscularis to involve |
| | | | | | | | periserosal fat; |
| | | | | | | | abutting ileocecal |
| | | | | | | | junction. |
| 505 | 383 | IV | | 7.5 cm | T3 | G2 | Invasion through |
| | | | | max dim | | | muscularis propria |
| | | | | | | | involving pericolic |
| | | | | | | | adipose, serosal |
| | | | | | | | surface uninvolved |
| 517 | 395 | IV | Sigmoid | 3 | T3 | G2 | penetrates muscularis |
| | | | | | | | propria, involves |
| | | | | | | | pericolonic fat. |
| 534 | 553 | II | Ascending | 12 | T3 | G3 | Invasion through the |
| | | | colon | | | | muscularis propria |
| | | | | | | | involving pericolic |
| | | | | | | | fat. Serosa free of |
| | | | | | | | tumor. |
| 546 | 565 | IV | Ascending | 5.5 | T3 | G2 | Invasion through |
| | | | colon | | | | muscularis propria |
| | | | | | | | extensively through |
| | | | | | | | submucosal and |
| | | | | | | | extending to serosa. |
| 577 | 596 | II | Cecum | 11.5 | T3 | G2 | Invasion through the |
| | | | | | | | bowel wall, into |
| | | | | | | | suberosal adipose. |
| | | | | | | | Serosal surface free |
| | | | | | | | of tumor. |
| 695 | 714 | II | Cecum | 14 | T3 | G2 | extending through |
| | | | | | | | bowel wall into |
| | | | | | | | serosal fat |
| 784 | 803 | IV | Ascending | 3.5 | T3 | G3 | through muscularis |
| | | | colon | | | | propria into pericolic |
| | | | | | | | soft tissues |
| 786 | 805 | IV | Descending | 9.5 | T3 | G2 | through muscularis |
| | | | colon | | | | propria into pericolic |
| | | | | | | | fat, but not at serosal |
| | | | | | | | surface |
| 791 | 810 | IV | Ascending | 5.8 | T3 | G3 | through the |
| | | | colon | | | | muscularis propria |
| | | | | | | | into pericolic fat |
| 888 | 908 | IV | Ascending | 2 | T2 | G1 | into muscularis |
| | | | colon | | | | propria |
| 889 | 909 | IV | Cecum | 4.8 | T3 | G2 | through muscularis |
| | | | | | | | propria int subserosal |
| | | | | | | | tissue |

[0330] TABLE 4B

| | | Incidence | Regional | | Descrip | Dist | |
|---|---|---|---|---|---|---|---|
| Patient | Lymphnode | Lymphnode | Lympnode | Distant Met | Distant | Met | |
| ID | Met | Met | Grade | & Loc | Met | Grade | Comment |
| 15 | positive | 8-Mar | N1 | negative | | MX | invasive |
| | | | | | | | adenocarcinoma, |
| | | | | | | | moderately |
| | | | | | | | differentiated; focal |
| | | | | | | | perineural invasion is |
| | | | | | | | seen |
| 52 | negative | 0/12 | N0 | negative | | M0 | Hyperplastic polyp in |
| | | | | | | | appendix. |
| 121 | negative | 0/34 | N0 | negative | | M0 | Perineural invasion; |
| | | | | | | | donut anastomosis |
| | | | | | | | negative. One |
| | | | | | | | tubulovillous and one |
| | | | | | | | tubular adenoma with |
| | | | | | | | no high grade |
| | | | | | | | dysplasia. |
| 125 | negative | 0/19 | N0 | negative | | M0 | patient history of |
| | | | | | | | metastatic melanoma |
| 128 | positive | 5-Jan | N1 | negative | | M0 | |
| 130 | positive | 24-Oct | N2 | negative | | M1 | |
| 133 | negative | 0/9 | N0 | negative | | M0 | Small separate |
| | | | | | | | tubular adenoma (0.4 cm) |
| 141 | positive | 21-Jul | N2 | positive | adenocarcinoma | M1 | Perineural invasion |
| | | | | (Liver) | consistant | | identified adjacent to |
| | | | | | with | | metastatic |
| | | | | | primary | | adenocarcinoma. |
| 156 | positive | 13-Feb | N1 | negative | | M0 | Separate |
| | | | | | | | tubolovillous and |
| | | | | | | | tubular adenomas |
| 228 | positive | 8-Jan | N1 | negative | | MX | Hyperplastic polyps |
| 264 | negative | 0/10 | N0 | negative | | M0 | Tubulovillous |
| | | | | | | | adenoma with high |
| | | | | | | | grade dysplasia |
| 266 | negative | 0/15 | N1 | positive | 0.4 cm, | MX | |
| | | | | (Mesenteric | may | | |
| | | | | deposit) | represent | | |
| | | | | | lymphnode | | |
| | | | | | completely | | |
| | | | | | replaced by | | |
| | | | | | tumor | | |
| 268 | negative | 0/12 | N0 | negative | | M0 | |
| 278 | positive | 10-Jul | N2 | negative | | M0 | Descending colon |
| | | | | | | | polyps, no HGD or |
| | | | | | | | carcinoma identified. |
| 295 | negative | 0/12 | N0 | negative | | M0 | Melanosis coli and |
| | | | | | | | diverticular disease. |
| 339 | negative | 0/6 | N0 | negative | | M0 | 1 hyperplastic polyp |
| | | | | | | | identified |
| 341 | negative | 0/4 | N0 | negative | | MX | |
| 356 | negative | 0/4 | N0 | negative | | M0 | |
| 360 | positive | 5-Jan | N1 | negative | | M0 | Two mucosal polyps |
| 392 | positive | 6-Jan | N1 | positive | Macrovesicular | M1 | Tumor arising at |
| | | | | (Liver) | and | | prior ileocolic |
| | | | | | microvesicular | | surgical anastomosis. |
| | | | | | steatosis | | |
| 393 | negative | 0/21 | N0 | negative | | M0 | |
| 413 | negative | 0/7 | N0 | positive | adenocarcinoma | M1 | rediagnosis of |
| | | | | (Liver) | in | | oophorectomy path to |
| | | | | | multiple | | metastatic colon |
| | | | | | slides | | cancer. |
| 505 | positive | 17-Feb | N1 | positive | moderately | M1 | Anatomical location |
| | | | | (Liver) | differentiated | | of primary not |
| | | | | | adenocarcinoma, | | notated in report. |
| | | | | | consistant | | Evidence of chronic |
| | | | | | with | | colitis. |
| | | | | | primary | | |
| 517 | positive | 6-Jun | N2 | negative | | M0 | No mention of distant |
| | | | | | | | met in report |
| 534 | negative | 0/8 | N0 | negative | | M0 | Omentum with |
| | | | | | | | fibrosis and fat |
| | | | | | | | necrosis. Small |
| | | | | | | | bowel with acute and |
| | | | | | | | chronic serositis, |
| | | | | | | | focal abscess and |
| | | | | | | | adhesions. |
| 546 | positive | 12-Jun | N2 | positive | metastatic | M1 | |
| | | | | (Liver) | adenocarcinoma | | |
| 577 | negative | 0/58 | N0 | negative | | M0 | Appendix dilated and |
| | | | | | | | fibrotic, but not |
| | | | | | | | involved by tumor |
| 695 | negative | 0/22 | N0 | negative | | MX | tubular adenoma and |
| | | | | | | | hyperplstic polyps |
| | | | | | | | present, moderately |
| | | | | | | | differentiated |
| | | | | | | | adenoma with |
| | | | | | | | mucinous |
| | | | | | | | diferentiation (% not |
| | | | | | | | stated) |
| 784 | positive | 17-May | N2 | positive | | M1 | invasive poorly |
| | | | | (Liver) | | | differentiated |
| | | | | | | | adenosquamous |
| | | | | | | | carcinoma |
| 786 | negative | 0/12 | N0 | positive | | M1 | moderately |
| | | | | (Liver) | | | differentiated |
| | | | | | | | invasive |
| | | | | | | | adenocarcinoma |

[0331] Identification of Differentially Expressed Genes

[0332] cDNA probes were prepared from total RNA isolated from the patient cells described above. Since LCM provides for the isolation of specific cell types to provide a substantially homogenous cell sample, this provided for a similarly pure RNA sample.

[0333] Total RNA was first reverse transcribed into cDNA using a primer containing a T7 RNA polymerase promoter, followed by second strand DNA synthesis. cDNA was then transcribed in vitro to produce antisense RNA using the T7 promoter-mediated expression (see, e.g., Luo et al. (1999) Nature Med 5:117-122), and the antisense RNA was then converted into cDNA. The second set of cDNAs were again transcribed in vitro, using the T7 promoter, to provide antisense RNA. Optionally, the RNA was again converted into cDNA, allowing for up to a third round of T7-mediated amplification to produce more antisense RNA. Thus the procedure provided for two or three rounds of in vitro transcription to produce the final RNA used for fluorescent labeling.

[0334] Fluorescent probes were generated by first adding control RNA to the antisense RNA mix, and producing fluorescently labeled cDNA from the RNA starting material. Fluorescently labeled cDNAs prepared from the tumor RNA sample were compared to fluorescently labeled cDNAs prepared from normal cell RNA sample. For example, the cDNA probes from the normal cells were labeled with Cy3 fluorescent dye (green) and the cDNA probes prepared from the tumor cells were labeled with Cy5 fluorescent dye (red), and vice versa.

[0335] Each array used had an identical spatial layout and control spot set. Each microarray was divided into two areas, each area having an array with, on each half, twelve groupings of 32×12 spots, for a total of about 9,216 spots on each array. The two areas are spotted identically which provide for at least two duplicates of each clone per array.

[0336] Polynucleotides for use on the arrays were obtained from both publicly available sources and from cDNA libraries generated from selected cell lines and patient tissues. PCR products of from about 0.5 kb to 2.0 kb amplified from these sources were spotted onto the array using a Molecular Dynamics Gen III spotter according to the manufacturer's recommendations. The first row of each of the 24 regions on the array had about 32 control spots, including 4 negative control spots and 8 test polynucleotides. The test polynucleotides were spiked into each sample before the labeling reaction with a range of concentrations from 2-600 pg/slide and ratios of 1:1. For each array design, two slides were hybridized with the test samples reverse-labeled in the labeling reaction. This provided for about four duplicate measurements for each clone, two of one color and two of the other, for each sample.

[0337] Table 5 (inserted before the claims) describes the physical location of the differentially expressed polynucleotides on the arrays. Table 5 includes: 1) a Spot ID, which is a unique identifier for each spot containing target sequence of interest on all arrays used; 2) a “Chip Num” which refers to a particular array representing a specific set of genes; 3) the “Sample Name or Clone Name” from which the sequence was obtained; and 4) the coordinates of the sequence on the particular array (“Coordinates”). Table 9 (inserted before the claims) provides information about the sequences on the arrays, specifically: 1) Candidate Identification Number; 2) Sample name or clone name; 3) function of the gene corresponding to the sequence (as determined by homology to genes of known function by BLAST search of GenBank); 4) the class of the gene (as determined by homology to genes of known function by BLAST search of GenBank); 5) the pathway in which the gene is implicated; 6) gene assignment; which refers to the gene to which the sequence has the greatest homology or identity; 7) the “Gene Symbol”; 8) chromosome number on which the gene is located (“Chrom Num”); 9) the map position on the chromosome.

TABLE 5

| | Chip | Sample Name or | |
|---|---|---|---|
| SpotID | Num | Clone Name | Coords |
| 27 | 1 | M00023371A:G03 | 1:85 |
| 195 | 1 | M00001489B:G04 | 1:227 |
| 212 | 1 | M00026888A:A03 | 1:244 |
| 335 | 1 | M00001558C:B06 | 1:367 |
| 511 | 1 | M00003852B:C01 | 2:191 |
| 538 | 1 | M00022009A:A12 | 2:218 |
| 599 | 1 | M00001374A:A06 | 2:279 |
| 943 | 1 | M00001341B:A11 | 3:271 |
| 1048 | 1 | M00007965C:G08 | 3:376 |
| 1160 | 1 | M00022140A:E11 | 4:136 |
| 1176 | 1 | M00022180D:E11 | 4:152 |
| 1195 | 1 | M00001675B:G05 | 4:171 |
| 1203 | 1 | M00003853B:G11 | 4:179 |
| 1252 | 1 | M00022742A:F08 | 4:228 |
| 1266 | 1 | M00026900D:F02 | 4:242 |
| 1605 | 1 | M00001496A:G03 | 5:229 |
| 1648 | 1 | M00001393D:F01 | 5:272 |
| 1793 | 1 | M00023283C:C06 | 6:65 |
| 1927 | 1 | M00007985A:B08 | 6:199 |
| 1933 | 1 | M00007985B:A03 | 6:205 |
| 2332 | 1 | M00026903D:D11 | 7:252 |
| 2404 | 1 | M00006883D:H12 | 7:324 |
| 2633 | 1 | M00007987D:D04 | 8:201 |
| 2659 | 1 | M00023431B:A01 | 8:227 |
| 2662 | 1 | M00023363C:A04 | 8:230 |
| 2799 | 1 | M00004031B:D12 | 8:367 |
| 2889 | 1 | M00003814C:C11 | 9:105 |
| 2917 | 1 | M00007935D:A05 | 9:133 |
| 3005 | 1 | M00021956B:A09 | 9:221 |
| 3204 | 1 | M00027066B:E09 | 10:68 |
| 3296 | 1 | M00022215C:A10 | 10:160 |
| 3313 | 1 | M00003961B:H05 | 10:177 |
| 3519 | 1 | M00005360A:A07 | 10:383 |
| 3665 | 1 | M0001600C:B11 | 11:177 |
| 3748 | 1 | M00001402B:C12 | 11:260 |
| 3974 | 1 | M00022168B:F02 | 12:134 |
| 4040 | 1 | M00008049B:A12 | 12:200 |
| 8594 | 2 | RG:742775:10011:A07 | 1:178 |
| 8630 | 2 | I:2458926:03B01:C07 | 1:214 |
| 8788 | 2 | I:3229778:02B01:B07 | 1:372 |
| 8840 | 2 | I:1857563:05B02:D01 | 2:72 |
| 9042 | 2 | I:4072558:12B01:A07 | 2:274 |
| 9191 | 2 | I:1421929:05A01:D02 | 3:71 |
| 9349 | 2 | I:1723834:01A01:C02 | 3:229 |
| 9478 | 2 | I:1817434:02B01:C02 | 3:358 |
| 9489 | 2 | I:1750782:02A01:A08 | 3:369 |
| 9547 | 2 | I:1297179:05A02:F02 | 4:75 |
| 9684 | 2 | I:1443877:03B02:B08 | 4:212 |
| 9724 | 2 | I:1384823:01B02:F08 | 4:252 |
| 9739 | 2 | I:2902903:12A02:F02 | 4:267 |
| 9809 | 2 | I:2152363:04A02:A08 | 4:337 |
| 10000 | 2 | RG:813679:10011:H03 | 5:176 |
| 10006 | 2 | RG:759927:10011:C09 | 5:182 |
| 10153 | 2 | I:1712592:04A01:E03 | 5:329 |
| 10168 | 2 | I:2615513:04B01:D09 | 5:344 |
| 10200 | 2 | I:1702266:02B01:D09 | 5:376 |
| 10299 | 2 | I:2825369:07A02:F09 | 6:123 |
| 10394 | 2 | I:1450639:03B02:E09 | 6:218 |
| 10426 | 2 | I:2499976:01B02:E09 | 6:250 |
| 10600 | 2 | I:1749883:05B01:D04 | 7:72 |
| 10614 | 2 | I:1516301:05B01:C10 | 7:86 |
| 10621 | 2 | I:1298021:05A01:G10 | 7:93 |
| 10744 | 2 | I:1613615:03B01:D10 | 7:216 |
| 10877 | 2 | I:1395918:04A01:G10 | 7:349 |
| 10956 | 2 | I:1600586:05B02:F04 | 8:76 |
| 10984 | 2 | I:1666080:07B02:D04 | 8:104 |
| 11017 | 2 | I:1633286:06A02:E04 | 8:137 |
| 11019 | 2 | I:1609538:06A02:F04 | 8:139 |
| 11035 | 2 | I:1630804:06A02:F10 | 8:155 |
| 11223 | 2 | I:1749417:04A02:D10 | 8:343 |
| 11245 | 2 | I:1809385:02A02:G04 | 8:365 |
| 11258 | 2 | I:1854245:02B02:E10 | 8:378 |
| 11445 | 2 | I:1854558:03A01:C11 | 9:213 |
| 11569 | 2 | I:1509602:04A01:A11 | 9:337 |
| 11739 | 2 | I:1699587:06A02:F11 | 10:155 |
| 11838 | 2 | I:2840195:01B02:G11 | 10:254 |
| 11908 | 2 | I:2914719:04B02:B05 | 10:324 |
| 11923 | 2 | I:2239819:04A02:B11 | 10:339 |
| 12001 | 2 | I:2483109:05A01:A06 | 11:65 |
| 12007 | 2 | I:2499479:05A01:D06 | 11:71 |
| 12013 | 2 | I:2675481:05A01:G06 | 11:77 |
| 12104 | 2 | RG:773612:10011:D06 | 11:168 |
| 12270 | 2 | I:2914605:04B01:G06 | 11:334 |
| 12513 | 2 | I:2079906:01A02:A06 | 12:225 |
| 12519 | 2 | I:1810640:01A02:D06 | 12:231 |
| 16933 | 3 | I:1963753:18B01:E07 | 1:122 |
| 17035 | 3 | RG:166410:10006:F01 | 1:171 |
| 17059 | 3 | I:1920650:16A01:B01 | 1:195 |
| 17068 | 3 | I:1923769:16B01:F01 | 1:204 |
| 17069 | 3 | I:901317:16A01:G01 | 1:205 |
| 17075 | 3 | I:3518380:16A01:B07 | 1:211 |
| 17171 | 3 | RG:666323:10010:B07 | 1:307 |
| 17385 | 3 | RG:244132:10007:E01 | 2:169 |
| 17386 | 3 | RG:2117694:10016:E01 | 2:170 |
| 17399 | 3 | RG:241029:10007:D07 | 2:183 |
| 17459 | 3 | I:2056395:13A02:B07 | 2:243 |
| 17533 | 3 | RG:1555877:10013:G07 | 2:317 |
| 17696 | 3 | I:1923490:18B01:H08 | 3:128 |
| 17730 | 3 | RG:526536:10002:A02 | 3:162 |
| 17742 | 3 | RG:612874:10002:G02 | 3:174 |
| 17746 | 3 | RG:530002:10002:A08 | 3:178 |
| 17836 | 3 | RG:29739:10004:F02 | 3:268 |
| 17964 | 3 | I:1920522:15B02:F02 | 4:44 |
| 18089 | 3 | RG:244601:10007:E02 | 4:169 |
| 18100 | 3 | RG:2048081:10016:B08 | 4:180 |
| 18102 | 3 | RG:2097294:10016:C08 | 4:182 |
| 18240 | 3 | RG:1927470:10015:H08 | 4:320 |
| 18331 | 3 | I:1926006:15A01:F09 | 5:59 |
| 18379 | 3 | I:2359588:18A01:F03 | 5:107 |
| 18389 | 3 | I:986558:18A01:C09 | 5:117 |
| 18408 | 3 | I:970933:14B01:D03 | 5:136 |
| 18445 | 3 | RG:180296:10006:G03 | 5:173 |
| 18488 | 3 | I:1743234:16B01:D09 | 5:216 |
| 18552 | 3 | RG:25258:10004:D09 | 5:280 |
| 18580 | 3 | RG:985973:10012:B09 | 5:308 |
| 18801 | 3 | RG:203031:10007:A09 | 6:177 |
| 18804 | 3 | RG:2055807:10016:B09 | 6:180 |
| 18856 | 3 | I:605019:13B02:D03 | 6:232 |
| 18886 | 3 | RG:43296:10005:C03 | 6:262 |
| 18903 | 3 | RG:301608:10008:D09 | 6:279 |
| 18904 | 3 | RG:45623:10005:D09 | 6:280 |
| 18921 | 3 | RG:1461567:10013:E03 | 6:297 |
| 18942 | 3 | RG:1895716:10015:G09 | 6:318 |
| 18985 | 3 | I:1402615:09A02:E03 | 6:361 |
| 19067 | 3 | I:2054678:19A01:F10 | 7:91 |
| 19120 | 3 | I:956077:14B01:H04 | 7:144 |
| 19175 | 3 | I:750899:16A01:D04 | 7:199 |
| 19189 | 3 | I:620494:16A01:C10 | 7:213 |
| 19229 | 3 | I:2060725:13A01:G10 | 7:253 |
| 19264 | 3 | RG:35892:10004:H10 | 7:288 |
| 19374 | 3 | I:1758241:15B02:G04 | 8:46 |
| 19428 | 3 | I:1965257:18B02B04 | 8:100 |
| 19590 | 3 | RG:43534:10005:C04 | 8:262 |
| 19600 | 3 | RG:110764:10005:H04 | 8:272 |
| 19603 | 3 | RG:278409:10008:B10 | 8:275 |
| 19604 | 3 | RG:41097:10005:B10 | 8:276 |
| 19629 | 3 | RG:1552386:10013:G04 | 8:301 |
| 19642 | 3 | RG:1838677:10015:E10 | 8:314 |
| 19766 | 3 | I:1996180:19B01:C11 | 9:86 |
| 19816 | 3 | I:1431819:14B01:D05 | 9:136 |
| 19821 | 3 | I:1833191:14A01:G05 | 9:141 |
| 19822 | 3 | I:1227385:14B01:G05 | 9:142 |
| 19835 | 3 | I:2055926:14A01:F11 | 9:155 |
| 19950 | 3 | RG:32281:10004:G05 | 9:270 |
| 19962 | 3 | RG:27403:10004:E11 | 9:282 |
| 19971 | 3 | RG:665682:10010:B05 | 9:291 |
| 20102 | 3 | I:2759046:19B02:C05 | 10:70 |
| 20196 | 3 | RG:2012168:10016:B05 | 10:164 |
| 20280 | 3 | I:1960722:13B02:D11 | 10:248 |
| 20303 | 3 | RG:343821:10008:H05 | 10:271 |
| 20315 | 3 | RG:323425:10008:F11 | 10:283 |
| 20506 | 3 | I:1969044:18B01:E12 | 11:122 |
| 20586 | 3 | I:659143:16B01:E06 | 11:202 |
| 20691 | 3 | RG:669110:10010:B12 | 11:307 |
| 20703 | 3 | RG:740831:10010:H12 | 11:319 |
| 20775 | 3 | I:1968921:15A02:D06 | 12:39 |
| 20878 | 3 | I:998612:14B02:G06 | 12:142 |
| 20915 | 3 | RG:208954:10007:B12 | 12:179 |
| 20940 | 3 | I:1967543:16B02:F06 | 12:204 |
| 21017 | 3 | RG:306813:10008:E12 | 12:281 |
| 21025 | 3 | RG:1353123:10013:A06 | 12:289 |
| 21068 | 3 | I:549299:17B02:F:06 | 12:332 |
| 21160 | 4 | RG:1996901:20003:D01 | 1:104 |
| 21207 | 4 | M00056483D:G07 | 1:151 |
| 21294 | 4 | M00042439D:C11 | 1:238 |
| 21354 | 4 | RG:781507:10011:E01 | 1:298 |
| 21518 | 4 | RG:1374447:20004:G01 | 2:110 |
| 21544 | 4 | M00056908A:H05 | 2:136 |
| 21589 | 4 | M00054777D:E09 | 2:181 |
| 21674 | 4 | RG:2002384:20003:E01 | 2:266 |
| 21705 | 4 | RG:1651303:10014:E01 | 2:297 |
| 21732 | 4 | M00054538C:C01 | 2:324 |
| 21763 | 4 | M00056622B:F12 | 2:355 |
| 21769 | 4 | M00056632B:H10 | 2:361 |
| 21784 | 4 | M00055423A:C07 | 2:376 |
| 21812 | 4 | M00056308A:F02 | 3:52 |
| 21884 | 4 | RG:2006302:20003:F08 | 3:124 |
| 21921 | 4 | M00054639D:F05 | 3:161 |
| 21983 | 4 | M00057081B:H03 | 3:223 |
| 22023 | 4 | M00056533D:G07 | 3:263 |
| 22027 | 4 | M00056534C:E08 | 3:267 |
| 22043 | 4 | M00056585B:F04 | 3:283 |
| 22060 | 4 | RG:785846:10011:F02 | 3:300 |
| 22072 | 4 | RG:781028:10011:D08 | 3:312 |
| 22254 | 4 | M00056918C:F09 | 4:142 |
| 22285 | 4 | M00054742C:B12 | 4:173 |
| 22299 | 4 | M00054806B:G03 | 4:187 |
| 22366 | 4 | M00056350B:B03 | 4:254 |
| 22375 | 4 | M00056728C:G02 | 4:263 |
| 22405 | 4 | RG:1637619:10014:C02 | 4:293 |
| 22415 | 4 | RG:1674393:10014:H02 | 4:303 |
| 22419 | 4 | RG:1635546:10014:B08 | 4:307 |
| 22498 | 4 | M00056250C:B02 | 5:34 |
| 22619 | 4 | M00056500C:A07 | 5:155 |
| 22633 | 4 | M00054647A:A09 | 5:169 |
| 22678 | 4 | M00057231A:G04 | 5:214 |
| 22724 | 4 | RG:1861510:20001:B03 | 5:260 |
| 22775 | 4 | RG:417109:10009:D09 | 5:311 |
| 22783 | 4 | RG:487171:10009:H09 | 5:319 |
| 23103 | 4 | M00056810A:A02 | 6:287 |
| 23179 | 4 | M00056645C:D11 | 6:363 |
| 23183 | 4 | M00056646B:F07 | 6:367 |
| 23189 | 4 | M00056679B:H03 | 6:373 |
| 23286 | 4 | RG:1996788:20003:C10 | 7:118 |
| 23337 | 4 | M00054650D:E04 | 7:169 |
| 23371 | 4 | M00057044D:G03 | 7:203 |
| 23373 | 4 | M00057046A:G09 | 7:205 |
| 23380 | 4 | M00057241C:F03 | 7:212 |
| 23394 | 4 | M00042756A:H02 | 7:226 |
| 23471 | 4 | RG:471154:10009:H04 | 7:303 |
| 23514 | 4 | M00054520A:D04 | 7:346 |
| 23803 | 4 | M00056812D:A08 | 8:283 |
| 23813 | 4 | RG:1638979:10014:C04 | 8:293 |
| 23984 | 4 | RG:2051667:20003:H05 | 9:112 |
| 24185 | 4 | RG:432960:10009:E11 | 9:313 |
| 24186 | 4 | RG:785368:10011:E11 | 9:314 |
| 24297 | 4 | M00055209C:B07 | 10:73 |
| 24358 | 4 | M00056937C:C10 | 10:134 |
| 24394 | 4 | M00056992C:F12 | 10:170 |
| 24423 | 4 | M00057126C:B03 | 10:199 |
| 24429 | 4 | M00057127B:B09 | 10:205 |
| 24515 | 4 | RG:1630930:10014:B05 | 10:291 |
| 24519 | 4 | RG:1645945:10014:D05 | 10:295 |
| 24700 | 4 | RG:2006592:20003:F12 | 11:124 |
| 24713 | 4 | M00056478D:B07 | 11:137 |
| 24728 | 4 | M00056227B:G06 | 11:152 |
| 24806 | 4 | M00042770D:G04 | 11:230 |
| 24855 | 4 | M00056619A:H02 | 11:279 |
| 24866 | 4 | RG:742764:10011:A06 | 11:290 |
| 24867 | 4 | RG:364972:10009:B06 | 11:291 |
| 24883 | 4 | RG:376554:10009:B12 | 11:307 |
| 24900 | 4 | M00054500D:C08 | 11:324 |
| 24944 | 4 | M00054971D:D07 | 11:368 |
| 25021 | 4 | M00055258B:D12 | 12:93 |
| 25095 | 4 | M00054769A:E05 | 12:167 |
| 25161 | 4 | M00055435B:A12 | 12:233 |
| 25203 | 4 | M00056822A:E08 | 12:275 |
| 25212 | 4 | RG:2006592:20003:F12 | 12:284 |
| 25219 | 4 | RG:1631867:10014:B06 | 12:291 |
| 25305 | 4 | M00056707D:D05 | 12:377 |
| 25309 | 4 | M00056709B:D03 | 12:381 |
| 25332 | 4 | M00055583C:B07 | 1:55 |
| 25337 | 4 | M00056301D:A04 | 1:60 |
| 25393 | 2 | I:2606813:04A02:B12 | 12:339 |
| 25430 | 2 | I:1931371:02B02:D12 | 12:376 |

[0338] TABLE 9

| | | | | | | | Chro- | |
|---|---|---|---|---|---|---|---|---|
| | | | | | | | mo- | |
| | Sample Name or | | | | | Gene | some | Map |
| CID | Clone Name | Function | Class | Pathway | GeneAssignment | Symbol | Num | Position |
| 1 | I:1222317:15A02:C02 | Unknown | Ca++ | | Homo sapiens S100 | S100A | 1 | 1q12-q22 |
| | | | binding | | calcium-binding | | | |
| | | | | | protein A4 (calcium | | | |
| | | | | | protein, calvasculin, | | | |
| | | | | | metastasin, murine | | | |
| | | | | | placental homolog) | | | |
| | | | | | (S100A4) mRNA > :: | | | |
| | | | | | gb\|M80563\|HUMCAPL | | | |
| | | | | | Human CAPL | | | |
| | | | | | protein mRNA, | | | |
| | | | | | complete cds. | | | |
| 2 | I:1227385:14B01:G05 | Signal | kinase | | EphB3 [Homo sapiens] | EPHB3 | 3 | 3q21 |
| | | Transduction | | | | | | |
| 2 | RG:32281:10004:G05 | Signal | kinase | | EphB3 [Homo sapiens] | EPHB3 | 3 | 3q21 |
| | | Transduction | | | | | | |
| 2 | RG:41097:10005:B10 | Signal | kinase | | EphB3 [Homo sapiens] | EPHB3 | 3 | 3q21 |
| | | Transduction | | | | | | |
| 3 | I:1297179:05A02:F02 | Metabolism | dehydrogenase | folate | methylenetetrahydrofolate | MTHFD1 | 14 | 14q24 |
| | | | | pathway | dehydrogenase | | | |
| | | | | | (NADP+ dependent), | | | |
| | | | | | methenyltetrahydrofolate | | | |
| | | | | | cyclohydrolase, | | | |
| | | | | | formyltetrahydrofolate | | | |
| | | | | | synthetase | | | |
| 4 | I:1298021:05A01:G10 | Cell Cycle | pseudouridine | rRNA | dyskeratosis congenital, | DKC1 | X | Xq28 |
| | | | (psi) | processing | dyskerin | | | |
| | | | synthase | | | | | |
| 5 | I:1358285:04A02:F11 | Signal | kinase | | AXL receptor tyrosine | AXL | 19 | 19q13.1 |
| | | Transduction | | | kinase | | | |
| 5 | M00022180D:E11 | Signal | kinase | | AXL receptor tyrosine | AXL | 19 | 19q13.1 |
| | | Transduction | | | kinase | | | |
| 6 | I:1384823:01B02:F08 | Cell Cycle | CDC28 | | CDC28 protein kinase 2 | CKS2 | 9 | 9q22 |
| | | | subunit | | | | | |
| 7 | I:1395918:04A01:G10 | Cytoskeleton | GTPase | | Arg/Abl-interacting | ARGBP2 | 4 | 4 |
| | | | | | protein ArgBP2 | | | |
| 8 | I:1402615:09A02:E03 | Cell Cycle | ubiquitination | | Fn14 for type I | LOC51330 | 16 | 16 |
| | | | | | transmenmbrane | | | |
| | | | | | protein | | | |
| 9 | I:1421929:05A01:D02 | Adhesion | cadherin | | cadherin 3, P-cadherin | CDH3 | 16 | 16q22 |
| | | | | | (placental) | | | |
| 10 | I:1431819:14B01:D05 | | GTPase | | nucleolar | P130 | 10 | |
| | | | | | phosphoprotein p130 | | | |
| 11 | I:1443877:03B02:B08 | Protein | proteasome | | 26S proteasome- | POH1 | 2 | 2 |
| | | Degradation | subunit | | associated pad1 | | | |
| | | | | | homolog | | | |
| 12 | I:1450639:03B02:E09 | | microtubule- | | caltractin (20 kD | CALT | X | Xq28 |
| | | | organizing | | calcium-binding | | | |
| | | | | | protein) | | | |
| 13 | I:1480159:06B02:E03 | Unknown | protease | | kallikrein 6 (neurosin, | KLK6 | 19 | 19q13.3 |
| | | | | | zyme) | | | |
| 14 | I:1509602:04A01:A11 | Metabolism | lipoxygenase | arachdonic | arachidonate 5- | ALOX5 | 10 | 10q11.2 |
| | | | | metab- | lipoxygenase | | | |
| | | | | olism | | | | |
| 15 | I:1516301:05B01:C10 | Transcription | transcription | | forkhead box M1 | FOXM1 | 12 | 12p13 |
| | | | factor | | | | | |
| 16 | I:1600586:05B02:F04 | RNA | spliceosome | | splicing factor 3b, | SF3B3 | | |
| | | splicing | | | subunit 3, 130 kD | | | |
| 17 | I:1609538:06A02:F04 | Mito- | translocase | | translocase of outer | TOM34 | 20 | 20 |
| | | chondrial | | | mitochondrial | | | 20 |
| | | | | | membrane 34 | | | |
| 18 | I:1613615:03B01:D10 | Signal | secreted | | bone morphogenetic | BMP4 | 14 | 14q22-q23 |
| | | Transduction | | | protein 4 | | | |
| 19 | I:1630804:06A02:F10 | Metabolism | iron | | Friedreich ataxia | FRDA | 9 | 9q13-q21.1 |
| | | | homeostasis | | | | | |
| 20 | I:1633286:06A02:E04 | Unknown | membrane | | transmembrane 4 | TM4SF4 | 3 | 3 |
| | | | | | superfamily member 4 | | | |
| 21 | I:1666080:07B02:D04 | Unknown | novel | | | | | |
| 22 | I:1699587:06A02:F11 | Unknown | protease | | matrix | MMP7 | 11 | 11q21-q22 |
| | | | | | metalloproteinase 7 | | | |
| | | | | | (matrilysin, uterine) | | | |
| 23 | I:1702266:02B01:D09 | Metabolism | carboxylate | amino | pyrroline-5-carboxylate | PYCR1 | 17 | 17 |
| | | | reductase | acid | reductase 1 | | | |
| | | | | synthesis | | | | |
| 24 | I:1712592:04A01:E03 | | | | insulin induced gene 1 | INSIG1 | 7 | 7q36 |
| 25 | I:1723834:01A01:C02 | cell cycle | transcription | | minichromosome | MCM2 | 3 | 3q21 |
| | | | factor | | maintenance deficient | | | |
| | | | | | (S. cerevisiae) 2 | | | |
| | | | | | (mitotin) | | | |
| 26 | I:1743234:16B01:D09 | Novel | secreted | | | | | |
| 27 | I:1749417:04A02:D10 | Unknown | protease | | cathepsin H | CTSH | 15 | 15q24-q25 |
| 28 | I:1749883:05B01:D04 | Metabolism | kinase | | pyridoxal (pyridoxine, | PDXK | 21 | 21q22.3 |
| | | | | | vitamin B6) kinase | | | |
| 29 | I:1750782:02A01:A08 | Unknown | novel | | KIAA0007 protein | KIAA0007 | 2 | 2 |
| 30 | I:1758241:15B02:G04 | Cell Cycle | CDC28 | | CDC28 protein kinase 1 | CKS1 | 8 | 8q21 |
| | | | kinase | | | | | |
| 30 | M00056227B:G06 | Cell Cycle | CDC28 | | CDC28 protein kinase 1 | CKS1 | 8 | 8q21 |
| | | | kinase | | | | | |
| 31 | I:1809385:02A02:G04 | | | integrin- | integrin beta 3 binding | ITGB3BP | 1 | 1 |
| | | | | binding | protein (beta3- | | | |
| | | | | pathway | endonexin) [Homo | | | |
| | | | | | sapiens] | | | |
| 32 | I:1810640:01A02:D06 | Adhesion | kinase | | EphA1 | EPHA1 | 7 | 7q32-q36 |
| 33 | I:1817434:02B01:C02 | Nucleotide | transketolase | | transketolase | TKT | 3 | 3p14.3 |
| | | Biosynthesis | | | (Wernicke-Korsakoff | | | |
| | | | | | syndrome) | | | |
| 34 | I:1833191:14A01:G05 | Unknown | | | dedicator of cytokinesis 3 | DOCK3 | 3 | 3 |
| 35 | I:1854245:02B02:E10 | Unknown | kinase | | KIAA0173 gene | KIAA0173 | 2 | 2 |
| | | | | | product [Homo | | | |
| | | | | | sapiens] | | | |
| 36 | I:1854558:03A01:C11 | Metabolism | glycosylation | | fucosyltransferase 1 | FUT1 | 19 | 19q13.3 |
| | | | | | (galactoside 2-alpha-L- | | | |
| | | | | | fucosyltransferase, | | | |
| | | | | | Bombay phenotype | | | |
| | | | | | included) | | | |
| 37 | I:1857563:05B02:D01 | | transcription | | 6-pyruvoyl- | PCBD | 10 | 10q22 |
| | | | factor | | tetrahydropterin | | | |
| | | | | | synthase/dimerization | | | |
| | | | | | cofactor of hepatocyte | | | |
| | | | | | nuclear factor 1 alpha | | | |
| | | | | | (TCF1) | | | |
| 38 | I:1920522:15B02:F02 | Cell Cycle | | | D123 gene product | D123 | | |
| 39 | I:1920650:16A01:B01 | | Ca++ | | annexin A3 | ANXA3 | 4 | 4q13-q22 |
| | | | signal | | | | | |
| 41 | I:1923490:18B01:H08 | Unknown | phosphatase | | hypothetical protein | LOC51235 | 1 | 1 |
| 41 | M00022742A:F08 | Unknown | phosphatase | | hypothetical protein | LOC51235 | 1 | 1 |
| 42 | I:1923769:16B01:F01 | Unknown | unknown | | hypothetical protein, | HSA272196 | 17 | 17q11.2 |
| | | | | | clone 2746033 | | | |
| 43 | I:1926006:15A01:F09 | DNA | mismatch | | mutS (E. coli) homolog 6 | MSH6 | 2 | 2p16 |
| | | Repair | repair | | | | | |
| 44 | I:1931371:02B02:D12 | Unknown | microtubule- | | KIAA0097 gene | KIAA0097 | 11 | 11 |
| | | | organizing | | product | | | |
| 45 | I:1960722:13B02:D11 | Chaperone | HSP90 | | tumor necrosis factor | LOC51721 | 16 | 16 |
| | | | | | type 1 receptor | | | |
| | | | | | associated protein | | | |
| | | | | | [Homo sapiens] | | | |
| 46 | I:1963753:18B01:E07 | Trafficking | membrane | | | | | |
| | | | transporter | | | | | |
| 47 | I:1965257:18B02:B04 | Unknown | novel | | | | | |
| 48 | I:1967543:16B02:F06 | Novel | secreted | | | | 13 | 13 |
| 49 | I:1968921:15A02:D06 | Adhesion | cell surface | | immunoglobulin | ISLR | 15 | 15q23-q24 |
| | | | | | superfamily containing | | | |
| | | | | | leucine-rich repea | | | |
| 50 | I:1969044:18B01:E12 | Unknown | kinase | | | | | |
| 51 | I:1981218:16B02:H01 | Unknown | transmembrane | | integral type I protein | P24B | 15 | 15q24-q25 |
| 53 | I:1996180:19B01:C11 | Signal | GTP | | | | | |
| | | Transduction | effector | | | | | |
| 54 | I:2054678:19A01:F10 | Unknown | Ca++ | | | | 1 | 1 |
| | | | binding | | | | | |
| 55 | I:2055926:14A01:F11 | Unknown | kinase | | thymidine kinase 1, | TK1 | 17 | 17q23.2-q25.3 |
| | | | | | soluble | | | |
| 56 | I:2056395:13A02:B07 | Adhesion | fasciclin | | transforming growth | TGFBI | 5 | 5q31 |
| | | | | | factor, beta-induced, | | | |
| | | | | | 68 kD | | | |
| 58 | I:2060725:13A01:G10 | | Ca++ | | calcyclin binding | CACYBP | 1 | 1q24-q25 |
| | | | signal | | protein [Homo sapiens] | | | |
| 59 | I:2079906:01A02:A06 | DNA | replication | | | | | |
| | | Replication | factor | | | | | |
| 60 | I:2152363:04A02:A08 | Unknown | kinase | | non-metastatic cells 1, | NME1 | 17 | 17q21.3 |
| | | | | | protein (NM23A) | | | |
| | | | | | expressed in | | | |
| 63 | I:2239819:04A02:B11 | Unknown | protease | | dipeptidase 1 (renal) | DPEP1 | 16 | 16q24.3 |
| 64 | I:2359588:18A01:F03 | Unknown | unknown | | | | | |
| 65 | I:2458926:03B01:C07 | Unknown | novel | | KIAA0101 gene | KIAA0101 | 15 | 15 |
| | | | | | product [Homo | | | |
| | | | | | sapiens] | | | |
| 65 | M00055423A:C07 | Unknown | novel | | KIAA0101 gene | KIAA0101 | 15 | 15 |
| | | | | | product [Homo | | | |
| | | | | | sapiens] | | | |
| 66 | I:2483109:05A01:A06 | Unknown | kinase | | chromosome 1 open | C1ORF2 | 1 | 1q21 |
| | | | | | reading frame 2 | | | |
| 67 | I:2499479:05A01:D06 | Transcription | | | transcription factor | NRF | | |
| | | | | | NRF | | | |
| 68 | I:2499976:01B02:E09 | | transmembrane | | | | | |
| 70 | I:2606813:04A02:B12 | Chaperone | isomerase | | peptidylprolyl | PPIE | 1 | 1p32 |
| | | | | | isomerase E | | | |
| | | | | | (cyclophilin E) | | | |
| 71 | I:2615513:04B01:D09 | | antizyme | polyamine | antizyme inhibitor | LOC51582 | | |
| | | | inhibitor | synthesis | [Homo sapiens] | | | |
| 74 | I:2675481:05A01:G06 | Mito- | protease | | ClpP (caseinolytic | CLPP | 19 | 19 |
| | | chondrial | | | protease, ATP- | | | |
| | | | | | dependent, proteolytic | | | |
| | | | | | subunit, E. coli) | | | |
| | | | | | homolog | | | |
| 75 | I:2759046:19B02:C05 | Unknown | membrane | | tetraspan 5 | TSPAN-5 | 4 | 4 |
| 76 | I:2825369:07A02:F09 | Metabolism | transferase | serine | phosphoserine | PSA | 9 | 9 |
| | | | | bio- | aminotransferase | | | |
| | | | | synthesis | | | | |
| 77 | I:2840195:01B02:G11 | Nucleotide | kinase | | adenosine kinase | ADK | 10 | 10cen-q24 |
| | | Biosynthesis | | | | | | |
| 78 | I:2902903:12A02:F02 | Adhesion | transmembrane | | interferon induced | IFITM1 | 11 | 11 |
| | | | | | transmembrane protein | | | |
| | | | | | 1 (9-27) | | | |
| 79 | I:2914605:04B01:G06 | Unknown | unknown | | KIAA0170 gene | KIAA0170 | 6 | 6p21.3 |
| | | | | | product [Homo | | | |
| | | | | | sapiens] | | | |
| 80 | I:2914719:04B02:B05 | | nuclear | | RAE1 (RNA export 1, | RAE1 | 20 | 20 |
| | | | export | | S. pombe) homolog | | | |
| 81 | I:3229778:02B01:B07 | Adhesion | integrin | | integrin, alpha 2 | ITGA2 | 5 | 5q23-31 |
| | | | | | (CD49B, alpha 2 | | | |
| | | | | | subunit of VLA-2 | | | |
| | | | | | receptor) | | | |
| 83 | I:3518380:16A01:B07 | Metabolism | sterol | cholesterol | 7-dehydrocholesterol | DHCR7 | 11 | 11q13.2-q13.5 |
| | | | reductase | bio- | reductase | | | |
| | | | | synthesis | | | | |
| 85 | I:4072558:12B01:A07 | Translation | initiation | | | | | |
| | | | factor | | | | | |
| 87 | I:549299:17B02:F06 | Novel | | | KIAA0784 protein | KIAA0784 | 20 | 20q13.13-q13.2 |
| 88 | I:605019:13B02:D03 | Unknown | transferase | | catechol-O- | COMT | 22 | 22q11.21 |
| | | | | | methyltransferase | | | |
| 89 | I:620494:16A01:C10 | Unknown | proteasome | | proteasome (prosome, | PSMB7 | 9 | 9q34.11-q34.12 |
| | | | subunit | | macropain) subunit, | | | |
| | | | | | beta type, 7 | | | |
| 90 | I:659143:16B01:E06 | Unknown | novel | | | | | |
| 91 | I:750899:16A01:D04 | Unknown | phosphatase | | protein tyrosine | PTPRN | 2 | 2q35-q36.1 |
| | | | | | phosphatase, receptor | | | |
| | | | | | type, N | | | |
| 92 | I:763607:16A01:E09 | Unknown | unknown | | tumor protein D52-like 1 | TPD52L1 | 6 | 6q22-q23 |
| 93 | I:901317:16A01:G01 | Unknown | proteasome | | proteasome (prosome, | PSMB4 | 1 | 1q21 |
| | | | subunit | | macropain) subunit, | | | |
| | | | | | beta type, 4 | | | |
| 94 | I:956077:14B01:H04 | DNA | GTPase | | nudix (nucleoside | NUDT1 | 7 | 7p22 |
| | | Repair | | | diphosphate linked | | | |
| | | | | | moiety X)-type motif 1 | | | |
| 95 | I:970933:14B01:D03 | Novel | secreted | | FOXJ2 forkhead factor | LOC55810 | | |
| 96 | I:986558:18A01:C09 | Unknown | unknown | | | | 3 | |
| 98 | I:998612:14B02:G06 | Metabolism | dehydrogenase | | 3-phosphoglycerate | PHGDH | 1 | 1p11.1-13.1 |
| | | | | | dehydrogenase | | | |
| 100 | M00001341B:A11 | Cell Cycle | kinase | | KIAA0175 gene | KIAA0175 | 9 | 9 |
| | | | | | product [Homo | | | |
| | | | | | sapiens] | | | |
| 101 | M00001349A:C11 | Adhesion | kinase | | discoidin domain | DDR1 | 6 | 6p21.3 |
| | | | | | receptor family, | | | |
| | | | | | member 1 | | | |
| 102 | M00001351C:E02 | Unknown | unknown | | cathepsin C | CTSC | 11 | 11q14.1-q14.3 |
| 103 | M00001374A:A06 | Unknown | desaturase | | stearoyl-CoA | SCD | 10 | 10 |
| | | | | | desaturase | | | |
| 104 | M00001393D:F01 | Metabolism | dehydrogenase | | lactate dehydrogenase B | LDHB | 12 | 12p12.2-p12.1 |
| 105 | M00001402B:C12 | Cell Cycle | kinase | | cyclin-dependent | CDK4 | 12 | 12q14 |
| | | | | | kinase 4 | | | |
| 106 | M00001402C:B01 | Unknown | unknown | | catenin (cadherin- | CTNNAL1 | 9 | 9q31.2 |
| | | | | | associated protein), | | | |
| | | | | | alpha-like 1 | | | |
| 109 | M00001489B:G04 | | | | HSPC003 protein | HSPC003 | | |
| | | | | | [Homo sapiens] | | | |
| 110 | M00001496A:G03 | Transcription | transcription | | v-myb avian | MYBL2 | 20 | 20q13.1 |
| | | | factor | | myeloblastosis viral | | | |
| | | | | | oncogene homolog-like 2 | | | |
| 111 | M00001558C:B06 | Unknown | novel | | hypothetical protein | HSPC130 | 20 | 20 |
| 112 | M00001600C:B11 | | helicase | | DEAD-box protein | ABS | 5 | 5 |
| | | | | | abstrakt [Homo | | | |
| | | | | | sapiens] | | | |
| 113 | M00001675B:G05 | Novel | GTPase | | KIAA0712 gene | KIAA0712 | 11 | 11 |
| | | | | | product [Homo | | | |
| | | | | | sapiens] | | | |
| 114 | M00003814C:C11 | Unknown | novel | | KIAA0116 protein | KIAA0116 | 3 | 3 |
| 115 | M00003852B:C01 | Signal | cytokine | | prostate differentiation | PLAB | 19 | 19p13.1-13.2 |
| | | Transduction | | | factor | | | |
| 116 | M00003853B:G11 | Unknown | novel | | | | 20 | 20 |
| 117 | M00003961B:H05 | Unknown | kinase | | EphB4 | EPHB4 | 7 | 7 |
| 118 | M00004031B:D12 | Unknown | secreted | | | | | |
| 118 | M00057112B:E11 | Unknown | secreted | | | | | |
| 120 | M00004229C:B06 | Unknown | protease | | cathepsin Z | CTSZ | 20 | 20q13 |
| 121 | M00005360A:A07 | Novel | calcitonin | | EGF-like-domain, | EGFL2 | 1 | 1 |
| | | | receptor | | multiple 2 | | | |
| 122 | M00005438D:D06 | Unknown | protease | | beta-site APP-cleaving | BACE2 | 21 | 21q22.3 |
| | | | | | enzyme 2 | | | |
| 123 | M00006883D:H12 | Unknown | novel | | | | | |
| 124 | M00007935D:A05 | Unknown | novel | | | | 7 | 7 |
| 125 | M00007965C:G08 | Unknown | unknown | | | | | |
| 126 | M00007985A:B08 | Unknown | novel | | | | 1 | 1 |
| 127 | M00007985B:A03 | | sigma | | sigma receptor | SR-BP1 | 9 | 9 |
| | | | receptor | | (SR31747 binding | | | |
| | | | | | protein 1) | | | |
| 128 | M00007987D:D04 | Novel | secreted | | KIAA0179 | KIAA0179 | 21 | 21q22.3 |
| 129 | M00008049B:A12 | RNA | | | non-Pou domain- | NONO | X | Xq13.1 |
| | | Splicing | | | containing octamer | | | |
| | | | | | (ATGCAAAT) binding | | | |
| | | | | | protein [Homo sapiens] | | | |
| 129 | RG:25258:10004:D09 | RNA | | | non-Pou domain- | NONO | X | Xq13.1 |
| | | Splicing | | | containing octamer | | | |
| | | | | | (ATGCAAAT) binding | | | |
| | | | | | protein [Homo sapiens] | | | |
| 130 | M00008099D:A05 | Unknown | secreted | | | | 20 | 20 |
| 131 | M00021828C:F04 | Unknown | kinase | | dual-specificity | DYRK4 | 12 | 12 |
| | | | | | tyrosine-(Y)- | | | |
| | | | | | phosphorylation | | | |
| | | | | | regulated kinase 4 | | | |
| 132 | M00021956B:A09 | Transcription | transcription | | ets variant gene 4 (E1A | ETV4 | 17 | 17q21 |
| | | | factor | | enhancer-binding | | | |
| | | | | | protein, E1AF) | | | |
| 133 | M00022009A:A12 | Unknown | unknown | | pleckstrin homology- | PHLDA1 | 12 | 12q15 |
| | | | | | like domain, family A, | | | |
| | | | | | member 1 | | | |
| 134 | M00022081D:G02 | Unknown | kinase | | Ste20-related | KIAA0204 | 10 | 10 |
| | | | | | serine/threonine kinase | | | |
| | | | | | [Homo sapiens] | | | |
| 135 | M00022158D:C11 | Adhesion | laminin | | laminin, beta 3 (nicein | LAMB3 | 1 | 1q32 |
| | | | | | (125 kD), kalinin | | | |
| | | | | | (140 kD), BM600 | | | |
| | | | | | (125 kD)) | | | |
| 136 | M00022168B:F02 | Unknown | deaminase | | hypothetical protein | FLJ10540 | | |
| | | | | | FLJ10540 | | | |
| 137 | M00022215C:A10 | Unknown | unknown | | | | | |
| 138 | M00023283C:C06 | Unknown | novel | | hypothetical protein | HN1L | 16 | 16 |
| | | | | | similar to mouse HN1 | | | |
| | | | | | (Hematological and | | | |
| | | | | | Neurological expressed | | | |
| | | | | | sequence 1) | | | |
| 139 | M00023363C:A04 | Unknown | protease | | kallikrein 11 | KLK11 | 19 | 19q13.3-q13.4 |
| 140 | M00023371A:G03 | Cell Cycle | | | retinoblastoma-binding | RBBP8 | 18 | 18q11.2 |
| | | | | | protein 8 | | | |
| 141 | M00023431B:A01 | Ribosomal | small | | | | 6 | 6q14.3-16.2 |
| | | Biogenesis | nucleolar | | | | | |
| | | | RNA | | | | | |
| 142 | M00026888A:A03 | Unknown | novel | | | | | |
| 143 | M00026900D:F02 | Metabolism | transferase | | sulfotransferase family | SULT2B1 | 19 | 19q13.3 |
| | | | | | 2B, member 1 | | | |
| 144 | M00026903D:D11 | Metabolism | kinase | | galactokinase 1 | GALK1 | 17 | 17q24 |
| 145 | M00027066B:E09 | Unknown | unknown | | | | | |
| 146 | M00032537B:F11 | Unknown | transmembrane | | | | | |
| 147 | M00042439D:C11 | Cell Cycle | ubiquitin | | ubiquitin carrier protein | UBCH10 | 20 | 20 |
| | | | carrier | | E2-C | | | |
| 148 | M00042704D:D09 | Unknown | novel | | | | | |
| 149 | M00042756A:H02 | Cell Cycle | | | SET translocation | SET | 9 | 9q34 |
| | | | | | (myeloid leukemia- | | | |
| | | | | | associated) | | | |
| 150 | M00042770D:G04 | | | | hypothetical protein | MAC30 | 17 | 17 |
| 151 | M00042818A:D05 | Unknown | integrase | | | | | |
| 151 | M00054520A:D04 | Unknown | integrase | | | | | |
| 152 | M00054500D:C08 | Unknown | proteasome | | proteasome (prosome, | PSMA7 | | |
| | | | subunit | | macropain) subunit, | | | |
| | | | | | alpha type, 7 | | | |
| 153 | M00054538C:C01 | Autophagy | | | Apg12 (autophagy 12, | APG12L | 5 | 5q21-q22 |
| | | | | | S. cerevisiae)-like | | | |
| 154 | M00054639D:F05 | | GTP | nucleocyto | karyopherin (importin) | KPNB3 | | |
| | | | binding | plasmic | beta 3 | | | |
| | | | | transport? | | | | |
| 155 | M00054647A:A09 | Metabolism | glyoxalase | | glyoxalase I | GLO1 | 6 | 6p21.3-p21.1 |
| 156 | M00054650D:E04 | Ribosomal | | | RNA, U22 small | RNU22 | 11 | 11q13 |
| | | Biogenesis | | | nucleolar | | | |
| 157 | M00054742C:B12 | Unknown | cytokine | | macrophage migration | MIF | 22 | 22q11.23 |
| | | | | | inhibitory factor | | | |
| | | | | | (glycosylation- | | | |
| | | | | | inhibiting factor) | | | |
| 158 | M00054769A:E05 | Translation | ribosomal | | ribosomal protein S3A | RPS3A | 4 | 4q31.2-q31.3 |
| | | | protein | | | | | |
| 159 | M00054777D:E09 | Unknown | secreted | | carcinoembryonic | CEACAM6 | 19 | 19q13.2 |
| | | | | | antigen-related cell | | | |
| | | | | | adhesion molecule 6 | | | |
| | | | | | (non-specific cross | | | |
| | | | | | reacting antigen) | | | |
| 160 | M00054806B:G03 | Unknown | snRNA | | | | | |
| 161 | M00054893C:D03 | Unknown | novel | | putative nucleotide | E2IG3 | | |
| | | | | | binding protein, | | | |
| | | | | | estradiol-induced | | | |
| | | | | | [Homo sapiens] | | | |
| 162 | M00054971D:D07 | Unknown | novel | | | | 20 | 20q13.2-13.2 |
| 163 | M00055135A:B06 | Unknown | unknown | | hypothetical protein | HSPC011 | | |
| | | | | | [Homo sapiens] | | | |
| 164 | M00055258B:D12 | | | | interferon induced | IFITM2 | 11 | 11 |
| | | | | | transmembrane protein | | | |
| | | | | | 2 (1-8D) | | | |
| 165 | M00055406C:D03 | Unknown | kinase | | CDC-like kinase 1 | CLK1 | 2 | 2q33 |
| 166 | M00055435B:A12 | Apoptosis | unknown | | over-expressed breast | OBTP | | |
| | | | | | tumor protein | | | |
| 167 | M00055583C:B07 | Novel | secreted | | hypothetical protein | LOC51316 | | |
| | | | | | [Homo sapiens] | | | |
| 169 | M00055873C:B06 | Unknown | protease | | secretory leukocyte | SLPI | | |
| | | | inhibitor | | protease inhibitor | | | |
| | | | | | (antileukoproteinase) | | | |
| 170 | M00056250C:B02 | | transmembrane | | pituitary tumor- | PTTG1 | 5 | 5q35.1 |
| | | | | | transforming 1 | | | |
| 171 | M00056301D:A04 | Unknown | unknown | | | | | |
| 172 | M00056308A:F02 | | | sulfate/ | down-regulated in | DRA | 7 | 7q31 |
| | | | | oxalate | adenoma | | | |
| | | | | Trans- | | | | |
| | | | | porter? | | | | |
| 173 | M00056350B:B03 | Cytoskeleton | Ca++ | | S100 calcium-binding | S100A11 | 1 | 1q21 |
| | | | binding | | protein A11 | | | |
| | | | | | (calgizzarin) | | | |
| 174 | M00056423A:B06 | Unknown | novel | | hypothetical protein | HSPC148 | 11 | 11 |
| | | | | | [Homo sapiens] | | | |
| 175 | M00056478D:B07 | Unknown | novel | | clone HQ0310 | LOC51203 | 15 | 15 |
| | | | | | PRO0310p1 [Homo | | | |
| | | | | | sapiens] | | | |
| 176 | M00056483D:G07 | Unknown | protease | | kallikrein 10 | KLK10 | 19 | 19q13 |
| 176 | M00057046A:G09 | Unknown | protease | | kallikrein 10 | KLK10 | 19 | 19q13 |
| 177 | M00056500C:A07 | | | | nascent-polypeptide- | NACA | 12 | 12q23-q24.1 |
| | | | | | associated complex | | | |
| | | | | | alpha polypeptide | | | |
| 178 | M00056533D:G07 | Unknown | secreted | | DKFZP434G032 | DKFZP434G032 | 17 | 17 |
| | | | | | protein [Homo sapiens] | | | |
| 179 | M00056534C:E08 | Signal | secreted | | amphiregulin | AREG | 4 | 4q13-q21 |
| | | Transduction | | | (schwannoma-derived | | | |
| | | | | | growth factor) | | | |
| 180 | M00056585B:F04 | Unknown | hydrolase | | gamma-glutamyl | GGH | | |
| | | | | | hydrolase (conjugase, | | | |
| | | | | | folylpolygammaglutamyl | | | |
| | | | | | hydrolase) | | | |
| 181 | M00056617D:F07 | Unknown | novel | | | | | |
| 182 | M00056619A:H02 | Cytoskeleton | plastin | | plastin 3 (T isoform) | PLS3 | X | X |
| 183 | M00056622B:F12 | DNA | topoisomerase | | topoisomerase (DNA) | TOP2A | 17 | 17q21-q22 |
| | | Replication | | | II alpha (170 kD) | | | |
| 184 | M00056632B:H10 | | ATP/GTP | | chromosome 20 open | C20ORF1 | 20 | 20q11.2 |
| | | | binding | | reading frame 1 | | | |
| 185 | M00056645C:D11 | Metabolism | peroxidase | oxidative | glutathione peroxidase 1 | GPX1 | 3 | 3p21.3 |
| | | | | metab- | | | | |
| | | | | olism | | | | |
| 186 | M00056646B:F07 | | | | ribosomal protein L7a | RPL7A | 9 | 9q33-q34 |
| 187 | M00056679B:H03 | | | | nucleophosmin | NPM1 | 5 | 5q35 |
| | | | | | (nucleolar | | | |
| | | | | | phosphoprotein B23, | | | |
| | | | | | numatrin) | | | |
| 188 | M00056707D:D05 | Unknown | novel | | | | | |
| 189 | M00056709B:D03 | Unknown | novel | | CGI-138 protein | LOC51649 | 17 | 17 |
| | | | | | [Homo sapiens] | | | |
| 190 | M00056728C:G02 | Cell Cycle | | | MAD2 (mitotic arrest | MAD2L1 | 4 | 4q27 |
| | | | | | deficient, yeast, | | | |
| | | | | | homolog)-like 1 | | | |
| 191 | M00056732B:E02 | Unknown | novel | | LIM domain only 7 | LMO7 | 13 | 13 |
| 192 | M00056810A:A02 | Novel | GTP | | hypothetical protein | PTD004 | | |
| | | | binding | | | | | |
| 193 | M00056812D:A08 | Unknown | hydrolase | | S- | AHCY | 20 | 20cen-q13.1 |
| | | | | | adenosylhomocysteine | | | |
| | | | | | hydrolase | | | |
| 194 | M00056822A:E08 | Signal | RAS-like | | RAN, member RAS | RAN | 6 | 6p21 |
| | | Transduction | | | oncogene family | | | |
| 195 | M00055209C:B07 | Unknown | novel | | | | 7 | 7p14-p15 |
| 195 | M00056908A:H05 | Unknown | novel | | | | 7 | 7p14-p15 |
| 196 | M00056918C:F09 | Unknown | novel | | hypothetical protein | HSPC152 | 11 | 11 |
| | | | | | [Homo sapiens] | | | |
| 197 | M00056937C:C10 | Cell Cycle | Ca++ | | S100 calcium-binding | S100P | 4 | 4p16 |
| | | | binding | | protein P | | | |
| 198 | M00056953B:C09 | Unknown | proteasome | | proteasome (prosome, | PSME2 | 14 | 14q11.2 |
| | | | subunit | | macropain) activator | | | |
| | | | | | subunit 2 (PA28 beta) | | | |
| 199 | M00056992C:F12 | Unknown | unknown | | | | | |
| 200 | M00057044D:G03 | Unknown | unknown | | | | 6 | 6 |
| 201 | M00057081B:H03 | Unknown | unknown | | ribosomal protein L10a | RPL10A | | |
| 202 | M00057086D:D08 | Unknown | unknown | | RNA binding motif | RBM8 | 1 | 1q12 |
| | | | | | protein 8 | | | |
| 203 | M00057126C:B03 | Unknown | novel | | | | | |
| 204 | M00057127B:B09 | Unknown | unknown | | | | | |
| 205 | M00057192B:D02 | Unknown | unknown | | | | | |
| 206 | M00057231A:G04 | Transcription | transcription | | non-metastatic cells 2, | NME2 | 17 | 17q21.3 |
| | | | factor | | protein (NM23B) | | | |
| | | | | | expressed in | | | |
| 206 | RG:1651303:10014:E01 | Transcription | transcription | | non-metastatic cells 2, | NME2 | 17 | 17q21.3 |
| | | | factor | | protein (NM23B) | | | |
| | | | | | expressed in | | | |
| 207 | M00057241C:F03 | Translation | initiation | | eukaryotic translation | EIF3S6 | 8 | 8q22-q23 |
| | | | factor | | initiation factor 3, | | | |
| | | | | | subunit 6 (48 kD) | | | |
| 208 | RG:110764:10005:H04 | | kinase | | protein kinase related | PAK4 | 19 | 19 |
| | | | | | to S. cerevisiae STE20, | | | |
| | | | | | effector for Cdc42Hs | | | |
| 210 | RG:1325847:10012:H07 | Unknown | transmembrane | | | | 6 | 6q23 |
| 212 | RG:1353123:10013:A06 | Cell Cycle | phosphatase | | cyclin-dependent | CDKN3 | 14 | 14q22 |
| | | | | | kinase inhibitor 3 | | | |
| | | | | | (CDK2-associated dual | | | |
| | | | | | specificity | | | |
| | | | | | phosphatase) | | | |
| 212 | RG:1637619:10014:C02 | Cell Cycle | phosphatase | | cyclin-dependent | CDKN3 | 14 | 14q22 |
| | | | | | kinase inhibitor 3 | | | |
| | | | | | (CDK2-associated dual | | | |
| | | | | | specificity | | | |
| | | | | | phosphatase) | | | |
| 213 | RG:1374447:20004:G01 | Unknown | novel | | | | | |
| 214 | RG:1461567:10013:E03 | Cell Cycle | kinase | | budding uninhibited by | BUB1 | 2 | 2q14 |
| | | | | | benzimidazoles 1 | | | |
| | | | | | (yeast homolog) | | | |
| 215 | RG:1525813:10013:F12 | Unknown | novel | | | | 2 | 2 |
| 216 | RG:1552386:10013:G04 | | phosphatase | | acid phosphatase 1, | ACP1 | 2 | 2p25 |
| | | | | | soluble | | | |
| 217 | RG:1555877:10013:G07 | Metabolism | NADPH | | neutrophil cytosolic | NCF4 | 22 | 22q13.1 |
| | | | oxidase | | factor 4 (40 kD), | | | |
| | | | | | isoform 1 [Homo | | | |
| | | | | | sapiens] | | | |
| 218 | RG:1630930:10014:B05 | nucleic | kinase | | deoxythymidylate | DTYMK | 2 | 2 |
| | | acid | | | kinase | | | |
| | | synthesis | | | | | | |
| 219 | RG:1631867:10014:B06 | DNA | Ku protein | dsDNA | X-ray repair | XRCC5 | 2 | 2q35 |
| | | Repair | | repair | complementing | | | |
| | | | | | defective repair in | | | |
| | | | | | Chinese hamster cells 5 | | | |
| | | | | | (double-strand-break | | | |
| | | | | | rejoining; Ku | | | |
| | | | | | autoantigen, 80 kD) | | | |
| 220 | RG:1638979:10014:C04 | Metabolism | GST | drug | glutathione S- | GSTP1 | 11 | 11q13 |
| | | | | metab- | transferase pi | | | |
| | | | | olism | | | | |
| 221 | RG:1645945:10014:D05 | | proteasome | | proteasome (prosome, | PSMA2 | 6 | 6q27 |
| | | | subunit | | macropain) subunit, | | | |
| | | | | | alpha type, 2 | | | |
| 221 | RG:1674393:10014:H02 | | proteasome | | proteasome (prosome, | PSMA2 | 6 | 6q27 |
| | | | subunit | | macropain) subunit, | | | |
| | | | | | alpha type, 2 | | | |
| 222 | RG:166410:10006:F01 | Novel | kinase | | | | | |
| 223 | RG:1674098:10014:H01 | Unknown | unknown | | myristoylated alanine- | MACS | 6 | 6q22.2 |
| | | | | | rich protein kinase C | | | |
| | | | | | substrate (MARCKS, | | | |
| | | | | | 80K-L) | | | |
| 224 | RG:180296:10006:G03 | | kinase | | protein tyrosine kinase | PTK2B | 8 | 8p21.1 |
| | | | | | 2 beta | | | |
| 225 | RG:1838677:10015:E10 | | kinase | | membrane-associated | PKMYT1 | | |
| | | | | | tyrosine- and | | | |
| | | | | | threonine-specific | | | |
| | | | | | cdc2-inhibitory kinase | | | |
| 226 | RG:1861510:20001:B03 | Unknown | novel | | | | | |
| 227 | RG:1895716:10015:G09 | Novel | kinase | | | | 14 | 14 |
| 228 | RG:1927470:10015:H08 | Metabolism | kinase | glycolysis | phosphoglycerate | PGK1 | X | Xq13 |
| | | | | | kinase 1 | | | |
| 229 | RG:1996788:20003:C10 | Unknown | novel | | | | | |
| 230 | RG:1996901:20003:D01 | Unknown | novel | | | | | |
| 231 | RG:2002384:20003:E01 | Unknown | novel | | | | | |
| 232 | RG:2006302:20003:F08 | Unknown | novel | | | | | |
| 233 | RG:2006592:20003:F12 | Unknown | novel | | | | 12 | |
| 235 | RG:2012168:10016:B05 | Metabolism | hydrolase | | phosphoribosyl | PPAT | 4 | 4q12 |
| | | | | | pyrophosphate | | | |
| | | | | | amidotransferase | | | |
| 236 | RG:203031:10007:A09 | Unknown | kinase | | serine/threonine kinase | STK15 | 20 | 20q13.2-q13.3 |
| | | | | | 15 | | | |
| 236 | RG:781507:10011:E01 | Unknown | kinase | | serine/threonine kinase | STK15 | 20 | 20q13.2-q13.3 |
| | | | | | 15 | | | |
| 237 | RG:2048081:10016:B08 | | kinase | | mitogen-activated | MAPK10 | | |
| | | | | | protein kinase 10 | | | |
| 238 | RG:2051667:20003:H05 | Unknown | novel | | | | 1 | 1 |
| 239 | RG:2055807:10016:B09 | Unknown | kinase | | | | 20 | 20p12.2-13 |
| 240 | RG:208954:10007:B12 | | kinase | | | | | Xq25-26.3 |
| 241 | RG:2097257:10016:C07 | Unknown | protease | | serine protease, | SPUVE | 12 | 12 |
| | | | | | umbilical endothelium | | | |
| 242 | RG:2097294:10016:C08 | Mito- | transferase | thymi- | serine | SHMT2 | 12 | 12q12-q14 |
| | | chondrial | | dylate | hydroxymethyltransferase | | | |
| | | | | synthase | 2 (mitochondrial) | | | |
| | | | | metabolic | | | | |
| | | | | cycle | | | | |
| 243 | RG:2117694:10016:E01 | Unknown | kinase | | serine/threonine kinase | STK11 | 19 | 19p13.3 |
| | | | | | 11 (Peutz-Jeghers | | | |
| | | | | | syndrome) | | | |
| 244 | RG:241029:10007:D07 | Unknown | kinase | | serine/threonine kinase | STK12 | 17 | 17p13.1 |
| | | | | | 12 | | | |
| 245 | RG:244132:10007:E01 | | kinase | | serum/glucocorticoid | SGKL | 8 | 8q12.3-8q13.1 |
| | | | | | regulated kinase-like | | | |
| 246 | RG:244601:10007:E02 | Cell Cycle | kinase | | cyclin-dependent | CDK5 | 7 | 7q36 |
| | | | | | kinase 5 | | | |
| 247 | RG:27403:10004:E11 | Novel | transmembrane | | | | | |
| 248 | RG:278409:10008:B10 | Unknown | kinase | | mitogen-activated | MAP2K4 | 17 | 17p11.2 |
| | | | | | protein kinase kinase 4 | | | |
| 249 | RG:29739:10004:F02 | Cell Cycle | kinase | | TTK protein kinase | TTK | 6 | 6q13-q21 |
| 250 | RG:301608:10008:D09 | | kinase | | serine/threonine- | PRP4 | | |
| | | | | | protein kinase PRP4 | | | |
| | | | | | homolog | | | |
| 251 | RG:306813:10008:E12 | | kinase | | v-ros avian UR2 | ROS1 | 6 | 6q22 |
| | | | | | sarcoma virus | | | |
| | | | | | oncogene homolog 1 | | | |
| 252 | RG:1635546:10014:B08 | Ribosomal | | | nucleolar protein | NOP56 | 20 | 20 |
| | | Biogenesis | | | (KKE/D repeat) | | | |
| 252 | RG:323425:10008:F11 | Ribosomal | | | nucleolar protein | NOP56 | 20 | 20 |
| | | Biogenesis | | | (KKE/D repeat) | | | |
| 253 | RG:343821:10008:H05 | | kinase | | TYRO3 protein | TYRO3 | 15 | 15q15.1-q21.1 |
| | | | | | tyrosine kinase | | | |
| 254 | RG:35892:10004:H10 | | kinase | | activin A receptor, type I | ACVR1 | 2 | 2q23-q24 |
| 255 | RG:364972:10009:B06 | Unknown | novel | | | | 19 | 19 |
| 256 | RG:376554:10009:B12 | Unknown | novel | | | | 8 | 8 |
| 257 | RG:417109:10009:D09 | Unknown | novel | | | | 9 | 9 |
| 258 | RG:43296:10005:C03 | | kinase | | SFRS protein kinase 2 | SRPK2 | 7 | 7q22-q31.1 |
| 259 | RG:432960:10009:E11 | Transcription | deacetylase | | retinoblastoma-binding | RBBP7 | | |
| | | | | | protein 7 | | | |
| 260 | RG:43534:10005:C04 | | kinase | | ribosomal protein S6 | RPS6KA1 | 3 | 3 |
| | | | | | kinase, 90 kD, | | | |
| | | | | | polypeptide 1 | | | |
| 261 | RG:45623:10005:D09 | Unknown | novel | | HSKM-B protein | HSKM-B | | |
| 262 | RG:471154:10009:H04 | | protease | | tissue inhibitor of | TIMP3 | 22 | 22q12.3 |
| | | | inhibitor | | metalloproteinase 3 | | | |
| | | | | | (Sorsby fundus | | | |
| | | | | | dystrophy, | | | |
| | | | | | pseudoinflammatory) | | | |
| 263 | RG:487171:10009:H09 | Unknown | kinase | | polo (Drosophia)-like | PLK | | |
| | | | | | kinase | | | |
| 264 | RG:526536:10002:A02 | | kinase | | solute carrier family 9 | SLC9A3R2 | 16 | 16p13.3 |
| | | | | | (sodium/hydrogen | | | |
| | | | | | exchanger), isoform 3 | | | |
| | | | | | regulatory factor 2 | | | |
| 265 | RG:530002:10002:A08 | | kinase | | EphA3 | EPHA3 | 3 | 3p11.2 |
| 266 | RG:612874:10002:G02 | | kinase | | serum-inducible kinase | SNK | 5 | 5 |
| 267 | RG:665547:10010:B04 | Unknown | novel | | | | 2 | 2 |
| 268 | RG:665682:10010:B05 | Unknown | kinase | | mitogen-activated | MAP2K7 | | |
| | | | | | protein kinase kinase 7 | | | |
| 269 | RG:666323:10010:B07 | | kinase | | sterile-alpha motif and | ZAK | 2 | 2q24.2 |
| | | | | | leucine zipper | | | |
| | | | | | containing kinase AZK | | | |
| | | | | | [Homo sapiens] | | | |
| 270 | RG:669110:10010:B12 | Novel | kinase | | | | | |
| 271 | RG:686594:10010:D03 | Cell Cycle | kinase | | KIAA0965 protein | KIAA0965 | 12 | 12 |
| 273 | RG:729913:10010:G11 | Unknown | kinase | | | | 14 | 14 |
| 274 | RG:740831:10010:H12 | | kinase | | v-rafmurine sarcoma | ARAF1 | X | Xp11.4-p11.2 |
| | | | | | 3611 viral oncogene | | | |
| | | | | | homolog 1 | | | |
| 276 | RG:742764:10011:A06 | RNA | | | splicing factor, | SFRS3 | | |
| | | splicing | | | arginine/serine-rich 3 | | | |
| 277 | RG:781028:10011:D08 | | kinase | | mitogen-activated | MAP4K3 | | |
| | | | | | protein kinase kinase | | | |
| | | | | | kinase kinase 3 | | | |
| 278 | RG:785368:10011:E11 | Novel | kinase | | PDZ-binding kinase; T- | TOPK | 8 | 8p21-p12 |
| | | | | | cell originated protein | | | |
| | | | | | kinase | | | |
| 278 | RG:785846:10011:F02 | Novel | kinase | | PDZ-binding kinase; T- | TOPK | 8 | 8p21-p12 |
| | | | | | cell originated protein | | | |
| | | | | | kinase | | | |
| 280 | RG:985973:10012:B09 | Unknown | kinase | | v-akt murine thymoma | AKT3 | 1 | 1q43-q44 |
| | | | | | viral oncogene | | | |
| | | | | | homolog 3 (protein | | | |
| | | | | | kinase B, gamma) | | | |
| 291 | M00022140A:E11 | Chaperone | HSP90 | | heat shock 90 kD | HSPCB | 6 | 6p12 |
| | | | | | protein 1, beta | | | |
| | M00054510D:F09 | | | | | | | |
| | RG:742775:10011:A07 | | | | | | | |
| | RG:759927:10011:C09 | | | | | | | |
| | RG:773612:10011:D06 | | | | | | | |
| | RG:813679:10011:H03 | | | | | | | |

[0339] The differential expression assay was performed by mixing equal amounts of probes from tumor cells and normal cells of the same patient. The arrays were prehybridized by incubation for about 2 hrs at 60° C. in 5×SSC/0.2% SDS/1 mM EDTA, and then washed three times in water and twice in isopropanol. Following prehybridization of the array, the probe mixture was then hybridized to the array under conditions of high stringency (overnight at 42° C. in 50% formamide, 5×SSC, and 0.2% SDS. After hybridization, the array was washed at 55° C. three times as follows: 1) first wash in 1×SSC/0.2% SDS; 2) second wash in 0.1×SSC/0.2% SDS; and 3) third wash in 0.1×SSC.

[0340] The arrays were then scanned for green and red fluorescence using a Molecular Dynamics Generation III dual color laser-scanner/detector. The images were processed using BioDiscovery Autogene software, and the data from each scan set normalized to provide for a ratio of expression relative to normal. Data from the microarray experiments was analyzed according to the algorithms described in U.S. application Ser. No. 60/252,358, filed Nov. 20, 2000, by E. J. Moler, M. A. Boyle, and F. M. Randazzo, and entitled “Precision and accuracy in cDNA microarray data,” which application is specifically incorporated herein by reference.

[0341] The experiment was repeated, this time labeling the two probes with the opposite color in order to perform the assay in both “color directions.” Each experiment was sometimes repeated with two more slides (one in each color direction). The level fluorescence for each sequence on the array expressed as a ratio of the geometric mean of 8 replicate spots/genes from the four arrays or 4 replicate spots/gene from 2 arrays or some other permutation. The data were normalized using the spiked positive controls present in each duplicated area, and the precision of this normalization was included in the final determination of the significance of each differential. The fluorescent intensity of each spot was also compared to the negative controls in each duplicated area to determine which spots have detected significant expression levels in each sample.

[0342] A statistical analysis of the fluorescent intensities was applied to each set of duplicate spots to assess the precision and significance of each differential measurement, resulting in a p-value testing the null hypothesis that there is no differential in the expression level between the tumor and normal samples of each patient. During initial analysis of the microarrays, the hypothesis was accepted if p>10⁻³, and the differential ratio was set to 1.000 for those spots. All other spots have a significant difference in expression between the tumor and normal sample. If the tumor sample has detectable expression and the normal does not, the ratio is truncated at 1000 since the value for expression in the normal sample would be zero, and the ratio would not be a mathematically useful value (e.g., infinity). If the normal sample has detectable expression and the tumor does not, the ratio is truncated to 0.001, since the value for expression in the tumor sample would be zero and the ratio would not be a mathematically useful value. These latter two situations are referred to herein as “on/off.” Database tables were populated using a 95% confidence level (p>0.05).

[0343] Table 6 (incorpororated by reference to a compact disk) provides the results for gene products differentially expressed in the colon tumor samples relative to normal tissue samples. Table 6 includes: 1) the SEQ ID NO; 2) the CID or candidate identification number; 3) the spot identification number (“SpotID”); 4) the percentage of patients tested in which expression levels of the gene was at least 2-fold greater in cancerous tissue than in matched normal tissue (“>=2×”); 5) the percentage of patients tested in which expression levels of the gene was at least 2.5-fold greater in cancerous tissue than in matched normal tissue (“>=2.5×”); 6) the percentage of patients tested in which expression levels of the gene was at least 5-fold greater in cancerous tissue than in matched normal cells (“>=5×”); 7) the percentage of patients tested in which expression levels of the gene was less than or equal to ½ of the expression level in matched normal cells (“<=half×”); and 8) the number of patients tested for each sequence. Table 6 also includes the results from each patient, identified by the patient ID number (e.g., 15Ratio). This data represents the ratio of differential expression for the samples tested from that particular patient's tissues (e.g., “15Ratio” is the ratio from the tissue samples of patient ID no. 15). The ratios of differential expression is expressed as a normalized hybridization signal associated with the tumor probe divided by the normalized hybridization signal with the normal probe. Thus, a ratio greater than 1 indicates that the gene product is increased in expression in cancerous cells relative to normal cells, while a ratio of less than 1 indicates the opposite.

[0344] These data provide evidence that the genes represented by the polynucleotides having the indicated sequences are differentially expressed in colon cancer.

### Example 3

### Antisense Regulation of Gene Expression

[0345] The expression of the differentially expressed genes represented by the polynucleotides in the cancerous cells was analyzed using antisense knockout technology to confirm the role and function of the gene product in tumorigenesis, e.g., in promoting a metastatic phenotype.

[0346] A number of different oligonucleotides complementary to the mRNA generated by the differentially expressed genes identified herein were designed as potential antisense oligonucleotides, and tested for their ability to suppress expression of the genes. Sets of antisense oligomers specific to each candidate target were designed using the sequences of the polynucleotides corresponding to a differentially expressed gene and the software program HYBsimulator Version 4 (available for Windows 95/Windows NT or for Power Macintosh, RNAture, Inc. 1003 Health Sciences Road, West, Irvine, Calif. 92612 USA). Factors considered when designing antisense oligonucleotides include: 1) the secondary structure of oligonucleotides; 2) the secondary structure of the target gene; 3) the specificity with no or minimum cross-hybridization to other expressed genes; 4) stability; 5) length and 6) terminal GC content. The antisense oligonucleotide is designed to so that it will hybridize to its target sequence under conditions of high stringency at physiological temperatures (e.g., an optimal temperature for the cells in culture to provide for hybridization in the cell, e.g., about 37° C.), but with minimal formation of homodimers.

[0347] Using the sets of oligomers and the HYBsimulator program, three to ten antisense oligonucleotides and their reverse controls were designed and synthesized for each candidate mRNA transcript, which transcript was obtained from the gene corresponding to the target polynucleotide sequence of interest. Once synthesized and quantitated, the oligomers were screened for efficiency of a transcript knock-out in a panel of cancer cell lines. The efficiency of the knock-out was determined by analyzing mRNA levels using lightcycler quantification. The oligomers that resulted in the highest level of transcript knock-out, wherein the level was at least about 50%, preferably about 80-90%, up to 95% or more up to undetectable message, were selected for use in a cell-based proliferation assay, an anchorage independent growth assay, and an apoptosis assay.

[0348] The ability of each designed antisense oligonucleotide to inhibit gene expression was tested through transfection into SW620 colon colorectal carcinoma cells. For each transfection mixture, a carrier molecule, preferably a lipitoid or cholesteroid, was prepared to a working concentration of 0.5 mM in water, sonicated to yield a uniform solution, and filtered through a 0.45 μm PVDF membrane. The antisense or control oligonucleotide was then prepared to a working concentration of 100 μM in sterile Millipore water. The oligonucleotide was further diluted in OptiMEM™ (Gibco/BRL), in a microfuge tube, to 2 μM, or approximately 20 μg oligo/ml of OptiMEM™. In a separate microfuge tube, lipitoid or cholesteroid, typically in the amount of about 1.5-2 nmol lipitoid/pg antisense oligonucleotide, was diluted into the same volume of OptiMEMm used to dilute the oligonucleotide. The diluted antisense oligonucleotide was immediately added to the diluted lipitoid and mixed by pipetting up and down. Oligonucleotide was added to the cells to a final concentration of 30 nM.

[0349] The level of target mRNA that corresponds to a target gene of interest in the transfected cells was quantitated in the cancer cell lines using the Roche LightCycler™ real-time PCR machine. Values for the target mRNA were normalized versus an internal control (e.g., beta-actin). For each 20 μl reaction, extracted RNA (generally 0.2-1 μg total) was placed into a sterile 0.5 or 1.5 ml microcentrifuge tube, and water was added to a total volume of 12.5 μl. To each tube was added 7.5 μl of a buffer/enzyme mixture, prepared by mixing (in the order listed) 2.5 μl H₂O, 2.0 μl 10× reaction buffer, 10 μl oligo dT (20 pmol), 1.0 μl dNTP mix (10 mM each), 0.5 μl RNAsin® (20 u) (Ambion, Inc., Hialeah, Fla.), and 0.5 μl MMLV reverse transcriptase (50 u) (Ambion, Inc.). The contents were mixed by pipetting up and down, and the reaction mixture was incubated at 42° C. for 1 hour. The contents of each tube were centrifuged prior to amplification.

[0350] An amplification mixture was prepared by mixing in the following order: 1× PCR buffer II, 3 mM MgCl₂, 140 μM each dNTP, 0.175 pmol each oligo, 1:50,000 dil of SYBR® Green, 0.25 mg/ml BSA, 1 unit Taq polymerase, and H₂O to 20 μl. (PCR buffer II is available in 10× concentration from Perkin-Elmer, Norwalk, Conn.). In 1× concentration it contains 10 mM Tris pH 8.3 and 50 mM KCl. SYBR® Green (Molecular Probes, Eugene, Oreg.) is a dye which fluoresces when bound to double stranded DNA. As double stranded PCR product is produced during amplification, the fluorescence from SYBR® Green increases. To each 20 μl aliquot of amplification mixture 2 μl of template RT was added, and amplification was carried out according to standard protocols.

[0351] The results of the antisense assays are provided in Table 7 (inserted before the claims). The results are expressed as the percent decrease in expression of the corresponding gene product relative to non-transfected cells, vehicle-only transfected (mock-transfected) cells, or cells transfected with reverse control oligonucleotides. Table 7 includes: 1) the SEQ ID NO; 2) the CID; 3) the “Gene Assignment” which refers to the gene to which the sequence has the greatest homology or identity; 4) the “Gene Symbol ”, 5) GenBank gene name; and 6) the percent decrease in expression of the gene relative to control cells (“mRNA KO”).

TABLE 7

| SEQ | | | | | |
|---|---|---|---|---|---|
| ID | | | Gene | GenBank | mRNA |
| NO | CID | GeneAssignment | Symbol | Gene Name | KO |
| 4 | 1 | Homo sapiens S100 calcium-binding protein | S100A | S100A4 | >80% |
| | | A4 (calcium protein, calvasculin, metastasin, | | | |
| | | murine placental homolog) (S100A4) mRNA > :: | | | |
| | | gb\|M80563\|HUMCAPL Human CAPL | | | |
| | | protein mRNA, complete cds. | | | |
| 9 | 6 | CDC28 protein kinase 2 | CKS2 | CKS2 01/ | >80% |
| | | | | 11 | |
| 11 | 8 | Fn14 for type I transmenmbrane protein | LOC51330 | Fn14 | >90% |
| 12 | 9 | cadherin 3, P-cadherin (placental) | CDH3 | CADHERIN-P | >90% |
| 16 | 13 | kallikrein 6 (neurosin, zyme) | KLK6 | proteaseM | >80% |
| 17 | 14 | arachidonate 5-lipoxygenase | ALOX5 | ALOX5 | >80% |
| 22 | 18 | bone morphogenetic protein 4 | BMP4 | BMP4 | >90% |
| 25 | 21 | | | GSTHOM | >90% |
| 32 | 27 | cathepsin H | CTSH | CATH-H | >90% |
| 38 | 33 | transketolase (Wernicke-Korsakoff | TKT | TRANSKETOLASE | >90% |
| | | syndrome) | | | |
| 41 | 36 | fucosyltransferase 1 (galactoside 2-alpha-L- | FUT1 | FUT1 | >90% |
| | | fucosyltransferase, Bombay phenotype | | | |
| | | included) | | | |
| 42 | 37 | 6-pyruvoyl-tetrahydropterin | PCBD | hDohc | >95% |
| | | synthase/dimerization cofactor of hepatocyte | | | |
| | | nuclear factor 1 alpha (TCF1) | | | |
| 54 | 50 | | | THC271862 | >70% |
| 56 | 53 | | | hECT2 | >80% |
| 63 | 63 | dipeptidase 1 (renal) | DPEP1 | DPP | >80% |
| 71 | 74 | ClpP (caseinolytic protease, ATP-dependent, | CLPP | CLPP | >80% |
| | | proteolytic subunit, E. coli) homolog | | | |
| 77 | 75 | tetraspan 5 | TSPAN-5 | NET-4 | >90% |
| 78 | 76 | phosphoserine aminotransferase | PSA | serAT | >90% |
| 87 | 121 | EGF-like-domain, multiple 2 | EGFL2 | EGFL2 | >70% |
| 100 | 127 | sigma receptor (SR31747 binding protein 1) | SR-BP1 | SR-BP1 | >90% |
| 113 | 92 | tumor protein D52-like 1 | TPD52L1 | hD53 | >80% |
| 141 | 143 | sulfotransferase family 2B, member 1 | SULT2B1 | SULT2B1 | >80% |
| 147 | 166 | over-expressed breast tumor protein | OBTP | HUMTUM | >90% |
| 165 | 179 | amphiregulin (schwannoma-derived growth | AREG | AREG | >90% |
| | | factor) | | | |
| 180 | 193 | S-adenosylhomocysteine hydrolase | AHCY | HUMAHCY2 | >70% |
| 183 | 196 | hypothetical protein [Homo sapiens] | HSPC152 | c719 | >80% |
| 208 | 155 | glyoxalase I | GLO1 | GLO1 | >90% |
| 213 | 160 | | | c374641 | >80% |
| 214 | 161 | putative nucleotide binding protein, | E2IG3 | c454001 | >80% |
| | | estradiol-induced [Homo sapiens] | | | |
| 218 | 164 | interferon induced transmembrane protein 2 | IFITM2 | 1-8U | >90% |
| | | (1-8D) | | | |
| 233 | 263 | polo (Drosophia)-like kinase | PLK | PLK1 | >90% |
| 236 | 266 | serum-inducible kinase | SNK | SNK | >80% |
| 239 | 269 | sterile-alpha motif and leucine zipper | ZAK | AZK | >70% |
| | | containing kinase AZK [Homo sapiens] | | | |
| 242 | 273 | | | AA399596 | >70% |
| 253 | 280 | v-akt murine thymoma viral oncogene | AKT3 | AKT3 | >90% |
| | | homolog 3 (protein kinase B, gamma) | | | |
| 276 | 227 | | | ITAK1 | >90% |
| 279 | 239 | | | AI335279 | >90% |
| 285 | 242 | serine hydroxymethyltransferase 2 | SHMT2 | SHMT2 | >90% |
| | | (mitochondrial) | | | |
| 294 | 245 | serum/glucocorticoid regulated kinase-like | SGKL | SGKL | >90% |
| 295 | 248 | mitogen-activated protein kinase kinase 4 | MAP2K4 | MKK4 | >80% |
| 300 | 249 | TTK protein kinase | TTK | hTTK | >90% |
| 123, | 103 | stearoyl-CoA desaturase | SCD | SCD | >90% |
| 124 | | | | | |
| 130, | 115 | prostate differentiation factor | PLAB | PLAB | >80% |
| 228 | | | | | |
| 162, | 176 | kallikrein 10 | KLK10 | NES1 | >80% |
| 193 | | | | | |
| 182, | 195 | | | c1665 | >80% |
| 217 | | | | | |
| 247, | 236 | serine/threonine kinase 15 | STK15 | hARK2 | >80% |
| 290 | | | | | |
| 257, | 212 | cyclin-dependent kinase inhibitor 3 (CDK2- | CDKN3 | KAP | >85% |
| 268 | | associated dual specificity phosphatase) | | | |
| 31, | 170 | pituitary tumor-transforming 1 | PTTG1 | PTTG1 | >90% |
| 151 | | | | | |
| 35, | 30 | CDC28 protein kinase 1 | CKS1 | CKS1 | >80% |
| 150 | | | | | |
| 5, | 2 | EphB3 [Homo sapiens] | EPHB3 | EPHB3 | >90% |
| 298, | | | | | |
| 301 | | | | | |
| 65, | 65 | KIAA0101 gene product [Homo sapiens] | KIAA0101 | KIAA0101 | >80% |
| 220 | | | | | |
| 73, | 100 | KIAA0175 gene product [Homo sapiens] | KIAA0175 | KIAA0175 | >90% |
| 116 | | | | | |
| 75, | 106 | catenin (cadherin-associated protein), alpha- | CTNNAL1 | RTA000001 | >90% |
| 131, | | like 1 | | 79AF.k.22.1 | |
| 134 | | | | | |
| 8, 106 | 5 | AXL receptor tyrosine kinase | AXL | | >95% |
| 88, | 118 | | | c3376 | >80% |
| 196 | | | | | |

### Example 4

### Effect of Expression on Proliferation

[0352] The effect of gene expression on the inhibition of cell proliferation was assessed in metastatic breast cancer cell lines (MDA-MB-231 (“231”)), SW620 colon colorectal carcinoma cells, or SKOV3 cells (a human ovarian carcinoma cell line).

[0353] Cells were plated to approximately 60-80% confluency in 96-well dishes. Antisense or reverse control oligonucleotide was diluted to 2 μM in OptiMEM™ and added to OptiMEM™ into which the delivery vehicle, lipitoid 116-6 in the case of SW620 cells or 1:1 lipitoid 1:cholesteroid 1 in the case of MDA-MB-231 cells, had been diluted. The oligo/delivery vehicle mixture was then further diluted into medium with serum on the cells. The final concentration of oligonucleotide for all experiments was 300 nM, and the final ratio of oligo to delivery vehicle for all experiments was 1.5 nmol lipitoid/μg oligonucleotide.

[0354] Antisense oligonucleotides were prepared as described above (see Example 3). Cells were transfected overnight at 37° C. and the transfection mixture was replaced with fresh medium the next morning. Transfection was carried out as described above in Example 3.

[0355] The results of the antisense experiments are shown in Table 8 (inserted before the claims, column labeled “Proliferation”). Those antisense oligonucleotides that resulted in decreased proliferation in SW620 colorectal carcinoma cells are indicated by “Inhib in” and “weak effect in”, with the cell type following. Those antisense oligonucleotides that resulted in inhibition of proliferation of SW620 cells indicates that the corresponding gene plays a role in production or maintenance of the cancerous phenotype in cancerous colon cells. Those antisense oligonucleotides that inhibited proliferation in SKOV3 cells represent genes that play a role in production or maintenance of the cancerous phenotype in cancerous breast cells. Those antisense oligonucleotides that resulted in inhibition of proliferation of MDA-MB-231 cells indicates that the corresponding gene plays a role in production or maintenance of the cancerous phenotype in cancerous ovarian cells.

TABLE 8

| SEQ | | | | | | | |
|---|---|---|---|---|---|---|---|
| ID | | | Gene | | mRNA | | |
| NO | CID | GeneAssignment | Symbol | Gene | KO | Proliferation | Softagar |
| 4 | 1 | Homo sapiens S100 | S100A | S100A4 | >80% | Inhib in | weak |
| | | calcium-binding protein | | | | SW620 | inhibition |
| | | A4 (calcium protein, | | | | | |
| | | calvasculin, metastasin, | | | | | |
| | | murine placental | | | | | |
| | | homolog) (S100A4) | | | | | |
| | | mRNA > :: | | | | | |
| | | gb\|M80563\|HUMCAPL | | | | | |
| | | Human CAPL protein | | | | | |
| | | mRNA, complete cds. | | | | | |
| 11 | 8 | Fn14 for type I | LOC51330 | Fn14 | >90% | inconsis. | inhibits |
| | | transmenmbrane protein | | | | SW620, | SW620, |
| | | | | | | 231 | 231 |
| 12 | 9 | cadherin 3, P-cadherin | CDH3 | CADHERIN-P | >90% | Inhib in | Inhib in |
| | | (placental) | | | | SW620 | SW620 |
| 16 | 13 | kallikrein 6 (neurosin, | KLK6 | proteaseM | >80% | weak effect | negative |
| | | zyme) | | | | in SW620 | SW620 |
| 38 | 33 | transketolase (Wemicke- | TKT | TRANSKETOLASE | >90% | inconsis. | inhibits |
| | | Korsakoff syndrome) | | | | SW620, | SW620, |
| | | | | | | 231 | 231 |
| 42 | 37 | 6-pyruvoyl- | PCBD | hDohc | >95% | inconsis. | inhibits |
| | | tetrahydropterin | | | | SW620, | SW620, |
| | | synthase/dimerization | | | | 231 | 231 |
| | | cofactor of hepatocyte | | | | | |
| | | nuclear factor 1 alpha | | | | | |
| | | (TCF1) | | | | | |
| 56 | 53 | | | hECT2 | >80% | Inhib in | Inhib in |
| | | | | | | SW620 | SW620 |
| 63 | 63 | dipeptidase 1 (renal) | DPEP1 | DPP | >80% | weak | negative |
| | | | | | | inhibition | in |
| | | | | | | | SW620 |
| 77 | 75 | tetraspan 5 | TSPAN-5 | NET-4 | >90% | Inhib in | weak |
| | | | | | | SW620 | inhibition |
| 180 | 193 | S-adenosylhomocysteine | AHCY | HUMAHCY 2 | >70% | Inhib in | Inhib in |
| | | hydrolase | | | | SW620 | SW620 |
| 233 | 263 | polo (Drosophia)-like | PLK | PLK1 | >90% | Inhib in | Inhib in |
| | | kinase | | | | SW620 | SW620 |
| 236 | 266 | serum-inducible kinase | SNK | SNK | >80% | Inhib in | negative |
| | | | | | | SW620 | in |
| | | | | | | | SW620 |
| 253 | 280 | v-akt murine thymoma | AKT3 | AKT3 | >90% | inhibits | inhibits |
| | | viral oncogene homolog 3 | | | | SKOV3, 231 | SKOV3, |
| | | (protein kinase B, gamma) | | | | | 231 |
| 279 | 239 | | | AI335279 | >90% | negative in | weak |
| | | | | | | SW620 | inhibition |
| 300 | 249 | TTK protein kinase | TTK | hTTK | >90% | inhibits | inhibits |
| | | | | | | SW620 | SW620 |
| 247, | 236 | serine/threonine kinase 15 | STK15 | hARK2 | >80% | Inhib in | weak |
| 290 | | | | | | SW620 | effect in |
| | | | | | | | SW620 |
| 257, | 212 | cyclin-dependent kinase | CDKN3 | KAP | >85% | Inhib in | |
| 268 | | inhibitor 3 (CDK2- | | | | SW620 | |
| | | associated dual specificity | | | | | |
| | | phosphatase) | | | | | |
| 35, | 30 | CDC28 protein kinase 1 | CKS1 | CKS1 | >80% | Inhib in | Inhib in |
| 150 | | | | | | SW620 | SW620 |
| 88, | 118 | | | c3376 | >80% | weak effect | neg |
| 196 | | | | | | in SW620 | SW620 |

### Example 5

### Effect of Gene Expression on Colony Formation

[0356] The effect of gene expression upon colony formation of SW620 cells, SKOV3 cells, and MD-MBA-231 cells was tested in a soft agar assay. Soft agar assays were conducted by first establishing a bottom layer of 2 ml of 0.6% agar in media plated fresh within a few hours of layering on the cells. The cell layer was formed on the bottom layer by removing cells transfected as described above from plates using 0.05% trypsin and washing twice in media. The cells were counted in a Coulter counter, and resuspended to 10⁶ per ml in media. 10 μl aliquots were placed with media in 96-well plates (to check counting with WST1), or diluted further for the soft agar assay. 2000 cells were plated in 800 μl 0.4% agar in duplicate wells above 0.6% agar bottom layer. After the cell layer agar solidified, 2 ml of media was dribbled on top and antisense or reverse control oligo (produced as described in Example 3) was added without delivery vehicles. Fresh media and oligos were added every 3-4 days. Colonies formed in 10 days to 3 weeks. Fields of colonies were counted by eye. Wst-1 metabolism values can be used to compensate for small differences in starting cell number. Larger fields can be scanned for visual record of differences.

[0357] Table 8 (inserted before the claims) provides the results of these assays (“Softagar”). Those antisense oligonucleotides that resulted in inhibition of colony formation are indicated by “inhibits”, “weak effect”, or “weak inhibition” followed by the cell type. Those antisense oligonucleotides that resulted in inhibition of colony formation of SW620 cells indicates that the corresponding gene plays a role in production or maintenance of the cancerous phenotype in cancerous colon cells. Those antisense oligonucleotides that inhibited colony formation in SKOV3 cells represent genes that play a role in production or maintenance of the cancerous phenotype in cancerous breast cells. Those antisense oligonucleotides that resulted in inhibition of colony formation of MDA-MB-231 cells indicates that the corresponding gene plays a role in production or maintenance of the cancerous phenotype in cancerous ovarian cells.

### Example 6

### Induction of Cell Death Upon Depletion of Polypeptides by Depletion of mRNA (“Antisense Knockout”)

[0358] In order to assess the effect of depletion of a target message upon cell death, SW620 cells, or other cells derived from a cancer of interest, are transfected for proliferation assays. For cytotoxic effect in the presence of cisplatin (cis), the same protocol is followed but cells are left in the presence of 2 μM drug. Each day, cytotoxicity was monitored by measuring the amount of LDH enzyme released in the medium due to membrane damage. The activity of LDH is measured using the Cytotoxicity Detection Kit from Roche Molecular Biochemicals. The data is provided as a ratio of LDH released in the medium vs. the total LDH present in the well at the same time point and treatment (rLDH/tLDH). A positive control using antisense and reverse control oligonucleotides for BCL2 (a known anti-apoptotic gene) is included; loss of message for BCL2 leads to an increase in cell death compared with treatment with the control oligonucleotide (background cytotoxicity due to transfection).

### Example 7

### Functional Analysis of Gene Products Differentially Expressed in Colon Cancer in Patients

[0359] The gene products of sequences of a gene differentially expressed in cancerous cells can be further analyzed to confirm the role and function of the gene product in tumorigenesis, e.g., in promoting or inhibiting development of a metastatic phenotype. For example, the function of gene products corresponding to genes identified herein can be assessed by blocking function of the gene products in the cell. For example, where the gene product is secreted or associated with a cell surface membrane, blocking antibodies can be generated and added to cells to examine the effect upon the cell phenotype in the context of, for example, the transformation of the cell to a cancerous, particularly a metastatic, phenotype.

[0360] Where the gene product of the differentially expressed genes identified herein exhibits sequence homology to a protein of known function (e.g., to a specific kinase or protease) and/or to a protein family of known function (e.g., contains a domain or other consensus sequence present in a protease family or in a kinase family), then the role of the gene product in tumorigenesis, as well as the activity of the gene product, can be examined using small molecules that inhibit or enhance function of the corresponding protein or protein family.

[0361] Additional functional assays include, but are not necessarily limited to, those that analyze the effect of expression of the corresponding gene upon cell cycle and cell migration. Methods for performing such assays are well known in the art.

### Example 8

### Contig Assembly and Additional Gene Characterization

[0362] The sequences of the polynucleotides provided in the present invention can be used to extend the sequence information of the gene to which the polynucleotides correspond (e.g., a gene, or mRNA encoded by the gene, having a sequence of the polynucleotide described herein). This expanded sequence information can in turn be used to further characterize the corresponding gene, which in turn provides additional information about the nature of the gene product (e.g., the normal function of the gene product). The additional information can serve to provide additional evidence of the gene product's use as a therapeutic target, and provide further guidance as to the types of agents that can modulate its activity.

[0363] In one example, a contig was assembled using the sequence of the polynucleotide having SEQ ID NO:2 (sequence name 019.G3.sp6_{—}128473), which is present in clone M00006883D:H12. A “contig” is a contiguous sequence of nucleotides that is assembled from nucleic acid sequences having overlapping (e.g., shared or substantially similar) sequence information. The sequences of publicly-available ESTs (Expressed Sequence Tags) and the sequences of various clones from several cDNA libraries synthesized at Chiron were used in the contig assembly. None of the sequences from these latter clones from the cDNA libraries had significant hits against known genes with function when searched using BLASTN against GenBank as described above.

[0364] The contig was assembled using the software program Sequencher, version 4.05, according to the manufacturer's instructions. The final contig was assembled from 11 sequences, provided in the Sequence Listing as SEQ ID NOS:2 and 310-320. The sequence names and SEQ ID NOS of the sequences are provided in the overview alignment produced by Sequencher (see FIG. 1).

[0365] The clone containing the sequence of 035JN032.H09 (SEQ ID NO:319) is of particular interest. This clone was originally obtained from a normalized cDNA library prepared from a prostate cancer tissue sample that was obtained from a patient with Gleason grade 3+3. The clone having the 035JN032.H09 sequence corresponds to a gene that has increased expression in (e.g., is upregulated) in colon cancer as detected by microarray analysis using the protocol and materials described above. The data is provided in the table below.

| | | | | Number of | | |
|---|---|---|---|---|---|---|
| SEQ | | | | patients used | | |
| ID | Spot | Chip | Sample | to calculate | % | % |
| NO | ID | # | ID | concordance | >=2x | >=5x |
| 2 | 1833 | 1 | M00006883D:H12 | 33 | 61 | 33 |
| 319 | 27454 | 5 | 035JN032.H09 | 28 | 61 | 11 |

[0366] “%>2×” and “%>5×” indicate the percentage of patients in which the corresponding gene was expressed at two-fold and five-fold greater levels in cancerous cells relative to normal cells, respectively.

[0367] This observation thus further validates the expression profile of the clone having the sequence of 035JN032.H09, as it indicates that the gene represented by this sequence and clone is differentially expressed in at least two different cancer types.

[0368] The sequence information obtained in the contig assembly described above was used to obtain a consensus sequence derived from the contig using the Sequencher program. The consensus sequence is provided as SEQ ID NO:320 in the Sequence Listing.

[0369] In preliminary experiments, the consensus sequence was used as a query sequence in a BLASTN search of the DGTI DoubleTwist Gene Index (DoubleTwist, Inc., Oakland, Calif.), which contains all the EST and non-redundant sequence in public databases. This preliminary search indicated that the consensus sequence has homology to a predicted gene homologue to human atrophin-1 (HSS0190516.1 dtgic|HSC010416.3 Similar to: DRPL_HUMAN gi|17660|sp|P54259|DRPL_HUMAN ATROPHIN-1 (DENTATORUBRAL-PALLIDOLUYSIAN ATROPHY PROTEIN) [Homo sapiens (Human), provided as SEQ ID NO:322), with a Score=1538 bits (776), Expect=0.0, and Identities=779/780 (99%).

[0370] While the preliminary results regarding the homology to atrophin-1 are not yet confirmed, this example, through contig assembly and the use of homology searching software programs, shows that the sequence information provided herein can be readily extended to confirm, or confirm a predicted, gene having the sequence of the polynucleotides described in the present invention. Further the information obtained can be used to identify the function of the gene product of the gene corresponding to the polynucleotides described herein. While not necessary to the practice of the invention, identification of the function of the corresponding gene, can provide guidance in the design of therapeutics that target the gene to modulate its activity and modulate the cancerous phenotype (e.g., inhibit metastasis, proliferation, and the like).

### Example 9

### Source of Biological Materials

[0371] The biological materials used in the experiments that led to the present invention are described below.

[0372] Source of Patient Tissue Samples

[0373] Normal and cancerous tissues were collected from patients using laser capture microdissection (LCM) techniques, which techniques are well known in the art (see, e.g., Ohyama et al. (2000) Biotechniques 29:530-6; Curran et al. (2000) Mol. Pathol. 53:64-8; Suarez-Quian et al. (1999) Biotechniques 26:328-35; Simone et al. (1998) Trends Genet 14:272-6; Conia et al. (1997) J. Clin. Lab. Anal. 11:28-38; Emmert-Buck et al. (1996) Science 274:998-1001). Table 10 (inserted prior to claims) provides information about each patient from which colon tissue samples were isolated, including: the Patient ID (“PT ID”) and Path ReportID (“Path ID”), which are numbers assigned to the patient and the pathology reports for identification purposes; the group (“Grp”) to which the patients have been assigned; the anatomical location of the tumor (“Anatom Loc”); the primary tumor size (“Size”); the primary tumor grade (“Grade”); the identification of the histopathological grade (“Histo Grade”); a description of local sites to which the tumor had invaded (“Local Invasion”); the presence of lymph node metastases (“Lymph Met”); the incidence of lymph node metastases (provided as a number of lymph nodes positive for metastasis over the number of lymph nodes examined) (“Lymph Met Incid”); the regional lymphnode grade (“Reg Lymph Grade”); the identification or detection of metastases to sites distant to the tumor and their location (“Dist Met & Loc”); the grade of distant metastasis (“Dist Met Grade”); and general comments about the patient or the tumor (“Comments”). Histophatology of all primary tumors indicated the tumor was adenocarcinoma except for Patient ID Nos. 130 (for which no information was provided), 392 (in which greater than 50% of the cells were mucinous carcinoma), and 784 (adenosquamous carcinoma). Extranodal extensions were described in three patients, Patient ID Nos. 784 and 791. Lymphovascular invasion was described in Patient ID Nos. 128, 228, 278, 517, 784, 786, 791, and 890. Crohn's-like infiltrates were described in seven patients, Patient ID Nos. 52, 264, 268, 392, 393, 784, and 791.

TABLE 10

| | | | | | | | | | Lymph | Reg | Dist | Dist | |
|---|---|---|---|---|---|---|---|---|---|---|---|---|---|
| Pt | Path | | Anatom | | | Histo | | Lymph | Met | Lymph | Met & | Met | |
| ID | ID | Grp | Loc | Size | Grade | Grade | Local Invasion | Met | Incid | Grade | Loc | Grade | Comment |
| 15 | 21 | III | Ascending | 4.0 | T3 | G2 | Extending into | Pos | 3/8 | N1 | Neg | MX | invasive |
| | | | colon | | | | subserosal adipose | | | | | | adenocarcinoma, |
| | | | | | | | tissue | | | | | | moderately |
| | | | | | | | | | | | | | differentiated; |
| | | | | | | | | | | | | | focal |
| | | | | | | | | | | | | | perineural |
| | | | | | | | | | | | | | invasion is |
| | | | | | | | | | | | | | seen |
| 52 | 71 | II | Cecum | 9.0 | T3 | G3 | Invasion through | Neg | 0/12 | N0 | Neg | M0 | Hyperplastic |
| | | | | | | | muscularis propria, | | | | | | polyp in |
| | | | | | | | subserosal | | | | | | appendix. |
| | | | | | | | involvement; | | | | | | |
| | | | | | | | ileocec. valve | | | | | | |
| | | | | | | | involvement | | | | | | |
| 121 | 140 | II | Sigmoid | 6 | T4 | G2 | Invasion of | Neg | 0/34 | N0 | Neg | M0 | Perineural |
| | | | | | | | muscularis propria | | | | | | invasion; |
| | | | | | | | into serosa, | | | | | | donut |
| | | | | | | | involving | | | | | | anastomosis |
| | | | | | | | submucosa of | | | | | | Neg. One |
| | | | | | | | urinary bladder | | | | | | tubulovillous |
| | | | | | | | | | | | | | and one |
| | | | | | | | | | | | | | tubular |
| | | | | | | | | | | | | | adenoma with |
| | | | | | | | | | | | | | no high grade |
| | | | | | | | | | | | | | dysplasia. |
| 125 | 144 | II | Cecum | 6 | T3 | G2 | Invasion through | Neg | 0/19 | N0 | Neg | M0 | patient |
| | | | | | | | the muscularis | | | | | | history of |
| | | | | | | | propria into | | | | | | metastatic |
| | | | | | | | suserosal adipose | | | | | | melanoma |
| | | | | | | | tissue. Ileocecal | | | | | | |
| | | | | | | | junction. | | | | | | |
| 128 | 147 | III | Transverse | 5.0 | T3 | G2 | Invasion of | Pos | 1/5 | N1 | Neg | M0 | |
| | | | colon | | | | muscularis propria | | | | | | |
| | | | | | | | into percolonic fat | | | | | | |
| 130 | 149 | | Splenic | 5.5 | T3 | | through wall and | Pos | 10/24 | N2 | Neg | M1 | |
| | | | flexure | | | | into surrounding | | | | | | |
| | | | | | | | adipose tissue | | | | | | |
| 133 | 152 | II | Rectum | 5.0 | T3 | G2 | Invasion through | Neg | 0/9 | N0 | Neg | M0 | Small |
| | | | | | | | muscularis propria | | | | | | separate |
| | | | | | | | into non- | | | | | | tubular |
| | | | | | | | peritonealized | | | | | | adenoma (0.4 cm) |
| | | | | | | | pericolic tissue; | | | | | | |
| | | | | | | | gross configuration | | | | | | |
| | | | | | | | is annular. | | | | | | |
| 141 | 160 | IV | Cecum | 5.5 | T3 | G2 | Invasion of | Pos | 7/21 | N2 | Pos - | M1 | Perineural |
| | | | | | | | muscularis propria | | | | Liver | | invasion |
| | | | | | | | into pericolonic | | | | | | identified |
| | | | | | | | adipose tissue, but | | | | | | adjacent to |
| | | | | | | | not through serosa. | | | | | | metastatic |
| | | | | | | | Arising from | | | | | | adenocarcinoma. |
| | | | | | | | tubular adenoma. | | | | | | |
| 156 | 175 | III | Hepatic | 3.8 | T3 | G2 | Invasion through | Pos | 2/13 | N1 | Neg | M0 | Separate |
| | | | flexure | | | | mucsularis propria | | | | | | tubolovillous |
| | | | | | | | into | | | | | | and tubular |
| | | | | | | | subserosa/pericolic | | | | | | adenomas |
| | | | | | | | adipose, no serosal | | | | | | |
| | | | | | | | involvement. Gross | | | | | | |
| | | | | | | | configuration | | | | | | |
| | | | | | | | annular. | | | | | | |
| 228 | 247 | III | Rectum | 5.8 | T3 | G2 to | Invasion through | Pos | 1/8 | N1 | Neg | MX | Hyperplastic |
| | | | | | | G3 | muscularis propria | | | | | | polyps |
| | | | | | | | to involve | | | | | | |
| | | | | | | | subserosal, | | | | | | |
| | | | | | | | perirectoal adipose, | | | | | | |
| | | | | | | | and serosa | | | | | | |
| 264 | 283 | II | Ascending | 5.5 | T3 | G2 | Invasion through | Neg | 0/10 | N0 | Neg | M0 | Tubulovillous |
| | | | colon | | | | muscularis propria | | | | | | adenoma with |
| | | | | | | | into subserosal | | | | | | high grade |
| | | | | | | | adipose tissue. | | | | | | dysplasia |
| 266 | 285 | III | Transverse | 9 | T3 | G2 | Invades through | Neg | 0/15 | N1 | Pos - | MX | |
| | | | colon | | | | muscularis propria | | | | Mesen- | | |
| | | | | | | | to involve | | | | teric | | |
| | | | | | | | pericolonic | | | | deposit | | |
| | | | | | | | adipose, extends to | | | | | | |
| | | | | | | | serosa. | | | | | | |
| 268 | 287 | I | Cecum | 6.5 | T2 | G2 | Invades full | Neg | 0/12 | N0 | Neg | M0 | |
| | | | | | | | thickness of | | | | | | |
| | | | | | | | muscularis propria, | | | | | | |
| | | | | | | | but mesenteric | | | | | | |
| | | | | | | | adipose free of | | | | | | |
| | | | | | | | malignancy | | | | | | |
| 278 | 297 | III | Rectum | 4 | T3 | G2 | Invasion into | Pos | 7/10 | N2 | Neg | M0 | Descending |
| | | | | | | | perirectal adipose | | | | | | colon polyps, |
| | | | | | | | tissue. | | | | | | no HGD or |
| | | | | | | | | | | | | | carcinoma |
| | | | | | | | | | | | | | identified. |
| 295 | 314 | II | Ascending | 5.0 | T3 | G2 | Invasion through | Neg | 0/12 | N0 | Neg | M0 | Melanosis |
| | | | colon | | | | muscularis propria | | | | | | coli and |
| | | | | | | | into percolic | | | | | | diverticular |
| | | | | | | | adipose tissue. | | | | | | disease. |
| 296 | 315 | III | Cecum | 5.5 | T3 | G2 | Invasion through | Pos | 2/12 | N1 | Neg | M0 | Tubulovillous |
| | | | | | | | muscularis propria | | | | | | adenoma (2.0 cm) |
| | | | | | | | and invades | | | | | | with no |
| | | | | | | | pericolic adipose | | | | | | high grade |
| | | | | | | | tissue. Ileocecal | | | | | | dysplasia. |
| | | | | | | | junction. | | | | | | Neg. liver |
| | | | | | | | | | | | | | biopsy. |
| 339 | 358 | II | Recto- | 6 | T3 | G2 | Extends into | Neg | 0/6 | N0 | Neg | M0 | 1 hyperplastic |
| | | | sigmoid | | | | perirectal fat but | | | | | | polyp |
| | | | | | | | does not reach | | | | | | identified |
| | | | | | | | serosa | | | | | | |
| 341 | 360 | II | Ascending | 2 cm | T3 | G2 | Invasion through | Neg | 0/4 | N0 | Neg | MX | |
| | | | colon | invasive | | | muscularis propria | | | | | | |
| | | | | | | | to involve | | | | | | |
| | | | | | | | pericolonic fat. | | | | | | |
| | | | | | | | Arising from | | | | | | |
| | | | | | | | villous adenoma. | | | | | | |
| 356 | 375 | II | Sigmoid | 6.5 | T3 | G2 | Through colon wall | Neg | 0/4 | N0 | Neg | M0 | |
| | | | | | | | into subserosal | | | | | | |
| | | | | | | | adipose tissue. No | | | | | | |
| | | | | | | | serosal spread seen. | | | | | | |
| 392 | 444 | IV | Ascending | 2 | T3 | G2 | Invasion through | Pos | 1/6 | N1 | Pos - | M1 | Tumor |
| | | | colon | | | | muscularis propria | | | | Liver | | arising at |
| | | | | | | | into subserosal | | | | | | prior ileocolic |
| | | | | | | | adipose tissue, not | | | | | | surgical |
| | | | | | | | serosa. | | | | | | anastomosis. |
| 393 | 445 | II | Cecum | 6.0 | T3 | G2 | Cecum, invades | Neg | 0/21 | N0 | Neg | M0 | |
| | | | | | | | through muscularis | | | | | | |
| | | | | | | | propria to involve | | | | | | |
| | | | | | | | subserosal adipose | | | | | | |
| | | | | | | | tissue but not | | | | | | |
| | | | | | | | serosa. | | | | | | |
| 413 | 465 | IV | Cecum | 4.8 | T3 | G2 | Invasive through | Neg | 0/7 | N0 | Pos - | M1 | rediagnosis of |
| | | | | | | | muscularis to | | | | Liver | | oophorectomy |
| | | | | | | | involve periserosal | | | | | | path to |
| | | | | | | | fat; abutting | | | | | | metastatic |
| | | | | | | | ileocecal junction. | | | | | | colon cancer. |
| 517 | 395 | IV | Sigmoid | 3 | T3 | G2 | penetrates | Pos | 6/6 | N2 | Neg | M0 | No mention |
| | | | | | | | muscularis propria, | | | | | | of distant met |
| | | | | | | | involves | | | | | | in report |
| | | | | | | | pericolonic fat. | | | | | | |
| 546 | 565 | IV | Ascending | 5.5 | T3 | G2 | Invasion through | Pos | 6/12 | N2 | Pos | M1 | |
| | | | colon | | Liver | | muscularis propria | | | | | | |
| | | | | | | | extensively through | | | | | | |
| | | | | | | | submucosal and | | | | | | |
| | | | | | | | extending to | | | | | | |
| | | | | | | | serosa. | | | | | | |
| 577 | 596 | II | Cecum | 11.5 | T3 | G2 | Invasion through | Neg | 0/58 | N0 | Neg | M0 | Appendix |
| | | | | | | | the bowel wall, into | | | | | | dilated and |
| | | | | | | | suberosal adipose. | | | | | | fibrotic, but |
| | | | | | | | Serosal surface free | | | | | | not involved |
| | | | | | | | of tumor. | | | | | | by tumor |
| 784 | 803 | IV | Ascending | 3.5 | T3 | G3 | through muscularis | Pos | 5/17 | N2 | Pos - | M1 | invasive |
| | | | colon | | | | propria into | | | | Liver | | poorly |
| | | | | | | | pericolic soft | | | | | | differentiated |
| | | | | | | | tissues | | | | | | adenosquamous |
| | | | | | | | | | | | | | carcinoma |
| 786 | 805 | IV | Descend- | 9.5 | T3 | G2 | through muscularis | Neg | 0/12 | N0 | Pos - | M1 | moderately |
| | | | ing colon | | | | propria into | | | | Liver | | differentiated |
| | | | | | | | pericolic fat, but | | | | | | invasive |
| | | | | | | | not at serosal | | | | | | adenocarcinoma |
| | | | | | | | surface | | | | | | |
| 791 | 810 | IV | Ascending | 5.8 | T3 | G3 | Through the | Pos | 13/25 | N2 | Pos - | M1 | poorly |
| | | | colon | | | | muscularis propria | | | | Liver | | differentiated |
| | | | | | | | into pericolic fat | | | | | | invasive |
| | | | | | | | | | | | | | colonic |
| | | | | | | | | | | | | | adenocarcinoma |
| 888 | 908 | IV | Ascending | 2.0 | T2 | G1 | Into muscularis | Pos | 3/21 | N0 | Pos - | M1 | well to |
| | | | colon | | | | propria | | | | Liver | | moderately |
| | | | | | | | | | | | | | differentiated |
| | | | | | | | | | | | | | adenocarcinomas; |
| | | | | | | | | | | | | | this |
| | | | | | | | | | | | | | patient has |
| | | | | | | | | | | | | | tumors of the |
| | | | | | | | | | | | | | ascending |
| | | | | | | | | | | | | | colon and the |
| | | | | | | | | | | | | | sigmoid |
| | | | | | | | | | | | | | colon |
| 889 | 909 | IV | Cecum | 4.8 | T3 | G2 | Through | Pos | 1/4 | N1 | Pos - | M1 | moderately |
| | | | | | | | muscularis propria | | | | Liver | | differentiated |
| | | | | | | | int subserosal | | | | | | adenocarcinoma |
| | | | | | | | tissue | | | | | | |
| 890 | 910 | IV | Ascending | | T3 | G2 | Through | Pos | 11/15 | N2 | Pos - | M1 | |
| | | | colon | | Liver | | muscularis propria | | | | | | |
| | | | | | | | into subserosa. | | | | | | |

[0374] Source of Polynucleotides on Arrays

[0375] Polynucleotides for use on the arrays were obtained from both publicly available sources and from cDNA libraries generated from selected cell lines and patient tissues. Table 11 (inserted prior to claims) provides information about the polynucleotides on the arrays including: (1) the “SEQ ID NO” assigned to each sequence for use in the present specification; (2) the spot identification number (“Spot ID”), an internal reference that serves as a unique identifier for the spot on the array; (3) the “Clone ID” assigned to the clone from which the sequence was isolated; (4) the number of the Group (“Grp”) to which the gene is assigned (see Example 11 below); and (5) the gene represented by the SEQ ID NO (“Gene”).

TABLE 11

| SEQ | | | | | | | |
|---|---|---|---|---|---|---|---|
| ID | Spot | | | | | | |
| NO | ID | Clone ID | Grp | Gene | GBHit | GBDesc | GBScore |
| 322 | 33669 | RG:26148:Order7TM01:C06 | 1 | IGF2 | X07868 | Human DNA for insulin- | 2.1E−35 |
| | | | | | | like growth factor II | |
| | | | | | | (IGF-2); exon 7 and | |
| | | | | | | additional ORF | |
| 323 | 32956 | RG:240381:Order7TM20:G11 | 1 | IGF2 | X03427 | Homo sapiens IGF-II | 7.4E−186 |
| | | | | | | gene, exon 5 | |
| 324 | 17167 | RG:730402:10010:H01 | 1 | TTK | BC000633 | Homo sapiens, TTK | 2.1E−38 |
| | | | | | | protein kinase, clone | |
| | | | | | | MGC: 865 | |
| | | | | | | IMAGE: 3343925, | |
| | | | | | | mRNA, complete cds | |
| 325 | 21711 | RG:1674098:10014:H01 | 1 | MARCKS | D10522 | Homo sapiens mRNA for | 4E−148 |
| | | | | | | 80K-L protein, complete | |
| | | | | | | cds | |
| 326 | 29171 | 035JN025.C12 | 1 | FLJ22066 | AK025719 | Homo sapiens cDNA: | 0 |
| | | | | | | FLJ22066 fis, clone | |
| | | | | | | HEP10611 | |
| 327 | 30566 | RG:432087:Order7TM26:D02 | 1 | FLJ22066 | AK025719 | Homo sapiens cDNA: | 0 |
| | | | | | | FLJ22066 fis, clone | |
| | | | | | | HEP10611 | |
| 328 | 10638 | I:1644648:07B01:G04 | 1 | NQO2 | U07736 | Human quinone | 1.6E−171 |
| | | | | | | oxidoreductase2 (NQO2) | |
| | | | | | | gene, exon 7, complete | |
| | | | | | | cds | |
| 329 | 8491 | I:2594080:05A01:F01 | 1 | FHL3 | BC001351 | Homo sapiens, Similar to | 2.6E−34 |
| | | | | | | four and a half LIM | |
| | | | | | | domains 3, clone | |
| | | | | | | MGC: 8696 | |
| | | | | | | IMAGE: 2964682, | |
| | | | | | | mRNA, compl | |
| 330 | 27092 | 035Jn031.C09 | 1 | MGC: 29604 | BC019103 | Homo sapiens, clone | 1E−300 |
| | | | | | | MGC: 29604 | |
| | | | | | | IMAGE: 5021401, | |
| | | | | | | mRNA, complete cds | |
| 331 | 10394 | I:1450639:03B02:E09 | 1 | CETN2 | BC005334 | Homo sapiens, centrin, | 1.1E−190 |
| | | | | | | EF-hand protein, 2, clone | |
| | | | | | | MGC: 12421 | |
| | | | | | | IMAGE: 3961448, | |
| | | | | | | mRNA, complete cds | |
| 332 | 3295 | M00008083D:D06 | 1 | CGI-148 | AF223467 | Homo sapiens NPD008 | 2.5E−157 |
| | | | | protein | | protein (NPD008) | |
| | | | | | | mRNA, complete cds | |
| 333 | 30831 | RG:301734:Order7TM22:H02 | 1 | KIP2 | AB012955 | Homo sapiens mRNA for | 5.8E−252 |
| | | | | | | KIP2, complete cds | |
| 334 | 19871 | RG:196236:10006:H11 | 1 | FGFR4 | AF359246 | Homo sapiens fibroblast | 5E−249 |
| | | | | | | growth factor receptor 4 | |
| | | | | | | variant mRNA, complete | |
| | | | | | | cds | |
| 335 | 30858 | RG:359021:Order7TM24:F02 | 1 | BBS2 | AF342736 | Homo sapiens BBS2 | 1E−100 |
| | | | | | | (BBS2) mRNA, complete | |
| | | | | | | cds | |
| 336 | 17168 | RG:1320327:10012:H01 | 1 | OGG1 | Y11731 | H. sapiens mRNA for | 1E−300 |
| | | | | | | DNA glycosylase | |
| 337 | 17487 | RG:341475:10008:H01 | 1 | MAPKAPK2 | NM_032960 | Homo sapiens mitogen- | 1E−300 |
| | | | | | | activated protein kinase- | |
| | | | | | | activated protein kinase 2 | |
| | | | | | | (MAPKAPK2), transcript | |
| | | | | | | variant | |
| 338 | 18942 | RG:1895716:10015:G09 | 2 | ITAK | AC007055 | AC007055 Homo sapiens | 3.00E−94 |
| | | | | | | chromosome 14 clone | |
| | | | | | | BAC 201F1 map | |
| | | | | | | 14q24.3, complete | |
| | | | | | | sequence | |
| 339 | 17365 | I:504786:14A02:C07 | 2 | 1-8U; 1-8D; | BC006794 | Homo sapiens, Similar to | 6.4E−295 |
| | | | | 9-27 | | interferon induced | |
| | | | | | | transmembrane protein 3 | |
| | | | | | | (1-8U), clone MGC: 5225 | |
| | | | | | | IMAGE: | |
| 340 | 21144 | M00055353D:A04 | 2 | 1-8U; 1-8D; | BC006794 | Homo sapiens, Similar to | 1.1E−156 |
| | | | | 9-27 | | interferon induced | |
| | | | | | | transmembrane protein 3 | |
| | | | | | | (1-8U), clone MGC: 5225 | |
| | | | | | | IMAGE: | |
| 341 | 11573 | I:1513214:04A01:C11 | 2 | BIRC3 | U45878 | Human inhibitor of | 2.5E−157 |
| | | | | | | apoptosis protein 1 | |
| | | | | | | mRNA, complete cds | |

[0376] The sequences corresponding to the SEQ ID NOS are provided in the Sequence Listing.

[0377] Characterization of Sequences

[0378] The sequences of the isolated polynucleotides were first masked to eliminate low complexity sequences using the RepeatMasker masking program, publicly available through a web site supported by the University of Washington (See also Smit, A. F. A. and Green, P., unpublished results). Generally, masking does not influence the final search results, except to eliminate sequences of relatively little interest due to their low complexity, and to eliminate multiple “hits” based on similarity to repetitive regions common to multiple sequences, e.g., Alu repeats. Masking resulted in the elimination of several sequences.

[0379] The remaining sequences of the isolated polynucleotides were used in a homology search of the GenBank database using the TeraBLAST program (TimeLogic, Crystal Bay, Nev.), a DNA and protein sequence homology searching algorithm. TeraBLAST is a version of the publicly available BLAST search algorithm developed by the National Center for Biotechnology, modified to operate at an accelerated speed with increased sensitivity on a specialized computer hardware platform. The program was run with the default parameters recommended by TimeLogic to provide the best sensitivity and speed for searching DNA and protein sequences. Gene assignment for the query sequences was determined based on best hit form the GenBank database; expectancy values are provided with the hit.

[0380] Summary of TeraBLAST Search Results

[0381] Table 11 also provides information about the gene corresponding to each polynucleotide. Table 11 includes: (1) the “SEQ ID NO” of the sequence; (2) the GenBank Accession Number of the publicly available sequence corresponding to the polynucleotide (“GBHit”); (3) a description of the GenBank sequence (“GBDesc”); (4) the score of the similarity of the polynucleotide sequence and the GenBank sequence (“GBScore”). The published information for each GenBank and EST description, as well as the corresponding sequence identified by the provided accession number, are incorporated herein by reference.

### Example 10

### Detection of Differential Expression Using Arrays

[0382] cDNA probes were prepared from total RNA isolated from the patient cells described above. Since LCM provides for the isolation of specific cell types to provide a substantially homogenous cell sample, this provided for a similarly pure RNA sample.

[0383] Total RNA was first reverse transcribed into cDNA using a primer containing a T7 RNA polymerase promoter, followed by second strand DNA synthesis. cDNA was then transcribed in vitro to produce antisense RNA using the T7 promoter-mediated expression (see, e.g., Luo et al. (1999) Nature Med 5:117-122), and the antisense RNA was then converted into cDNA. The second set of cDNAs were again transcribed in vitro, using the T7 promoter, to provide antisense RNA. Optionally, the RNA was again converted into cDNA, allowing for up to a third round of T7-mediated amplification to produce more antisense RNA. Thus the procedure provided for two or three rounds of in vitro transcription to produce the final RNA used for fluorescent labeling.

[0384] Fluorescent probes were generated by first adding control RNA to the antisense RNA mix, and producing fluorescently labeled cDNA from the RNA starting material. Fluorescently labeled cDNAs prepared from the tumor RNA sample were compared to fluorescently labeled cDNAs prepared from normal cell RNA sample. For example, the cDNA probes from the normal cells were labeled with Cy3 fluorescent dye (green) and the cDNA probes prepared from the tumor cells were labeled with Cy5 fluorescent dye (red), and vice versa.

[0385] Each array used had an identical spatial layout and control spot set. Each microarray was divided into two areas, each area having an array with, on each half, twelve groupings of 32×12 spots, for a total of about 9,216 spots on each array. The two areas are spotted identically which provide for at least two duplicates of each clone per array.

[0386] Polynucleotides for use on the arrays were obtained from both publicly available sources and from cDNA libraries generated from selected cell lines and patient tissues as described above and in Table 11. PCR products of from about 0.5 kb to 2.0 kb amplified from these sources were spotted onto the array using a Molecular Dynamics Gen III spotter according to the manufacturer's recommendations. The first row of each of the 24 regions on the array had about 32 control spots, including 4 negative control spots and 8 test polynucleotides. The test polynucleotides were spiked into each sample before the labeling reaction with a range of concentrations from 2-600 pg/slide and ratios of 1:1. For each array design, two slides were hybridized with the test samples reverse-labeled in the labeling reaction. This provided for about four duplicate measurements for each clone, two of one color and two of the other, for each sample.

[0387] The differential expression assay was performed by mixing equal amounts of probes from tumor cells and normal cells of the same patient. The arrays were prehybridized by incubation for about 2 hrs at 60° C. in 5×SSC/0.2% SDS/1 mM EDTA, and then washed three times in water and twice in isopropanol. Following prehybridization of the array, the probe mixture was then hybridized to the array under conditions of high stringency (overnight at 42° C. in 50% formamide, 5×SSC, and 0.2% SDS. After hybridization, the array was washed at 55° C three times as follows: 1) first wash in 1×SSC/0.2% SDS; 2) second wash in 0.1×SSC/0.2% SDS; and 3) third wash in 0.1×SSC.

[0388] The arrays were then scanned for green and red fluorescence using a Molecular Dynamics Generation III dual color laser-scanner/detector. The images were processed using BioDiscovery Autogene software, and the data from each scan set normalized to provide for a ratio of expression relative to normal. Data from the microarray experiments was analyzed according to the algorithms described in U.S. application serial no. 60/252,358, filed Nov. 20, 2000, by E. J. Moler, M. A. Boyle, and F. M. Randazzo, and entitled “Precision and accuracy in cDNA microarray data,”which application is specifically incorporated herein by reference.

[0389] The experiment was repeated, this time labeling the two probes with the opposite color in order to perform the assay in both “color directions.” Each experiment was sometimes repeated with two more slides (one in each color direction). The level fluorescence for each sequence on the array expressed as a ratio of the geometric mean of 8 replicate spots/genes from the four arrays or 4 replicate spots/gene from 2 arrays or some other permutation. The data were normalized using the spiked positive controls present in each duplicated area, and the precision of this normalization was included in the final determination of the significance of each differential. The fluorescent intensity of each spot was also compared to the negative controls in each duplicated area to determine which spots have detected significant expression levels in each sample.

[0390] A statistical analysis of the fluorescent intensities was applied to each set of duplicate spots to assess the precision and significance of each differential measurement, resulting in a p-value testing the null hypothesis that there is no differential in the expression level between the tumor and normal samples of each patient. During initial analysis of the microarrays, the hypothesis was accepted if p>10⁻³, and the differential ratio was set to 1.000 for those spots. All other spots have a significant difference in expression between the tumor and normal sample. If the tumor sample has detectable expression and the normal does not, the ratio is truncated at 1000 since the value for expression in the normal sample would be zero, and the ratio would not be a mathematically useful value (e.g., infinity). If the normal sample has detectable expression and the tumor does not, the ratio is truncated to 0.001, since the value for expression in the tumor sample would be zero and the ratio would not be a mathematically useful value. These latter two situations are referred to herein as “on/off.” Database tables were populated using a 95% confidence level (p>0.05).

[0391] Tables 12A-D summarizes the results of the differential expression analysis. Table 12 provides: (1) the spot identification number (“Spot ID”), an internal reference that serves as a unique identifier for the spot on the array; (2) the number of the Group (“Grp”) to which the gene is assigned (see Example 11 below); and (3) the ratio of expression of the gene in each of the patient samples, identified by the patient ID number (e.g., 15). This data represents the ratio of differential expression for the samples tested from that particular patient's tissues (e.g., “1RATIO15” is the ratio from the tissue samples of Patient ID no. 15). The ratios of differential expression are expressed as a normalized hybridization signal associated with the tumor probe divided by the normalized hybridization signal with the normal probe. Thus, a ratio greater than 1 indicates that the gene product is increased in expression in cancerous cells relative to normal cells, while a ratio of less than 1 indicates the opposite.

TABLE 12A

| | | | RATIO | RATIO | RATIO | RATIO | RATIO | RATIO | RATIO | RATIO | RATIO |
|---|---|---|---|---|---|---|---|---|---|---|---|
| Spot ID | Grp | Gene | 015 | 052 | 121 | 125 | 128 | 130 | 133 | 141 | 156 |
| 3295 | 1 | CGI-148 protein | 0.603 | 0.569 | 1.420 | 1.000 | 1.347 | 0.544 | 1.000 | 0.663 | 0.400 |
| 8491 | 1 | FHL3 | 1.000 | 1.000 | 10.786 | 6.347 | 4.580 | 2.918 | 5.331 | 1.000 | 2.771 |
| 10394 | 1 | CETN2 | 1.000 | 1.000 | 3.335 | 1.000 | 2.493 | 2.450 | 1.000 | 1.000 | 2.130 |
| 10638 | 1 | NQO2 | 1.000 | 1.000 | 2.522 | 1.720 | 2.495 | 1.000 | 1.748 | 1.000 | 2.018 |
| 17167 | 1 | TTK | 1.000 | 1.000 | 5.053 | 1.000 | 5.484 | 1.000 | 1.000 | 1.000 | 1.000 |
| 17168 | 1 | OGG1 | 1.389 | 1.000 | 1.736 | 1.000 | 2.525 | 1.000 | 2.339 | 1.000 | 1.162 |
| 17487 | 1 | MAPKAPK2 | 1.000 | 1.000 | 39.041 | 1.000 | 26.551 | 1.000 | 54.030 | 0.657 | 0.116 |
| 19871 | 1 | FGFR4 | 1.000 | 1.000 | 4.040 | 0.760 | 3.246 | 1.000 | 4.017 | 1.859 | 0.224 |
| 21711 | 1 | MARCKS | 1.000 | 1.000 | 21.440 | 1.294 | 10.369 | 1.000 | 20.040 | 1.000 | 1.000 |
| 27092 | 1 | MGC:29604 | 1.806 | 2.418 | 5.831 | 2.114 | 11.273 | 1.821 | 9.841 | 1.413 | 2.385 |
| 29171 | 1 | FLJ22066 | 1.000 | 1.000 | 184.016 | 0.728 | 52.758 | 0.849 | 145.030 | 1.000 | 0.015 |
| 30566 | 1 | FLJ22066 | 1.000 | 1.000 | 163.068 | 1.000 | 53.616 | 1.000 | 1.000 | 1.000 | 0.083 |
| 30831 | 1 | KIP2 | 0.723 | 1.000 | 2.349 | 1.000 | 1.972 | 1.000 | 1.000 | 1.437 | 0.626 |
| 30858 | 1 | BBS2 | 1.304 | 0.745 | 1.907 | 1.678 | 2.686 | 0.525 | 1.877 | 1.000 | 0.251 |
| 32956 | 1 | IGF2 | 1.105 | 1.000 | 20.747 | 1.000 | 10.458 | 1.000 | 1.000 | 1.000 | 0.476 |
| 33669 | 1 | IGF2 | 0.592 | 0.381 | 21.028 | 1.195 | 16.876 | 0.334 | 25.468 | 0.720 | 0.049 |
| 11573 | 2 | BIRC3 | 1.698 | 2.791 | 0.825 | 1.319 | 1.264 | 1.587 | 1.986 | 0.408 | 1.504 |
| 17365 | 2 | 1-8U; 1-8D; 9-27 | 3.113 | 2.893 | 1.229 | 4.848 | 3.307 | 4.004 | 9.166 | 1.000 | 1.769 |
| 18942 | 2 | ITAK | 4.489 | 7.386 | 1.000 | 6.655 | 4.507 | 5.485 | 12.390 | 1.000 | 2.281 |
| 21144 | 2 | 1-8U; 1-8D; 9-27 | 5.520 | 22.946 | 1.000 | 5.929 | 3.918 | 7.337 | 8.908 | 1.182 | 1.706 |

[0392] TABLE 12B

| | | | RATIO | RATIO | RATIO | RATIO | RATIO | RATIO | RATIO | RATIO | RATIO |
|---|---|---|---|---|---|---|---|---|---|---|---|
| Spot ID | Grp | Gene | 228 | 264 | 266 | 268 | 278 | 295 | 296 | 339 | 341 |
| 3295 | 1 | CGI-148 protein | 0.579 | 0.599 | 0.302 | 1.000 | 1.270 | 1.000 | 0.484 | 0.561 | 1.000 |
| 8491 | 1 | FHL3 | 1.000 | 1.000 | 1.000 | 12.583 | 4.691 | 1000.000 | 1000.000 | 3.136 | 7.320 |
| 10394 | 1 | CETN2 | 1.000 | 1.000 | 1.000 | 3.463 | 1.000 | 1.000 | 1000.000 | 1.000 | 4.065 |
| 10638 | 1 | 9 | 1.000 | 1.000 | 1.000 | 3.325 | 1.697 | 1.000 | 1000.000 | 1.000 | 3.036 |
| 17167 | 1 | TTK | 1.000 | 1.724 | 1.515 | 1.000 | 1.000 | 1.000 | 1000.000 | 1.000 | 5.355 |
| 17168 | 1 | OGG1 | 1.000 | 1.584 | 1.332 | 2.564 | 2.024 | 1.600 | 1.551 | 0.739 | 1.999 |
| 17487 | 1 | MAPKAPK2 | 1.000 | 1.000 | 1.206 | 43.580 | 23.642 | 2.085 | 1.000 | 0.545 | 18.309 |
| 19871 | 1 | FGFR4 | 1.619 | 1.992 | 1.000 | 4.407 | 3.989 | 1000.000 | 1.000 | 1.324 | 2.494 |
| 21711 | 1 | MARCKS | 1.000 | 1.000 | 1.192 | 13.283 | 1.000 | 2.161 | 1.000 | 0.638 | 1.000 |
| 27092 | 1 | MGC:29604 | 1.927 | 3.330 | 2.678 | 10.984 | 9.190 | 4.226 | 8.035 | 0.757 | 14.757 |
| 29171 | 1 | FLJ22066 | 1.000 | 1.760 | 1.000 | 186.617 | 83.660 | 4.242 | 1000.000 | 0.303 | 102.601 |
| 30566 | 1 | FLJ22066 | 1.596 | 1.430 | 1.000 | 108.781 | 51.686 | 1.000 | 1.000 | 0.530 | 50.061 |
| 30831 | 1 | KIP2 | 0.672 | 0.952 | 1.000 | 1.000 | 2.848 | 1.000 | 1.000 | 1.000 | 2.521 |
| 30858 | 1 | BBS2 | 1.393 | 1.547 | 1.431 | 2.272 | 1.440 | 1.000 | 1.000 | 1.000 | 2.180 |
| 32956 | 1 | IGF2 | 1.000 | 1.000 | 1.000 | 32.991 | 3.788 | 1.000 | 1.000 | 1.565 | 10.202 |
| 33669 | 1 | IGF2 | 0.566 | 0.380 | 0.196 | 14.331 | 4.654 | 0.298 | 0.237 | 0.508 | 11.442 |
| 11573 | 2 | BIRC3 | 1.000 | 1.645 | 1.000 | 1.283 | 1.667 | 1.408 | 2.084 | 1.000 | 1.000 |
| 17365 | 2 | 1-8U; 1-8D; 9-27 | 2.633 | 7.263 | 7.775 | 4.152 | 4.770 | 3.064 | 2.220 | 1.374 | 1.808 |
| 18942 | 2 | ITAK | 4.106 | 10.286 | 11.733 | 6.840 | 1.000 | 11.385 | 1.000 | 1.892 | 1.690 |
| 21144 | 2 | 1-8U; 1-8D; 9-27 | 5.027 | 8.086 | 8.148 | 3.902 | 7.228 | 5.159 | 1.000 | 2.787 | 1.569 |

[0393] TABLE 12C

| | | | RATIO | RATIO | RATIO | RATIO | RATIO | RATIO | RATIO | RATIO | RATIO |
|---|---|---|---|---|---|---|---|---|---|---|---|
| Spot ID | Grp | Gene | 356 | 392 | 393 | 413 | 517 | 546 | 577 | 784 | 786 |
| 3295 | 1 | CGI-148 protein | 0.503 | 0.816 | 0.692 | 0.649 | 0.200 | 1.000 | 1.000 | 0.662 | 0.532 |
| 8491 | 1 | FHL3 | 1.000 | 1.000 | 13.185 | 1.000 | 1000.000 | 3.131 | 5.278 | 1.000 | 1.000 |
| 10394 | 1 | CETN2 | 1000.000 | 1.000 | 3.015 | 1.000 | 1.000 | 1.000 | 1.000 | 1.000 | 1.000 |
| 10638 | 1 | NQO2 | 1.000 | 1.000 | 2.850 | 1.000 | 1.000 | 1.000 | 1.000 | 1.000 | 1.000 |
| 17167 | 1 | TTK | 1.000 | 1.000 | 5.355 | 1.000 | 1.000 | 1.000 | 3.158 | 1.092 | 1.898 |
| 17168 | 1 | OGG1 | 1.000 | 2.116 | 1.694 | 1.000 | 1.000 | 1.000 | 1.672 | 1.701 | 1.000 |
| 17487 | 1 | MAPKAPK2 | 1.556 | 51.316 | 43.253 | 0.516 | 1.412 | 0.813 | 1.000 | 1.000 | 1.000 |
| 19871 | 1 | FGFR4 | 1.000 | 2.284 | 4.041 | 1.000 | 3.005 | 2.185 | 1.000 | 1.000 | 3.307 |
| 21711 | 1 | MARCKS | 1.000 | 32.171 | 26.574 | 0.814 | 1.000 | 1.000 | 1.347 | 1.000 | 1.000 |
| 27092 | 1 | MGC:29604 | 7.284 | 12.948 | 8.685 | 1.742 | 1.451 | 2.296 | 3.357 | 1.329 | 2.919 |
| 29171 | 1 | FLJ22066 | 1.000 | 218.198 | 197.610 | 0.330 | 1.657 | 0.749 | 1.000 | 1.000 | 1.790 |
| 30566 | 1 | FLJ22066 | 1.000 | 264.417 | 157.238 | 0.293 | 1.300 | 1.000 | 1.220 | 2.785 | 1.000 |
| 30831 | 1 | KIP2 | 1.000 | 1.997 | 1.964 | 1.000 | 1.379 | 1.119 | 0.753 | 1.972 | 1.000 |
| 30858 | 1 | BBS2 | 0.519 | 3.152 | 2.475 | 3.013 | 0.449 | 1.000 | 0.662 | 1.339 | 1.000 |
| 32956 | 1 | IGF2 | 1.475 | 25.053 | 23.953 | 1.000 | 1.529 | 1.430 | 1.600 | 1.430 | 1.713 |
| 33669 | 1 | IGF2 | 0.412 | 24.283 | 30.632 | 0.564 | 0.214 | 0.853 | 0.381 | 0.551 | 0.506 |
| 11573 | 2 | BIRC3 | 1.000 | 1.199 | 1.768 | 1.000 | 1.485 | 1.000 | 1.429 | 1.000 | 1.648 |
| 17365 | 2 | 1-8U; 1-8D; 9-27 | 3.636 | 9.985 | 7.293 | 2.980 | 4.484 | 3.107 | 4.362 | 1.645 | 4.670 |
| 18942 | 2 | ITAK | 12.611 | 16.163 | 7.279 | 3.603 | 6.904 | 4.196 | 7.792 | 1.000 | 8.475 |
| 21144 | 2 | 1-8U; 1-8D; 9-27 | 10.080 | 18.239 | 8.395 | 2.839 | 6.176 | 3.328 | 5.636 | 2.142 | 7.000 |

[0394] TABLE 12D

| | | | RATIO | RATIO | RATIO | RATIO |
|---|---|---|---|---|---|---|
| Spot ID | Grp | Gene | 791 | 888 | 889 | 890 |
| 3295 | 1 | CGI-148 protein | 0.495 | 0.574 | 0.483 | 0.711 |
| 8491 | 1 | FHL3 | 1.000 | 1.000 | 1.000 | 5.465 |
| 10394 | 1 | CETN2 | 1.000 | 2.970 | 1.000 | 2.848 |
| 10638 | 1 | NQO2 | 1.000 | 1.511 | 1.000 | 2.158 |
| 17167 | 1 | TTK | 1.000 | 1.000 | 1.000 | 2.290 |
| 17168 | 1 | OGG1 | 1.000 | 1.000 | 1.000 | 1.519 |
| 17487 | 1 | MAPKAPK2 | 1.000 | 1.449 | 1.000 | 1.516 |
| 19871 | 1 | FGFR4 | 1.000 | 1.988 | 0.646 | 4.007 |
| 21711 | 1 | MARCKS | 1.000 | 1.397 | 1.000 | 1.000 |
| 27092 | 1 | MGC:29604 | 3.771 | 1.890 | 2.788 | 1.799 |
| 29171 | 1 | FLJ22066 | 1.000 | 1.000 | 7.569 | 2.512 |
| 30566 | 1 | FLJ22066 | 1.000 | 2.624 | 1.000 | 1.713 |
| 30831 | 1 | KIP2 | 1.000 | 1.000 | 1.000 | 4.213 |
| 30858 | 1 | BBS2 | 0.749 | 2.316 | 0.506 | 1.000 |
| 32956 | 1 | IGF2 | 1.486 | 1.633 | 1.000 | 1.491 |
| 33669 | 1 | IGF2 | 0.474 | 0.842 | 2.502 | 0.736 |
| 11573 | 2 | BIRC3 | 2.502 | 0.781 | 1.314 | 1.000 |
| 17365 | 2 | 1-8U; 1-8D; 9-27 | 8.576 | 2.723 | 3.553 | 11.697 |
| 18942 | 2 | ITAK | 10.189 | 2.909 | 4.165 | 11.972 |
| 21144 | 2 | 1-8U; 1-8D; 9-27 | 14.444 | 2.712 | 7.659 | 11.467 |

[0395] These data provide evidence that the genes represented by the polynucleotides having the indicated sequences are differentially expressed in colon cancer as compared to normal non-cancerous colon tissue.

### Example 11

### Stratification of Colon Cancers Using Differential Expression Data

[0396] Groups of genes with differential expression data correlating with specific genes of interest can be identified using statistical analysis such as the Student t-test and Spearman rank correlation (Stanton Glantz (1997) Primer of Bio-Statistics, McGraw Hill, pp 65-107, 256-262). Using these statistical tests, patients having tumors that exhibit similar differential expression patterns can be assigned to Groups. At least two Groups were identified, and are described below.

[0397] Group 1

[0398] Genes That Exhibit Differential Expression in Colon Cancer in a Pattern that Correlates with IGF2

[0399] Using both the Student-t test and the Spearman rank correlation test, the differential expression data of IGF2 correlated with that of 14 distinct genes: TTK, MAPKAPK2, MARCKS, BBS2, CETN2 CGI-148 protein, FGFR4, FHL3, FLJ22066, KIP2, MGC:29604, NQO2, and OGG1 (see Table 12). The differential expression data for these genes is presented in graphical form in FIGS. 2-17. This group was identified as Group 1. IGF2 is a secreted protein and has been reported to be involved in colon as well as other cancers (Toretsky J A and Helman L J (1996) J Endocrinol 149(3):367-72). Genes whose expression patterns correlate with IGF2 may provide a mechanism for the involvement of IGF2 in cancer. Among the genes in Group 1 are genes such as TTK (a kinase implicated in mitotic spindle check point), MAP-KAP kinase 2 (mitogen-activated protein (MAP) kinase activated protein kinase 2), and MARCKS (myristoylated alanine-rich C kinase substrate, which is a substrate of protein kinase C). The protein products of these genes and their associated signaling pathways can be targets for small molecule drug development for anti-cancer therapy. Furthermore, the upregulation of IGF2 can be a criterion for selecting patients who will benefit from anti-cancer therapy targeted to the genes in Group 1 and their associated pathway components.

[0400] Group 2

[0401] Genes that Exhibit Differential Expression in Colon Cancer in a Pattern that Correlates Interferon Induced Transmembrane (IFITM) Protein Family

[0402] Using the Spearman rank correlation test, the differential expression data of the IFITM family (1-8U; 1-8D; 9-27) correlated with that of 2 other genes: ITAK and BIRC3/H-IAP1 (see Table 12). The differential expression data for these genes is presented in graphical form in FIGS. 18-21. This group was identified as Group 2. 1-8U/IFITM3 was previously reported as a gene differentially upregulated in ulcerative-colitis-associated colon cancer (Hisamatsu et al (1999) Cancer Research 59, 5927-5931). Genes whose expression patterns correlate with 1-8U/IFITM3 and its family members may provide a mechanism for the involvement of inflammation in colon cancer. There are at least 3 members of the IFITM family: 9-27/IFITM1, 1-8D/IFITM2 and 1-8U/IFITM3. The polynucleotides used for the detection of 1-8U/IFITM3 are within a domain that is highly conserved among the 3 members. Therefore, the upregulation detected by the corresponding microarray spots may indicate the upregulation of one or multiple members within the family. Among the genes in Group 2 are ITAK (IL-1, TNF alpha activated kinase) and BIRC3/H-IAP1 (human inhibitor of apoptosis 1). The protein products of these genes and their associated signaling pathways can be targets for small molecule drug development for anti-cancer therapy. Furthermore, the upregulation of the IFITM can be a criterion for selecting patients who will benefit from anti-cancer therapy targeted to the genes in Group 2 and their associated pathway components.

### Example 12

### Antisense Regulation of Gene Expression

[0403] The expression of the differentially expressed genes represented by the polynucleotides in the cancerous cells can be analyzed using antisense knockout technology to confirm the role and function of the gene product in tumorigenesis, e.g., in promoting a metastatic phenotype.

[0404] A number of different oligonucleotides complementary to the mRNA generated by the differentially expressed genes identified herein can be designed as potential antisense oligonucleotides, and tested for their ability to suppress expression of the genes. Sets of antisense oligomers specific to each candidate target are designed using the sequences of the polynucleotides corresponding to a differentially expressed gene and the software program HYBsimulator Version 4 (available for Windows 95/Windows NT or 5 for Power Macintosh, RNAture, Inc. 1003 Health Sciences Road, West, Irvine, Calif. 92612 USA). Factors that are considered when designing antisense oligonucleotides include: 1) the secondary structure of oligonucleotides; 2) the secondary structure of the target gene; 3) the specificity with no or minimum cross-hybridization to other expressed genes; 4) stability; 5) length and 6) terminal GC content. The antisense oligonucleotide is designed so that it will hybridize to its target sequence under conditions of high stringency at physiological temperatures (e.g., an optimal temperature for the cells in culture to provide for hybridization in the cell, e.g., about 37° C.), but with minimal formation of homodimers.

[0405] Using the sets of oligomers and the HYBsimulator program, three to ten antisense oligonucleotides and their reverse controls are designed and synthesized for each candidate mRNA transcript, which transcript is obtained from the gene corresponding to the target polynucleotide sequence of interest. Once synthesized and quantitated, the oligomers are screened for efficiency of a transcript knock-out in a panel of cancer cell lines. The efficiency of the knock-out is determined by analyzing mRNA levels using lightcycler quantification. The oligomers that resulted in the highest level of transcript knock-out, wherein the level was at least about 50%, preferably about 80-90%, up to 95% or more up to undetectable message, are selected for use in a cell-based proliferation assay, an anchorage independent growth assay, and an apoptosis assay.

[0406] The ability of each designed antisense oligonucleotide to inhibit gene expression is tested through transfection into SW620 colon carcinoma cells. For each transfection mixture, a carrier molecule (such as a lipid, lipid derivative, lipid-like molecule, cholesterol, cholesterol derivative, or cholesterol-like molecule) is prepared to a working concentration of 0.5 mM in water, sonicated to yield a uniform solution, and filtered through a 0.45 μm PVDF membrane. The antisense or control oligonucleotide is then prepared to a working concentration of 100 μM in sterile Millipore water. The oligonucleotide is further diluted in OptiMEM™ (Gibco/BRL), in a microfuge tube, to 2 μM, or approximately 20 μg oligo/ml of OptiMEM™. In a separate microfuge tube, the carrier molecule, typically in the amount of about 1.5-2 nmol carrier/μg antisense oligonucleotide, is diluted into the same volume of OptiMEM™ used to dilute the oligonucleotide. The diluted antisense oligonucleotide is immediately added to the diluted carrier and mixed by pipetting up and down. Oligonucleotide is added to the cells to a final concentration of 30 nM.

[0407] The level of target mRNA that corresponds to a target gene of interest in the transfected cells is quantitated in the cancer cell lines using the Roche LightCycler™ real-time PCR machine. Values for the target mRNA are normalized versus an internal control (e.g., beta-actin). For each 20 μl reaction, extracted RNA (generally 0.2-1 μg total) is placed into a sterile 0.5 or 1.5 ml microcentrifuge tube, and water is added to a total volume of 12.5 μl. To each tube is added 7.5 μl of a buffer/enzyme mixture, prepared by mixing (in the order listed) 2.5 μl H₂O, 2.0 μl 10× reaction buffer, 10 μl oligo dT (20 pmol), 1.0 μl dNTP mix (10 mM each), 0.5 μl RNAsin® (20 u) (Ambion, Inc., Hialeah, Fla.), and 0.5 μl MMLV reverse transcriptase (50 u) (Ambion, Inc.). The contents are mixed by pipetting up and down, and the reaction mixture is incubated at 42° C. for 1 hour. The contents of each tube are centrifuged prior to amplification.

[0408] An amplification mixture is prepared by mixing in the following order: 1× PCR buffer II, 3 mM MgCl₂, 140 μM each dNTP, 0.175 pmol each oligo, 1:50,000 dil of SYBR® Green, 0.25 mg/ml BSA, 1 unit Taq polymerase, and H₂O to 20 μl. (PCR buffer II is available in 10× concentration from Perkin-Elmer, Norwalk, Conn.). In 1× concentration it contains 10 mM Tris pH 8.3 and 50 mM KCl. SYBR® Green (Molecular Probes, Eugene, Oreg.) is a dye which fluoresces when bound to double stranded DNA. As double stranded PCR product is produced during amplification, the fluorescence from SYBR® Green increases. To each 20 μl aliquot of amplification mixture, 2 μl of template RT is added, and amplification is carried out according to standard protocols. The results are expressed as the percent decrease in expression of the corresponding gene product relative to non-transfected cells, vehicle-only transfected (mock-transfected) cells, or cells transfected with reverse control oligonucleotides.

### Example 13

### Effect of Expression on Proliferation

[0409] The effect of gene expression on the inhibition of cell proliferation can be assessed in metastatic breast cancer cell lines (MDA-MB-231 (“231”)); SW620 colon colorectal carcinoma cells; SKOV3 cells (a human ovarian carcinoma cell line); or LNCaP, PC3, 22Rv1, MDA-PCA-2b, or DU145 prostate cancer cells.

[0410] Cells are plated to approximately 60-80% confluency in 96-well dishes. Antisense or reverse control oligonucleotide is diluted to 2 μM in OptiMEM™. The oligonucleotide-OptiMEM™ can then be added to a delivery vehicle, which delivery vehicle can be selected so as to be optimized for the particular cell type to be used in the assay. The oligo/delivery vehicle mixture is then further diluted into medium with serum on the cells. The final concentration of oligonucleotide for all experiments can be about 300 nM.

[0411] Antisense oligonucleotides are prepared as described above (see Example 12). Cells are transfected overnight at 37° C. and the transfection mixture is replaced with fresh medium the next morning. Transfection is carried out as described above in Example 12.

[0412] Those antisense oligonucleotides that result in inhibition of proliferation of SW620 cells indicate that the corresponding gene plays a role in production or maintenance of the cancerous phenotype in cancerous colon cells. Those antisense oligonucleotides that inhibit proliferation in SKOV3 cells represent genes that play a role in production or maintenance of the cancerous phenotype in cancerous breast cells. Those antisense oligonucleotides that result in inhibition of proliferation of MDA-MB-231 cells indicate that the corresponding gene plays a role in production or maintenance of the cancerous phenotype in cancerous ovarian cells. Those antisense oligonucleotides that inhibit proliferation in LNCaP, PC3, 22Rvl, MDA-PCA-2b, or DU145 cells represent genes that play a role in production or maintenance of the cancerous phenotype in cancerous prostate cells.

### Example 14

### Effect of Gene Expression on cell Migration

[0413] The effect of gene expression on the inhibition of cell migration can be assessed in SW620 colon cancer cells using static endothelial cell binding assays, non-static endothelial cell binding assays, and transmigration assays.

[0414] For the static endothelial cell binding assay, antisense oligonucleotides are prepared as described above (see Example 12). Two days prior to use, colon cancer cells (CaP) are plated and transfected with antisense oligonucleotide as described above (see Examples 4 and 5). On the day before use, the medium is replaced with fresh medium, and on the day of use, the medium is replaced with fresh medium containing 2 μM CellTracker green CMFDA (Molecular Probes, Inc.) and cells are incubated for 30 min. Following incubation, CaP medium is replaced with fresh medium (no CMFDA) and cells are incubated for an additional 30-60 min. CaP cells are detached using CMF PBS/2.5 mM EDTA or trypsin, spun and resuspended in DMEM/1% BSA/10 mM HEPES pH 7.0. Finally, CaP cells are counted and resuspended at a concentration of 1×10⁶ cells/ml.

[0415] Endothelial cells (EC) are plated onto 96-well plates at 40-50% confluence 3 days prior to use. On the day of use, EC are washed 1× with PBS and 50λ DMDM/1%BSA/10mM HEPES pH 7 is added to each well. To each well is then added 50K (50□) CaP cells in DMEM/1% BSA/10 mM HEPES pH 7. The plates are incubated for an additional 30 min and washed 5× with PBS containing Ca⁺⁺ and Mg⁺⁺. After the final wash, 100 μL PBS is added to each well and fluorescence is read on a fluorescent plate reader (Ab492/Em 516 nm).

[0416] For the non-static endothelial cell binding assay, CaP are prepared as described above. EC are plated onto 24-well plates at 30-40% confluence 3 days prior to use. On the day of use, a subset of EC are treated with cytokine for 6 hours then washed 2× with PBS. To each well is then added 150-200K CaP cells in DMEM/1% BSA/10 mM HEPES pH 7. Plates are placed on a rotating shaker (70 RPM) for 30 min and then washed 3× with PBS containing Ca⁺⁺ and Mg⁺⁺. After the final wash, 500 μL PBS is added to each well and fluorescence is read on a fluorescent plate reader (Ab492/Em 516 nm).

[0417] For the transmigration assay, CaP are prepared as described above with the following changes. On the day of use, CaP medium is replaced with fresh medium containing 5 μM CellTracker green CMFDA (Molecular Probes, Inc.) and cells are incubated for 30 min. Following incubation, CaP medium is replaced with fresh medium (no CMFDA) and cells are incubated for an additional 30-60 min. CaP cells are detached using CMF PBS/2.5 mM EDTA or trypsin, spun and resuspended in EGM-2-MV medium. Finally, CaP cells are counted and resuspended at a concentration of 1×10⁶ cells/ml.

[0418] EC are plated onto FluorBlok transwells (BD Biosciences) at 30-40% confluence 5-7 days before use. Medium is replaced with fresh medium 3 days before use and on the day of use. To each transwell is then added 50K labeled CaP. 30 min prior to the first fluorescence reading, 10 μg of FITC-dextran (10K MW) is added to the EC plated filter. Fluorescence is then read at multiple time points on a fluorescent plate reader (Ab492/Em 516 nm).

[0419] Those antisense oligonucleotides that result in inhibition of binding of SW620 colon cancer cells to endothelial cells indicate that the corresponding gene plays a role in the production or maintenance of the cancerous phenotype in cancerous colon cells. Those antisense oligonucleotides that result in inhibition of endothelial cell transmigration by SW620 colon cancer cells indicate that the corresponding gene plays a role in the production or maintenance of the cancerous phenotype in cancerous colon cells.

### Example 15

### Effect of Gene Expression on Colony Formation

[0420] The effect of gene expression upon colony formation of SW620 cells, SKOV3 cells, MD-MBA-231 cells, LNCaP cells, PC3 cells, 22Rvl cells, MDA-PCA-2b cells, and DU145 cells can be tested in a soft agar assay. Soft agar assays are conducted by first establishing a bottom layer of 2 ml of 0.6% agar in media plated fresh within a few hours of layering on the cells. The cell layer is formed on the bottom layer by removing cells transfected as described above from plates using 0.05% trypsin and washing twice in media. The cells are counted in a Coulter counter, and resuspended to 10⁶ per ml in media. 10 μl aliquots are placed with media in 96-well plates (to check counting with WST1), or diluted further for the soft agar assay. 2000 cells are plated in 800 μl 0.4% agar in duplicate wells above 0.6% agar bottom layer. After the cell layer agar solidifies, 2 ml of media is dribbled on top and antisense or reverse control oligo (produced as described in Example 12) is added without delivery vehicles. Fresh media and oligos are added every 3-4 days. Colonies form in 10 days to 3 weeks. Fields of colonies are counted by eye. Wst-1 metabolism values can be used to compensate for small differences in starting cell number. Larger fields can be scanned for visual record of differences.

[0421] Those antisense oligonucleotides that result in inhibition of colony formation of SW620 cells indicate that the corresponding gene plays a role in production or maintenance of the cancerous phenotype in cancerous colon cells. Those antisense oligonucleotides that inhibit colony formation in SKOV3 cells represent genes that play a role in production or maintenance of the cancerous phenotype in cancerous breast cells. Those antisense oligonucleotides that result in inhibition of colony formation of MDA-MB-231 cells indicate that the corresponding gene plays a role in production or maintenance of the cancerous phenotype in cancerous ovarian cells. Those antisense oligonucleotides that inhibit colony formation in LNCaP, PC3, 22Rvl, MDA-PCA-2b, or DU145 cells represent genes-that play a role in production or maintenance of the cancerous phenotype in cancerous prostate cells.

### Example 16

### Induction of Cell Death Upon Depletion of Polypeptides by Depletion of mRNA (“Antisense Knockout”)

[0422] In order to assess the effect of depletion of a target message upon cell death, SW620 cells, or other cells derived from a cancer of interest, can be transfected for proliferation assays. For cytotoxic effect in the presence of cisplatin (cis), the same protocol is followed but cells are left in the presence of 2 μM drug. Each day, cytotoxicity is monitored by measuring the amount of LDH enzyme released in the medium due to membrane damage. The activity of LDH is measured using the Cytotoxicity Detection Kit from Roche Molecular Biochemicals. The data is provided as a ratio of LDH released in the medium vs. the total LDH present in the well at the same time point and treatment (rLDH/tLDH). A positive control using antisense and reverse control oligonucleotides for BCL2 (a known anti-apoptotic gene) is included; loss of message for BCL2 leads to an increase in cell death compared with treatment with the control oligonucleotide (background cytotoxicity due to transfection).

### Example 17

### Functional Analysis Gene Products Differentially Expressed in Colon Cancer Patients

[0423] The gene products of sequences of a gene differentially expressed in cancerous cells can be further analyzed to confirm the role and function of the gene product in tumorigenesis, e.g., in promoting or inhibiting development of a metastatic phenotype. For example, the function of gene products corresponding to genes identified herein can be assessed by blocking function of the gene products in the cell. For example, where the gene product is secreted or associated with a cell surface membrane, blocking antibodies can be generated and added to cells to examine the effect upon the cell phenotype in the context of, for example, the transformation of the cell to a cancerous, particularly a metastatic, phenotype. In order to generate antibodies, a clone corresponding to a selected gene product is selected, and a sequence that represents a partial or complete coding sequence is obtained. The resulting clone is expressed, the polypeptide produced isolated, and antibodies generated. The antibodies are then combined with cells and the effect upon tumorigenesis assessed.

[0424] Where the gene product of the differentially expressed genes identified herein exhibits sequence homology to a protein of known function (e.g., to a specific kinase or protease) and/or to a protein family of known function (e.g., contains a domain or other consensus sequence present in a protease family or in a kinase family), then the role of the gene product in tumorigenesis, as well as the activity of the gene product, can be examined using small molecules that inhibit or enhance function of the corresponding protein or protein family.

[0425] Additional functional assays include, but are not necessarily limited to, those that analyze the effect of expression of the corresponding gene upon cell cycle and cell migration. Methods for performing such assays are well known in the art.

### Example 18

### Contig Assembly and Additional Gene Characterization

[0426] The sequences of the polynucleotides provided in the present invention can be used to extend the sequence information of the gene to which the polynucleotides correspond (e.g., a gene, or mRNA encoded by the gene, having a sequence of the polynucleotide described herein). This expanded sequence information can in turn be used to further characterize the corresponding gene, which in turn provides additional information about the nature of the gene product (e.g., the normal function of the gene product). The additional information can serve to provide additional evidence of the gene product's use as a therapeutic target, and provide further guidance as to the types of agents that can modulate its activity.

[0427] In one example, a contig is assembled using a sequence of a polynucleotide of the present invention, which is present in a clone. A “contig” is a contiguous sequence of nucleotides that is assembled from nucleic acid sequences having overlapping (e.g., shared or substantially similar) sequence information. The sequences of publicly-available ESTs (Expressed Sequence Tags) and the sequences of various clones from several cDNA libraries synthesized at Chiron can be used in the contig assembly.

[0428] The contig is assembled using the software program Sequencher, version 4.05, according to the manufacturer's instructions and an overview alignment of the contiged sequences is produced. The sequence information obtained in the contig assembly can then be used to obtain a consensus sequence derived from the contig using the Sequencher program. The consensus sequence is used as a query sequence in a TeraBLASTN search of the DGTI DoubleTwist-Gene Index (DoubleTwist, Inc., Oakland, Calif.), which contains all the EST and non-redundant sequence in public databases.

[0429] Through contig assembly and the use of homology searching software programs, the sequence information provided herein can be readily extended to confirm, or confirm a predicted, gene having the sequence of the polynucleotides described in the present invention. Further the information obtained can be used to identify the function of the gene product of the gene corresponding to the polynucleotides described herein. While not necessary to the practice of the invention, identification of the function of the corresponding gene, can provide guidance in the design of therapeutics that target the gene to modulate its activity and modulate the cancerous phenotype (e.g., inhibit metastasis, proliferation, and the like).

### Example 19

### Source of Biological Materials

[0430] The biological materials used in the experiments that led to the present invention are described below.

[0431] Source of Patient Tissue Samples

[0432] Normal and cancerous tissues were collected from patients using laser capture microdisection (LCM) techniques, which techniques are well known in the art (see, e.g., Ohyama et al. (2000) Biotechniques 29:530-6; Curran et al. (2000) Mol. Pathol. 53:64-8; Suarez-Quian et al. (1999) Biotechniques 26:328-35; Simone et al. (1998) Trends Genet 14:272-6; Conia et al. (1997) J. Clin. Lab. Anal. 11:28-38; Emmert-Buck et al. (1996) Science 274:998-1001). Table 13 below provides information about each patient from which the prostate tissue samples were isolated, including: 1) the “Patient ID”, which is a number assigned to the patient for identification purposes; 2) the “Tissue Type”; and 3) the “Gleason Grade” of the tumor. Hisopathology of all primary tumors indicated the tumor was adenocarcinoma.

TABLE 13
Prostate patient data.

| | | Gleason |
|---|---|---|
| Patient ID | Tissue Type | Grade |
| 93 | Prostate Cancer | 3 + 4 |
| 94 | Prostate Cancer | 3 + 3 |
| 95 | Prostate Cancer | 3 + 3 |
| 96 | Prostate Cancer | 3 + 3 |
| 97 | Prostate Cancer | 3 + 2 |
| 100 | Prostate Cancer | 3 + 3 |
| 101 | Prostate Cancer | 3 + 3 |
| 104 | Prostate Cancer | 3 + 3 |
| 105 | Prostate Cancer | 3 + 4 |
| 106 | Prostate Cancer | 3 + 3 |
| 138 | Prostate Cancer | 3 + 3 |
| 151 | Prostate Cancer | 3 + 3 |
| 153 | Prostate Cancer | 3 + 3 |
| 155 | Prostate Cancer | 4 + 3 |
| 171 | Prostate Cancer | 3 + 4 |
| 173 | Prostate Cancer | 3 + 4 |
| 231 | Prostate Cancer | 3 + 4 |
| 232 | Prostate Cancer | 3 + 3 |
| 251 | Prostate Cancer | 3 + 4 |
| 282 | Prostate Cancer | 4 + 3 |
| 286 | Prostate Cancer | 3 + 3 |
| 294 | Prostate Cancer | 3 + 4 |
| 351 | Prostate Cancer | 5 + 4 |
| 361 | Prostate Cancer | 3 + 3 |
| 362 | Prostate Cancer | 3 + 3 |
| 365 | Prostate Cancer | 3 + 2 |
| 368 | Prostate Cancer | 3 + 3 |
| 379 | Prostate Cancer | 3 + 4 |
| 388 | Prostate Cancer | 5 + 3 |
| 391 | Prostate Cancer | 3 + 3 |
| 420 | Prostate Cancer | 3 + 3 |
| 425 | Prostate Cancer | 3 + 3 |
| 428 | Prostate Cancer | 4 + 3 |
| 431 | Prostate Cancer | 3 + 4 |
| 492 | Prostate Cancer | 3 + 3 |
| 493 | Prostate Cancer | 3 + 4 |
| 496 | Prostate Cancer | 3 + 3 |
| 510 | Prostate Cancer | 3 + 3 |
| 511 | Prostate Cancer | 4 + 3 |
| 514 | Prostate Cancer | 3 + 3 |
| 549 | Prostate Cancer | 3 + 3 |
| 552 | Prostate Cancer | 3 + 3 |
| 858 | Prostate Cancer | 3 + 4 |
| 859 | Prostate Cancer | 3 + 4 |
| 864 | Prostate Cancer | 3 + 4 |
| 883 | Prostate Cancer | 4 + 4 |
| 895 | Prostate Cancer | 3 + 3 |
| 901 | Prostate Cancer | 3 + 3 |
| 909 | Prostate Cancer | 3 + 3 |
| 921 | Prostate Cancer | 3 + 3 |
| 923 | Prostate Cancer | 4 + 3 |
| 934 | Prostate Cancer | 3 + 3 |
| 1134 | Prostate Cancer | 3 + 4 |
| 1135 | Prostate Cancer | 3 + 3 |
| 1136 | Prostate Cancer | 3 + 4 |
| 1137 | Prostate Cancer | 3 + 3 |
| 1138 | Prostate Cancer | 4 + 3 |

[0433] Source of Polynucleotides on Arrays

[0434] Polynucleotides for use on the arrays were obtained from both publicly available sources and from cDNA libraries generated from selected cell lines and patient tissues. Table 14 provides information about the polynucleotides on the arrays including: 1) the “SEQ ID NO” assigned to each sequence for use in the present specification; 2) the spot identification number (“Spot ID”), an internal reference that serves as a unique identifier for the spot on the array; 3) the “Sequence Name” assigned to each sequence; and 4) the “Sample Name or Clone Name” assigned to the sample or clone from which the sequence was isolated. The sequences corresponding to the SEQ ID NOS are provided in the Sequence Listing.

[0435] Characterization of Sequences

[0436] The sequences of the isolated polynucleotides were first masked to eliminate low complexity sequences using the RepeatMasker masking program, publicly available through a web site supported by the University of Washington (See also Smit, A. F. A. and Green, P., unpublished results). Generally, masking does not influence the final search results, except to eliminate sequences of relative little interest due to their low complexity, and to eliminate multiple “hits” based on similarity to repetitive regions common to multiple sequences, e.g., Alu repeats. Masking resulted in the elimination of several sequences.

[0437] The remaining sequences of the isolated polynucleotides were used in a homology search of the GenBank database using the TeraBLAST program (TimeLogic, Crystal Bay, Nev.), a DNA and protein sequence homology searching algorithm. TeraBLAST is a version of the publicly available BLAST search algorithm developed by the National Center for Biotechnology, modified to operate at an accelerated speed with increased sensitivity on a specialized computer hardware platform. The program was run with the default parameters recommended by TimeLogic to provide the best sensitivity and speed for searching DNA and protein sequences. Gene assignment for the query sequences was determined based on best hit form the GenBank database; expectancy values are provided with the hit.

[0438] Summary of TeraBLAST Search Results

[0439] Tables 15 and 16 provide information about the gene corresponding to each polynucleotide. Tables 15 and 16 include: 1) the spot identification number (“Spot ID”); 2) the GenBank Accession Number of the publicly available sequence corresponding to the polynucleotide (“GenBankHit”); 3) a description of the GenBank sequence (“GenBankDesc”); and 4) the score of the similarity of the polynucleotide sequence and the GenBank sequence (“GenBankScore”). The published information for each GenBank and EST description, as well as the corresponding sequence identified by the provided accession number, are incorporated herein by reference.

### Example 20

### Detection of Differential Expression Using Arrays

[0440] cDNA probes were prepared from total RNA isolated from the patient cells described above. Since LCM provides for the isolation of specific cell types to provide a substantially homogenous cell sample, this provided for a similarly pure RNA sample.

[0441] Total RNA was first reverse transcribed into cDNA using a primer containing a T7 RNA polymerase promoter, followed by second strand DNA synthesis. cDNA was then transcribed in vitro to produce antisense RNA using the T7 promoter-mediated expression (see, e.g., Luo et al. (1999) Nature Med 5:117-122), and the antisense RNA was then converted into cDNA. The second set of cDNAs were again transcribed in vitro, using the T7 promoter, to provide antisense RNA. Optionally, the RNA was again converted into cDNA, allowing for up to a third round of T7-mediated amplification to produce more antisense RNA. Thus the procedure provided for two or three rounds of in vitro transcription to produce the final RNA used for fluorescent labeling.

[0442] Fluorescent probes were generated by first adding control RNA to the antisense RNA mix, and producing fluorescently labeled cDNA from the RNA starting material. Fluorescently labeled cDNAs prepared from the tumor RNA sample were compared to fluorescently labeled cDNAs prepared from normal cell RNA sample. For example, the cDNA probes from the normal cells were labeled with Cy3 fluorescent dye (green) and the cDNA probes prepared from the tumor cells were labeled with Cy5 fluorescent dye (red), and vice versa.

[0443] Each array used had an identical spatial layout and control spot set. Each microarray was divided into two areas, each area having an array with, on each half, twelve groupings of 32×12 spots, for a total of about 9,216 spots on each array. The two areas are spotted identically which provide for at least two duplicates of each clone per array.

[0444] Polynucleotides for use on the arrays were obtained from both publicly available sources and from cDNA libraries generated from selected cell lines and patient tissues as described above and in Table 14. PCR products of from about 0.5 kb to 2.0 kb amplified from these sources were spotted onto the array using a Molecular Dynamics Gen III spotter according to the manufacturer's recommendations. The first row of each of the 24 regions on the array had about 32 control spots, including 4 negative control spots and 8 test polynucleotides. The test polynucleotides were spiked into each sample before the labeling reaction with a range of concentrations from 2-600 pg/slide and ratios of 1:1. For each array design, two slides were hybridized with the test samples reverse-labeled in the labeling reaction. This provided for about four duplicate measurements for each clone, two of one color and two of the other, for each sample.

[0445] The differential expression assay was performed by mixing equal amounts of probes from tumor cells and normal cells of the same patient. The arrays were prehybridized by incubation for about 2 hrs at 60° C. in 5×SSC/0.2% SDS/1 mM EDTA, and then washed three times in water and twice in isopropanol. Following prehybridization of the array, the probe mixture was then hybridized to the array under conditions of high stringency (overnight at 42° C. in 50% formamide, 5×SSC, and 0.2% SDS. After hybridization, the array was washed at 55° C. three times as follows: 1) first wash in 1×SSC/0.2% SDS; 2) second wash in 0.1×SSC/0.2% SDS; and 3) third wash in 0.1×SSC.

[0446] The arrays were then scanned for green and red fluorescence using a Molecular Dynamics Generation III dual color laser-scanner/detector. The images were processed using BioDiscovery Autogene software, and the data from each scan set normalized to provide for a ratio of expression relative to normal. Data from the microarray experiments was analyzed according to the algorithms described in U.S. application Ser. No. 60/252,358, filed Nov. 20, 2000, by E. J. Moler, M. A. Boyle, and F. M. Randazzo, and entitled “Precision and accuracy in cDNA microarray data,” which application is specifically incorporated herein by reference.

[0447] The experiment was repeated, this time labeling the two probes with the opposite color in order to perform the assay in both “color directions.” Each experiment was sometimes repeated with two more slides (one in each color direction). The level fluorescence for each sequence on the array expressed as a ratio of the geometric mean of 8 replicate spots/genes from the four arrays or 4 replicate spots/gene from 2 arrays or some other permutation. The data were normalized using the spiked positive controls present in each duplicated area, and the precision of this normalization was included in the final determination of the significance of each differential. The fluorescent intensity of each spot was also compared to the negative controls in each duplicated area to determine which spots have detected significant expression levels in each sample.

[0448] A statistical analysis of the fluorescent intensities was applied to each set of duplicate spots to assess the precision and significance of each differential measurement, resulting in a p-value testing the null hypothesis that there is no differential in the expression level between the tumor and normal samples of each patient. During initial analysis of the microarrays, the hypothesis was accepted if p>10⁻³, and the differential ratio was set to 1.000 for those spots. All other spots have a significant difference in expression between the tumor and normal sample. If the tumor sample has detectable expression and the normal does not, the ratio is truncated at 1000 since the value for expression in the normal sample would be zero, and the ratio would not be a mathematically useful value (e.g., infinity). If the normal sample has detectable expression and the tumor does not, the ratio is truncated to 0.001, since the value for expression in the tumor sample would be zero and the ratio would not be a mathematically useful value. These latter two situations are referred to herein as “on/off.” Database tables were populated using a 95% confidence level (p>0.05).

TABLE 14

| SEQ ID | Spot | | |
|---|---|---|---|
| NO | Id | Sequence Name | Sample Name or Clone Name |
| 342 | 987 | gbH13036.1 | NIH50_43563 |
| 343 | 1016 | 019.G8.sp6_128478 | M00006968D:E03 |
| 344 | 1019 | 1chip1.K15.T7HSQ3_328869 | M00005636D:B08 |
| 345 | 1033 | RTA00000184AR.p.16.1 | M00001568C:D03 |
| 346 | 1047 | 122.B4.sp6_132088 | M00001655C:E04 |
| 347 | 1049 | 324.E8.sp6_145687 | M00001657A:C02 |
| 348 | 149 | 4chip1.F13.SP6_329984 | M00001470A:C06 |
| 349 | 260 | HX2105-6 | 2105-6 |
| 350 | 279 | gbR51346.1 | NIH50_39093 |
| 351 | 283 | gbH05914.1 | NIH50_43550 |
| 352 | 315 | 1chip1.K13.T7HSQ3_328837 | M00005629C:E09 |
| 353 | 320 | 1chip1.P13.T7HSQ3_328842 | M00006964D:C05 |
| 354 | 342 | 626.C7.sp6_157434 | M00007965A:C03 |
| 355 | 369 | SL178m13 | SL178 |
| 356 | 403 | RTA00000848F.c.07.1 | M00023298C:E11 |
| 357 | 453 | 3chip1.F02.T7HSQ3_329424 | M00008050A:D12 |
| 358 | 460 | 40000063.F01.T7HSQ3_332264 | M00022135A:C04 |
| 359 | 462 | 642.G1.sp6_156335 | M00022137A:A05 |
| 360 | 507 | RTA00000603F.b.03.1 | M00004163D:A08 |
| 361 | 511 | 774.H7.sp6_162527 | M00004167D:H05 |
| 362 | 515 | 627.B2.sp6_157609 | M00007976D:D10 |
| 363 | 530 | 636.A2.sp6_158173 | M00022004A:F05 |
| 364 | 578 | 271.A1.sp6_145248 | M00001429A:G04 |
| 365 | 579 | 269.B1.sp6_144876 | M00001358B:F05 |
| 366 | 582 | 271.C1.sp6_145272 | M00001429C:C03 |
| 367 | 589 | 269.G1.sp6_144936 | M00001360C:B05 |
| 368 | 596 | 271.B7.sp6_145266 | M00001445D:D07 |
| 369 | 605 | 6chip1.N13.SP6_330760 | M00001374D:D10 |
| 370 | 627 | 8chip1.C14.Topo2_336359 | 2016-5 |
| 371 | 635 | HX2058-2 | 2058-2 |
| 372 | 637 | HX2090-1 | 2090-1 |
| 373 | 641 | 1chip1.A02.T7HSQ3_328651 | M00006600A:E02 |
| 374 | 653 | RTA00000321F.e.05.1 | M00006619A:C04 |
| 375 | 656 | 959.SP6.H01_180102 | M00007082B:D06 |
| 376 | 688 | RTA00001082F.m.03.1 | M00027211C:F06 |
| 377 | 742 | 660.C2.sp6_159543 | M00026921D:F12 |
| 378 | 760 | 6chip1.G15.SP6_330785 | M00026961D:G06 |
| 379 | 764 | RTA00001069F.i.01.1 | M00026962D:E01 |
| 380 | 770 | 021.A2.sp6_128760 | M00005467A:G06 |
| 381 | 784 | 021.H2.sp6_128844 | M00007007A:H06 |
| 382 | 789 | 5chip1.E16.SP6_330415 | M00001393B:B01 |
| 383 | 816 | 40000062.H02.T7HSQ3_332178 | M00008095B:G07 |
| 384 | 828 | 634.F8.sp6_155946 | M00021638B:F03 |
| 385 | 866 | RTA22200231F.p.10.1.P | M00008002B:G03 |
| 386 | 920 | 656.D8.sp6_159369 | M00026896A:C09 |
| 387 | 929 | 919.A2.SP6_168666 | M00001339C:G05 |
| 388 | 964 | HX2106-1 | 2106-1 |
| 389 | 978 | HX2103-1 | 2103-1 |
| 390 | 1061 | 8chip1.E03.Topo2_336185 | SL141 |
| 391 | 1108 | 661.B8.sp6_159729 | M00027116A:A10 |
| 392 | 1111 | RTA00001069F.b.02.1 | M00023302D:E10 |
| 393 | 1117 | 653.G8.sp6_159021 | M00023305A:C02 |
| 394 | 1137 | 022.A6.sp6_128956 | M00007943C:f02 |
| 395 | 1145 | 019.G8.sp6_128478 | M00006968D:e03 |
| 396 | 1176 | 642.D8.sp6_156306 | M00022180D:E11 |
| 397 | 1195 | 5chip1.K03.SP6_330213 | M00001675B:G05 |
| 398 | 1251 | RTA00001038F.a.21.1 | M00023413D:F04 |
| 399 | 1261 | 655.G2.sp6_156528 | M00023419C:B06 |
| 400 | 1266 | RTA00000922F.g.12.1 | M00026900D:F02 |
| 401 | 1282 | 271.A2.sp6_145249 | M00001430D:H07 |
| 402 | 1283 | 6chip1.D03.SP6_330590 | M00001360D:H10 |
| 403 | 1298 | RTA00000585F.o.09.2 | M00001448A:C04 |
| 404 | 1307 | 269.F8.sp6_144931 | M00001378D:E03 |
| 405 | 1309 | 269.G8.sp6_144943 | M00001378D:G05 |
| 406 | 1310 | 271.G8.sp6_145327 | M00001451D:F01 |
| 407 | 1319 | HX2030-2 | 2030-2 |
| 408 | 1323 | 8chip1.K04.Topo2_336207 | 2054-2 |
| 409 | 1325 | HX2076-5 | 2076-5 |
| 410 | 1331 | HX2017-1 | 2017-1 |
| 411 | 1341 | HX2090-3 | 2090-3 |
| 412 | 1351 | 1chip1.G04.T7HSQ3_328689 | M00006630A:D01 |
| 413 | 1466 | RTA00000852F.h.21.1 | M00026964B:H10 |
| 414 | 1506 | 40000062.A03.T7HSQ3_332179 | M00008095C:A10 |
| 415 | 1524 | 40000062.B09.T7HSQ3_332228 | M00021649B:F09 |
| 416 | 1607 | 323.D3.sp6_145478 | M00001497A:A09 |
| 417 | 1644 | 020.A2.sp6_128592 | M00001393B:B01 |
| 418 | 1645 | 919.G3.SP6_168739 | M00001342C:C01 |
| 419 | 1659 | 268.F9.sp6_144740 | M00001350B:D10 |
| 420 | 1663 | 919.H9.SP6_168757 | M00001350C:C05 |
| 421 | 1664 | 270.H9.sp6_145148 | M00001411A:G02 |
| 422 | 1689 | gbR61053.1 | NIH50_42096 |
| 423 | 1693 | gbH16957.1 | NIH50_50117 |
| 424 | 1723 | 1chip1.K17.T7HSQ3_328901 | M00005694A:A09 |
| 425 | 1752 | 626.D9.sp6_157448 | M00007967D:G06 |
| 426 | 1767 | SL149m13 | SL149 |
| 427 | 1769 | 8chip1.I05.Topo2_336221 | SL150 |
| 428 | 1789 | 8chip1.M17.Topo2_336417 | SL200 |
| 429 | 1791 | SL201m13 | SL201 |
| 430 | 1794 | 661.A3.sp6_159712 | M00027028A:A06 |
| 431 | 1807 | 653.H3.sp6_159028 | M00023285D:C05 |
| 432 | 1810 | RTA00001069F.k.22.1 | M00027143D:E10 |
| 433 | 1852 | 1chip1.L18.T7HSQ3_328918 | M00005380A:E11 |
| 434 | 1859 | 3chip1.D06.T7HSQ3_329486 | M00008057A:B01 |
| 435 | 1868 | 642.F3.sp6_156325 | M00022151A:B12 |
| 436 | 1895 | RTA22200222F.k.17.1.P | M00004069B:G01 |
| 437 | 1899 | RTA00000603F.a.21.1 | M00004072D:E08 |
| 438 | 1927 | RTA22200231F.l.22.1.P | M00007985A:B08 |
| 439 | 1936 | RTA00000854F.g.12.1 | M00008020C:H09 |
| 440 | 1955 | 655.B3.sp6_156469 | M00023423B:A04 |
| 441 | 1957 | 655.C3.sp6_156481 | M00023424C:A01 |
| 442 | 1992 | 271.D3.sp6_145286 | M00001434D:F08 |
| 443 | 2000 | 271.H3.sp6_145334 | M00001435C:F08 |
| 444 | 2014 | 4chip1.M17.SP6_330055 | M00001462A:E06 |
| 445 | 2028 | 8chip1.L06.Topo2_336240 | 2237-3 |
| 446 | 2030 | 8chip1.N06.Topo2_336242 | 2245-1 |
| 447 | 2067 | 1chip1.C18.T7HSQ3_328909 | M00006715C:C09 |
| 448 | 2108 | RTA00001083F.e.05.1 | M00027619D:A06 |
| 449 | 2110 | RTA00001083F.e.06.1 | M00027622D:H04 |
| 450 | 2137 | sl102t7 | SL102 |
| 451 | 2139 | sl103m13 | SL103 |
| 452 | 2152 | RTA22200241F.k.11.1.P | M00026931B:E12 |
| 453 | 2190 | 021.G4.sp6_128834 | M00006953B:C05 |
| 454 | 2237 | 3chip1.N19.T7HSQ3_329704 | M00007943D:B09 |
| 455 | 2267 | 773.F10.sp6_162349 | M00001573D:H09 |
| 456 | 2280 | RTA00001206F.a.07.1 | M00008023B:A05 |
| 457 | 2338 | 270.A4.sp6_145059 | M00001394C:B12 |
| 458 | 2357 | 268.C10.sp6_144705 | M00001351A:A01 |
| 459 | 2375 | gbR35294.1 | NIH50_37451 |
| 460 | 2381 | gbH09589.1 | NIH50_46171 |
| 461 | 2427 | RTA00001064F.k.13.2 | M00005767D:B03 |
| 462 | 2442 | 626.E4.sp6_157455 | M00007960A:D12 |
| 463 | 2513 | 653.A10.sp6_158951 | M00023312D:F10 |
| 464 | 2514 | 661.A10.sp6_159719 | M00027168A:E01 |
| 465 | 2528 | 661.H10.sp6_159803 | M00027176D:B08 |
| 466 | 2549 | 019.E10.sp6_128456 | M00005645D:g06 |
| 467 | 2557 | 020.G4.sp6_128666 | M00005404C:f02 |
| 468 | 2564 | RTA22200232F.o.21.1.P | M00022154C:D08 |
| 469 | 2568 | 642.D4.sp6_156302 | M00022158D:C11 |
| 470 | 2588 | 642.F10.sp6_156332 | M00022208D:B02 |
| 471 | 2605 | 774.G4.sp6_162502 | M00004085C:C02 |
| 472 | 2613 | 774.C10.sp6_162546 | M00004243D:C01 |
| 473 | 2621 | RTA00000193AR.c.15.2 | M00004248B:E08 |
| 474 | 2629 | RTA22200231F.m.13.1.P | M00007987B:F11 |
| 475 | 2632 | RTA22200233F.c.14.1.P | M00008025D:A02 |
| 476 | 2662 | RTA00001069F.c.03.1 | M00023363C:A04 |
| 477 | 2663 | RTA00000786F.o.16.3 | M00023431C:F07 |
| 478 | 2694 | 271.C4.sp6_145275 | M00001436B:E11 |
| 479 | 2696 | 271.D4.sp6_145287 | M00001436C:C03 |
| 480 | 2702 | 271.G4.sp6_145323 | M00001437B:B08 |
| 481 | 2716 | 271.F10.sp6_145317 | M00001468A:D02 |
| 482 | 2728 | 8chip1.H08.Topo2_336268 | 2208-5 |
| 483 | 2732 | HX2237-4 | 2237-4 |
| 484 | 2734 | HX2245-2 | 2245-2 |
| 485 | 2736 | HX2254-2 | 2254-2 |
| 486 | 2751 | HX2100-1 | 2100-1 |
| 487 | 2765 | 955.SP6.G04_177960 | M00006653C:B09 |
| 488 | 2766 | RTA22200230F.g.19.1.P | M00007154B:H08 |
| 489 | 2791 | RTA00000789F.g.11.1 | M00003994A:G12 |
| 490 | 2837 | sl108m13 | SL108 |
| 491 | 2919 | 625.D5.sp6_155727 | M00007936A:C09 |
| 492 | 2922 | 959.SP6.G09_180098 | M00008100B:G11 |
| 493 | 2977 | RTA22200231F.m.16.1.P | M00007990D:A11 |
| 494 | 2979 | RTA22200231F.m.20.1.P | M00007992A:D02 |
| 495 | 2988 | 628.F9.sp6_157856 | M00008039A:C09 |
| 496 | 3009 | 323.A5.sp6_145444 | M00001503C:D01 |
| 497 | 3090 | HX2104-3 | 2104-3 |
| 498 | 3091 | gbR42581.1 | NIH50_31143 |
| 499 | 3093 | gbR45594.1 | NIH50_35483 |
| 500 | 3097 | gbR61295.1 | NIH50_42352 |
| 501 | 3099 | gbH05820.1 | NIH50_44255 |
| 502 | 3101 | gbH16908.1 | NIH50_50666 |
| 503 | 3122 | 019.G10.sp6_128480 | M00007019A:B01 |
| 504 | 3143 | 324.D5.sp6_145672 | M00001605D:C02 |
| 505 | 3152 | 626.H5.sp6_157492 | M00007963B:B04 |
| 506 | 3235 | 019.D5.sp6_128439 | M00005443D:b03 |
| 507 | 3275 | 633.F5.sp6_156135 | M00008072D:E12 |
| 508 | 3284 | 642.B11.sp6_156285 | M00022211D:A02 |
| 509 | 3301 | 5chip1.E09.SP6_330303 | M00003820A:G06 |
| 510 | 3317 | 774.C11.sp6_162554 | M00004282B:D11 |
| 511 | 3346 | 636.A10.sp6_158181 | M00022068C:F05 |
| 512 | 3372 | RTA00000854F.m.01.1 | M00023395C:F06 |
| 513 | 3394 | 271.A5.sp6_145252 | M00001437D:E12 |
| 514 | 3396 | 271.B5.sp6_145264 | M00001438A:B09 |
| 515 | 3419 | 269.F11.sp6_144934 | M00001387A:A08 |
| 516 | 3440 | HX2254-4 | 2254-4 |
| 517 | 3453 | HX2093-3 | 2093-3 |
| 518 | 3455 | HX2100-2 | 2100-2 |
| 519 | 3469 | RTA00002902F.h.07.1.P | M00006678A:A03 |
| 520 | 3517 | RTA22200224F.j.03.1.P | M00005358D:A11 |
| 521 | 3531 | SL66t7 | SL66 |
| 522 | 3575 | 654.D12.sp6_159181 | M00023398C:D01 |
| 523 | 3683 | RTA00000717F.o.13.1 | M00007994C:F08 |
| 524 | 3710 | RTA22200232F.i.18.1.P | M00022074D:H11 |
| 525 | 3712 | 636.H11.sp6_158266 | M00022075A:B09 |
| 526 | 3745 | 268.A6.sp6_144677 | M00001344D:H07 |
| 527 | 3760 | 013717 | M00001405B:A11 |
| 528 | 3772 | 270.F12.sp6_145127 | M00001427D:G03 |
| 529 | 3776 | 270.H12.sp6_145151 | M00001428C:A07 |
| 530 | 3785 | gbR58991.1 | NIH50_41452 |
| 531 | 3794 | HX2105-1 | 2105-1 |
| 532 | 3831 | 1chip1.G23.T7HSQ3_328993 | M00006582A:D11 |
| 533 | 4007 | RTA22200222F.m.10.1.P | M00004136A:D10 |
| 534 | 4019 | 774.B12.sp6_162561 | M00004331A:A03 |
| 535 | 4037 | RTA22200231F.o.10.1.P | M00007996C:F04 |
| 536 | 4068 | 344.B6.sp6_146241 | M00023397B:E08 |
| 537 | 4100 | 4chip1.C11.SP6_329949 | M00001441A:A09 |
| 538 | 4107 | 920.F6.SP6_168826 | M00001372A:D01 |
| 539 | 4123 | 019.A4.sp6_128402 | M00001389A:F09 |
| 540 | 4124 | 4chip1.K23.SP6_330149 | M00001481C:A12 |
| 541 | 4127 | 6chip1.P23.SP6_330922 | M00001389C:G01 |
| 542 | 4128 | 4chip1.O23.SP6_330153 | M00001482D:D11 |
| 543 | 4135 | HX2032-2 | 2032-2 |
| 544 | 4157 | HX2093-5 | 2093-5 |
| 545 | 4193 | RTA00002895F.h.23.1.P | M00004087B:E02 |
| 546 | 8454 | 2231168 | I:2231168:08B01:C01 |
| 547 | 8486 | 1813269 | I:1813269:05B01:C01 |
| 548 | 8509 | 1732092 | I:1732092:05A01:G07 |
| 549 | 8513 | Incyte3.A01.T3pINCY_352048 | I:3325119:07A01:A01 |
| 550 | 8537 | Incyte3.I13.T3pINCY_352248 | I:3176222:07A01:E07 |
| 551 | 8546 | Incyte2.B01.T3pINCY_351665 | I:1705208:06B01:A01 |
| 552 | 8549 | Incyte2.E01.T3pINCY_351668 | I:1623214:06A01:C01 |
| 553 | 8568 | Incyte2.H13.T3pINCY_351863 | I:1712888:06B01:D07 |
| 554 | 8569 | Incyte2.I13.T3pINCY_351864 | I:1702752:06A01:E07 |
| 555 | 8570 | 1696224 | I:1696224:06B01:E07 |
| 556 | 8599 | Incyte5.H13.T3pINCY_353015 | I:1678926:11A01:D07 |
| 557 | 8608 | 3676190 | I:3676190:11B01:H07 |
| 558 | 8634 | Incyt14.I13.T3pINCY_377264 | I:1439934:03B01:E07 |
| 559 | 8637 | 1640555 | I:1640555:03A01:G07 |
| 560 | 8644 | Incyt12.C01.T3pINCY_368180 | I:2171743:01B01:B01 |
| 561 | 8672 | 2885982 | I:2885982:01B01:H07 |
| 562 | 8703 | 2917169 | I:2917169:12A01:H07 |
| 563 | 8730 | 2477854 | I:2477854:10B01:E07 |
| 564 | 8743 | 1858905 | I:1858905:04A01:D01 |
| 565 | 8829 | 2950228 | I:2950228:08A02:G07 |
| 566 | 8835 | 1732335 | I:1732335:05A02:B01 |
| 567 | 8856 | I1.H14.T3pINCY1_343720 | I:1803418:05B02:D07 |
| 568 | 8858 | I1.J14.T3pINCY1_343722 | I:1857652:05B02:E07 |
| 569 | 8860 | I1.L14.T3pINCY1_343724 | I:1568725:05B02:F07 |
| 570 | 8862 | I1.N14.T3pINCY1_343726 | I:1687060:05B02:G07 |
| 571 | 8890 | 3044552 | I:3044552:07B02:E07 |
| 572 | 8945 | Incyte5.B14.T3pINCY_353025 | I:3282436:11A02:A07 |
| 573 | 8959 | 1817388 | I:1817388:11A02:H07 |
| 574 | 8960 | Incyt10.O14.T3pINCY_367632 | I:2488216:11B02:H07 |
| 575 | 8996 | Incyt11.D02.T3pINCY_367813 | I:2365149:01B02:B01 |
| 576 | 9008 | Incyte8.P01.T3pINCY_354174 | I:3211615:01B02:H01 |
| 577 | 9013 | Incyte8.E14.T3pINCY_354371 | I:1419396:01A02:C07 |
| 578 | 9021 | Incyt11.N13.T3pINCY_367999 | I:2862971:01A02:G07 |
| 579 | 9055 | Incyte6.P13.T3pINCY_353598 | I:4335824:12A02:H07 |
| 580 | 9082 | 3275493 | I:3275493:10B02:E07 |
| 581 | 9097 | 2021576 | I:2021576:04A02:E01 |
| 582 | 9110 | Incyt14.F14.T3pINCY_377277 | I:2989411:04B02:C07 |
| 583 | 9111 | I1.G14.T3pINCY1_343719 | I:1958902:04A02:D07 |
| 584 | 9143 | 2728590 | I:2728590:02A02:D07 |
| 585 | 9168 | Incyte4.O03.T3pINCY_352478 | I:2344817:08B01:H02 |
| 586 | 9171 | Incyte3.D16.T3pINCY_352291 | I:3236109:08A01:B08 |
| 587 | 9186 | 1574890 | I:1574890:05B01:A02 |
| 588 | 9191 | 1421929 | I:1421929:05A01:D02 |
| 589 | 9201 | 3142736 | I:3142736:05A01:A08 |
| 590 | 9278 | Incyte2.N15.T3pINCY_351901 | I:1305950:06B01:G08 |
| 591 | 9296 | Incyt10.O03.T3pINCY_367456 | I:1804548:11B01:H02 |
| 592 | 9300 | Incyt10.C15.T3pINCY_367636 | I:3053958:11B01:B08 |
| 593 | 9312 | Incyt10.O15.T3pINCY_367648 | I:2799347:11B01:H08 |
| 594 | 9318 | Incyt14.E03.T3pINCY_377100 | I:1312824:03B01:C02 |
| 595 | 9348 | 2745048 | I:2745048:01B01:B02 |
| 596 | 9364 | 2683564 | I:2683564:01B01:B08 |
| 597 | 9366 | Incyt12.E15.T3pINCY_368406 | I:2725511:01B01:C08 |
| 598 | 9368 | Incyte8.H16.T3pINCY_354406 | I:2233375:01B01:D08 |
| 599 | 9381 | Incyt10.F03.T3pINCY_367447 | I:3218334:12A01:C02 |
| 600 | 9442 | I1.B03.T3pINCY1_343538 | I:1636639:04B01:A02 |
| 601 | 9448 | I1.H03.T3pINCY1_343544 | I:2455617:04B01:D02 |
| 602 | 9456 | I1.P03.T3pINCY1_343552 | I:2806166:04B01:H02 |
| 603 | 9472 | I1.P15.T3pINCY1_343744 | I:2510171:04B01:H08 |
| 604 | 9487 | Incyt12.O04.T3pINCY_368240 | I:2190284:02A01:H02 |
| 605 | 9499 | Incyte7.K15.T3pINCY_354009 | I:1861971:02A01:F08 |
| 606 | 9501 | 3360454 | I:3360454:02A01:G08 |
| 607 | 9512 | 2948256 | I:2948256:08B02:D02 |
| 608 | 9527 | 2045705 | I:2045705:08A02:D08 |
| 609 | 9528 | 2544622 | I:2544622:08B02:D08 |
| 610 | 9540 | 1522716 | I:1522716:05B02:B02 |
| 611 | 9552 | I1.P04.T3pINCY1_343568 | I:1820522:05B02:H02 |
| 612 | 9553 | 2365295 | I:2365295:05A02:A08 |
| 613 | 9560 | I1.H16.T3pINCY1_343752 | I:1822577:05B02:D08 |
| 614 | 9574 | 2472778 | I:2472778:07B02:C02 |
| 615 | 9596 | 3141918 | I:3141918:07B02:F08 |
| 616 | 9618 | 1306814 | I:1306814:06B02:A08 |
| 617 | 9624 | Incyte2.H16.T3pINCY_351911 | I:3034694:06B02:D08 |
| 618 | 9640 | Incyt10.G04.T3pINCY_367464 | I:2859033:11B02:D02 |
| 619 | 9645 | Incyte5.N04.T3pINCY_352877 | I:2795249:11A02:G02 |
| 620 | 9647 | Incyte5.P04.T3pINCY_352879 | I:2966535:11A02:H02 |
| 621 | 9649 | Incyte5.B16.T3pINCY_353057 | I:1483713:11A02:A08 |
| 622 | 9666 | Incyt14.A04.T3pINCY_377112 | I:1453049:03B02:A02 |
| 623 | 9678 | Incyt14.M04.T3pINCY_377124 | I:1415990:03B02:G02 |
| 624 | 9687 | Incyte9.G15.T3pINCY_354773 | I:2992851:03A02:D08 |
| 625 | 9697 | Incyt11.B03.T3pINCY_367827 | I:1477568:01A02:A02 |
| 626 | 9698 | 2779637 | I:2779637:01B02:A02 |
| 627 | 9716 | Incyt11.D16.T3pINCY_368037 | I:2786575:01B02:B08 |
| 628 | 9720 | Incyt11.H16.T3pINCY_368041 | I:2455118:01B02:D08 |
| 629 | 9722 | Incyt11.J16.T3pINCY_368043 | I:2840251:01B02:E08 |
| 630 | 9739 | 2902903 | I:2902903:12A02:F02 |
| 631 | 9741 | Incyte6.N03.T3pINCY_353436 | I:3126828:12A02:G02 |
| 632 | 9755 | 3126622 | I:3126622:12A02:F08 |
| 633 | 9770 | Incyte5.I04.T3pINCY_352872 | I:2911347:10B02:E02 |
| 634 | 9884 | Incyte4.K17.T3pINCY_352698 | I:2908878:08B01:F09 |
| 635 | 9889 | 2639181 | I:2639181:05A01:A03 |
| 636 | 9901 | 3132987 | I:3132987:05A01:G03 |
| 637 | 9911 | 3139163 | I:3139163:05A01:D09 |
| 638 | 9913 | 2242817 | I:2242817:05A01:E09 |
| 639 | 9914 | 1904751 | I:1904751:05B01:E09 |
| 640 | 9916 | 1750553 | I:1750553:05B01:F09 |
| 641 | 9920 | 1888940 | I:1888940:05B01:H09 |
| 642 | 9949 | Incyte3.M17.T3pINCY_352316 | I:3970665:07A01:G09 |
| 643 | 9952 | Incyte3.P17.T3pINCY_352319 | I:1633393:07B01:H09 |
| 644 | 9956 | Incyte2.D05.T3pINCY_351731 | I:1617326:06B01:B03 |
| 645 | 9981 | Incyte2.M17.T3pINCY_351932 | I:1720149:06A01:G09 |
| 646 | 9989 | Incyte5.F05.T3pINCY_352885 | I:2689747:11A01:C03 |
| 647 | 9995 | Incyte5.L05.T3pINCY_352891 | I:2367733:11A01:F03 |
| 648 | 10003 | 1850531 | I:1850531:11A01:B09 |
| 649 | 10012 | Incyt10.K17.T3pINCY_367676 | I:2594407:11B01:F09 |
| 650 | 10020 | Incyt14.C05.T3pINCY_377130 | I:1406786:03B01:B03 |
| 651 | 10021 | 1930235 | I:1930235:03A01:C03 |
| 652 | 10035 | I1.C17.T3pINCY1_343763 | I:1526240:03A01:B09 |
| 653 | 10046 | Incyt14.M17.T3pINCY_377332 | I:1510714:03B01:G09 |
| 654 | 10047 | I1.O17.T3pINCY1_343775 | I:2952864:03A01:H09 |
| 655 | 10083 | 2922292 | I:2922292:12A01:B03 |
| 656 | 10103 | Incyte6.G18.T3pINCY_353669 | I:3714075:12A01:D09 |
| 657 | 10153 | Incyt14.J05.T3pINCY_377137 | I:1712592:04A01:E03 |
| 658 | 10160 | I1.P05.T3pINCY1_343584 | I:2696735:04B01:H03 |
| 659 | 10200 | Incyte7.H17.T3pINCY_354038 | I:1702266:02B01:D09 |
| 660 | 10231 | 1808121 | I:1808121:08A02:D09 |
| 661 | 10243 | Incyt15.C05.T3pINCY_377526 | I:3070110:05A02:B03 |
| 662 | 10257 | Incyt15.A17.T3pINCY_377716 | I:2860815:05A02:A09 |
| 663 | 10285 | Incyte3.M06.T3pINCY_352140 | I:1930135:07A02:G03 |
| 664 | 10301 | 2669174 | I:2669174:07A02:G09 |
| 665 | 10334 | Incyte2.N18.T3pINCY_351949 | I:3354893:06B02:G09 |
| 666 | 10355 | Incyte5.D18.T3pINCY_353091 | I:4215852:11A02:B09 |
| 667 | 10366 | Incyt10.M18.T3pINCY_367694 | I:2896792:11B02:G09 |
| 668 | 10374 | Incyt14.E06.T3pINCY_377148 | I:1513989:03B02:C03 |
| 669 | 10388 | Incyt14.C18.T3pINCY_377338 | I:1453450:03B02:B09 |
| 670 | 10463 | Incyte6.P17.T3pINCY_353662 | I:4592475:12A02:H09 |
| 671 | 10481 | Incyte5.A17.T3pINCY_353072 | I:1726307:10A02:A09 |
| 672 | 10508 | Incyt14.L06.T3pINCY_377155 | I:1900378:04B02:F03 |
| 673 | 10519 | 1655492 | I:1655492:04A02:D09 |
| 674 | 10569 | Incyte3.J08.T3pINCY_352169 | I:2447969:08A01:E04 |
| 675 | 10594 | 1871362 | I:1871362:05B01:A04 |
| 676 | 10601 | 1337615 | I:1337615:05A01:E04 |
| 677 | 10650 | Incyte3.J19.T3pINCY_352345 | I:2456393:07B01:E10 |
| 678 | 10674 | Incyte2.B19.T3pINCY_351953 | I:1911622:06B01:A10 |
| 679 | 10684 | 4082816 | I:4082816:06B01:F10 |
| 680 | 10686 | Incyte2.N19.T3pINCY_351965 | I:1450849:06B01:G10 |
| 681 | 10746 | Incyt14.I19.T3pINCY_377360 | I:1445895:03B01:E10 |
| 682 | 10762 | Incyte8.J08.T3pINCY_354280 | I:2852042:01B01:E04 |
| 683 | 10766 | 2071761 | I:2071761:01B01:G04 |
| 684 | 10767 | Incyt11.O08.T3pINCY_367920 | I:1336836:01A01:H04 |
| 685 | 10777 | 2591814 | I:2591814:01A01:E10 |
| 686 | 10801 | Incyt10.B19.T3pINCY_367699 | I:3951088:12A01:A10 |
| 687 | 10805 | Incyt10.F19.T3pINCY_367703 | I:3815547:12A01:C10 |
| 688 | 10815 | Incyte6.O20.T3pINCY_353709 | I:2881469:12A01:H10 |
| 689 | 10830 | 1438966 | I:1438966:10B01:G04 |
| 690 | 10832 | 2174773 | I:2174773:10B01:H04 |
| 691 | 10855 | 2555828 | I:2555828:04A01:D04 |
| 692 | 10864 | I1.P07.T3pINCY1_343616 | I:2966620:04B01:H04 |
| 693 | 10870 | I1.F19.T3pINCY1_343798 | I:2832889:04B01:C10 |
| 694 | 10873 | Incyt14.J19.T3pINCY_377361 | I:1342493:04A01:E10 |
| 695 | 10921 | 1675571 | I:1675571:08A02:E04 |
| 696 | 10924 | 1349433 | I:1349433:08B02:F04 |
| 697 | 10925 | 1819282 | I:1819282:08A02:G04 |
| 698 | 10936 | 1709017 | I:1709017:08B02:D10 |
| 699 | 10937 | 3121962 | I:3121962:08A02:E10 |
| 700 | 10938 | 3409027 | I:3409027:08B02:E10 |
| 701 | 10941 | 1697490 | I:1697490:08A02:G10 |
| 702 | 10961 | Incyt15.A19.T3pINCY_377748 | I:3176845:05A02:A10 |
| 703 | 10997 | Incyte3.E20.T3pINCY_352356 | I:3495906:07A02:C10 |
| 704 | 11035 | 1630804 | I:1630804:06A02:F10 |
| 705 | 11050 | Incyte6.I07.T3pINCY_353495 | I:2494284:11B02:E04 |
| 706 | 11053 | Incyte5.N08.T3pINCY_352941 | I:3316536:11A02:G04 |
| 707 | 11057 | Incyte5.B20.T3pINCY_353121 | I:3743802:11A02:A10 |
| 708 | 11092 | Incyt14.C20.T3pINCY_377370 | I:1690653:03B02:B10 |
| 709 | 11100 | Incyt14.K20.T3pINCY_377378 | I:1636553:03B02:F10 |
| 710 | 11104 | Incyt14.O20.T3pINCY_377382 | I:1402228:03B02:H10 |
| 711 | 11112 | Incyte8.H07.T3pINCY_354262 | I:2918558:01B02:D04 |
| 712 | 11114 | Incyt11.J08.T3pINCY_367915 | I:2837773:01B02:E04 |
| 713 | 11149 | Incyt10.N08.T3pINCY_367535 | I:4049957:12A02:G04 |
| 714 | 11153 | Incyt10.B20.T3pINCY_367715 | I:2182353:12A02:A10 |
| 715 | 11201 | 2579602 | I:2579602:04A02:A04 |
| 716 | 11202 | 2824181 | I:2824181:04B02:A04 |
| 717 | 11208 | 2842835 | I:2842835:04B02:D04 |
| 718 | 11221 | 1958560 | I:1958560:04A02:C10 |
| 719 | 11223 | I1.G20.T3pINCY1_343815 | I:1749417:04A02:D10 |
| 720 | 11231 | 2495131 | I:2495131:04A02:H10 |
| 721 | 11269 | 2133481 | I:2133481:08A01:C05 |
| 722 | 11290 | Incyte4.I21.T3pINCY_352760 | I:1340424:08B01:E11 |
| 723 | 11322 | 1858171 | I:1858171:05B01:E11 |
| 724 | 11335 | Incyte3.G09.T3pINCY_352182 | I:3360365:07A01:D05 |
| 725 | 11341 | Incyte3.M09.T3pINCY_352188 | I:1453445:07A01:G05 |
| 726 | 11347 | Incyte3.C21.T3pINCY_352370 | I:3334367:07A01:B11 |
| 727 | 11351 | Incyte3.G21.T3pINCY_352374 | I:3002566:07A01:D11 |
| 728 | 11380 | 1701809 | I:1701809:06B01:B11 |
| 729 | 11396 | Incyt10.C09.T3pINCY_367540 | I:2796468:11B01:B05 |
| 730 | 11463 | Incyt11.G10.T3pINCY_367944 | I:1486087:01A01:D05 |
| 731 | 11473 | lncyt11.A22.T3pINCY_368130 | I:2555034:01A01:A11 |
| 732 | 11485 | Incyt11.M22.T3pINCY_368142 | I:1402967:01A01:G11 |
| 733 | 11489 | Incyt10.B09.T3pINCY_367539 | I:2884153:12A01:A05 |
| 734 | 11493 | 2608167 | I:2608167:12A01:C05 |
| 735 | 11543 | Incyte4.H22.T3pINCY_352775 | I:2821541:10A01:D11 |
| 736 | 11568 | I1.P09.T3pINCY1_343648 | I:2883195:04B01:H05 |
| 737 | 11569 | Incyt14.B21.T3pINCY_377385 | I:1509602:04A01:A11 |
| 738 | 11583 | Incyt14.P21.T3pINCY_377399 | I:2832224:04A01:H11 |
| 739 | 11624 | 2343403 | I:2343403:08B02:D05 |
| 740 | 11639 | 1880426 | I:1880426:08A02:D11 |
| 741 | 11675 | 1511342 | I:1511342:05A02:F11 |
| 742 | 11677 | 1805745 | I:1805745:05A02:G11 |
| 743 | 11682 | 2707290 | I:2707290:07B02:A05 |
| 744 | 11683 | 3872557 | I:3872557:07A02:B05 |
| 745 | 11731 | Incyte2.C22.T3pINCY_352002 | I:1689068:06A02:B11 |
| 746 | 11736 | 3511355 | I:3511355:06B02:D11 |
| 747 | 11739 | Incyte2.K22.T3pINCY_352010 | I:1699587:06A02:F11 |
| 748 | 11745 | 3097582 | I:3097582:11A02:A05 |
| 749 | 11794 | Incyt14.A22.T3pINCY_377400 | I:2949427:03B02:A11 |
| 750 | 11806 | Incyt14.M22.T3pINCY_377412 | I:1525881:03B02:G11 |
| 751 | 11819 | 2158884 | I:2158884:01A02:F05 |
| 752 | 11835 | Incyt11.L21.T3pINCY_368125 | I:2183580:01A02:F11 |
| 753 | 11836 | Incyt11.L22.T3pINCY_368141 | I:1806769:01B02:F11 |
| 754 | 11855 | Incyt10.P10.T3pINCY_367569 | I:3856893:12A02:H05 |
| 755 | 11928 | Incyt14.H22.T3pINCY_377407 | I:1683944:04B02:D11 |
| 756 | 11934 | Incyt14.N22.T3pINCY_377413 | I:1907952:04B02:G11 |
| 757 | 11945 | Incyte7.I10.T3pINCY_353927 | I:1817352:02A02:E05 |
| 758 | 11992 | Incyte4.G23.T3pINCY_352790 | I:1683245:08B01:D12 |
| 759 | 12025 | 3176179 | I:3176179:05A01:E12 |
| 760 | 12035 | Incyte3.C11.T3pINCY_352210 | I:3175507:07A01:B06 |
| 761 | 12098 | 3553751 | I:3553751:11B01:A06 |
| 762 | 12187 | Incyt11.K24.T3pINCY_368172 | I:1504554:01A01:F12 |
| 763 | 12201 | Incyte6.I12.T3pINCY_353575 | I:2957410:12A01:E06 |
| 764 | 12253 | 1725001 | I:1725001:10A01:G12 |
| 765 | 12258 | I1.B11.T3pINCY1_343666 | I:2989991:04B01:A06 |
| 766 | 12259 | Incyt14.D11.T3pINCY_377227 | I:1514989:04A01:B06 |
| 767 | 12283 | Incyt14.L23.T3pINCY_377427 | I:1481225:04A01:F12 |
| 768 | 12295 | Incyte7.G11.T3pINCY_353941 | I:1624459:02A01:D06 |
| 769 | 12298 | Incyte7.J11.T3pINCY_353944 | I:2122820:02B01:E06 |
| 770 | 12329 | 2591352 | I:2591352:08A02:E06 |
| 771 | 12332 | 2551421 | I:2551421:08B02:F06 |
| 772 | 12369 | Incyt15.A23.T3pINCY_377812 | I:1252255:05A02:A12 |
| 773 | 12388 | 2674482 | I:2674482:07B02:B06 |
| 774 | 12446 | Incyte2.N24.T3pINCY_352045 | I:1634046:06B02:G12 |
| 775 | 12499 | Incyte9.C23.T3pINCY_354897 | I:2513883:03A02:B12 |
| 776 | 12515 | Incyt11.D11.T3pINCY_367957 | I:2537805:01A02:B06 |
| 777 | 12540 | Incyte8.L23.T3pINCY_354522 | I:1730527:01B02:F12 |
| 778 | 12544 | Incyt11.P24.T3pINCY_368177 | I:1733522:01B02:H12 |
| 779 | 12546 | 3948420 | I:3948420:12B01:A06 |
| 780 | 12548 | 3679736 | I:3679736:12B01:B06 |
| 781 | 12555 | Incyte6.L11.T3pINCY_353562 | I:4083705:12A02:F06 |
| 782 | 16846 | 772853 | I:772853:19A01:D07 |
| 783 | 16881 | 2028093 | I:2028093:15A01:E07 |
| 784 | 16883 | 2132508 | I:2132508:15A01:F07 |
| 785 | 16917 | Incyte20.I02.Alpha2_380275 | I:3144018:18B01:E01 |
| 786 | 16935 | Incyte20.K14.Alpha2_380469 | I:1967531:18B01:F07 |
| 787 | 16959 | 1426031 | I:1426031:14B01:B07 |
| 788 | 17017 | 1001970 | I:1001970:14A01:E07 |
| 789 | 17049 | K1.I14.Laf3_324935 | RG:160664:10006:E07 |
| 790 | 17090 | 341491 | I:341491:13B01:A01 |
| 791 | 17119 | 2058935 | I:2058935:13A01:H07 |
| 792 | 17122 | AA858434 | RG:1420946:10004:A01 |
| 793 | 17143 | R51346 | NIH50_39093 |
| 794 | 17236 | Incyte4.C14.T3pINCY_352642 | I:1602726:09B01:B07 |
| 795 | 17365 | 504786 | I:504786:14A02:C07 |
| 796 | 17370 | 2103752 | I:2103752:14B02:E07 |
| 797 | 17377 | K1.B01.Laf3_324720 | RG:197713:10007:A01 |
| 798 | 17379 | K1.D01.Laf3_324722 | RG:205212:10007:B01 |
| 799 | 17386 | AI523571 | RG:2117694:10016:E01 |
| 800 | 17395 | K1.D13.Laf3_324914 | RG:207395:10007:B07 |
| 801 | 17398 | AI421409 | RG:2097257:10016:C07 |
| 802 | 17422 | Incyte18.N01.Alpha2_379490 | I:349535:16B02:G01 |
| 803 | 17432 | Incyte18.H13.Alpha2_379676 | I:1965049:16B02:D07 |
| 804 | 17454 | 1995971 | I:1995971:13B02:G01 |
| 805 | 17457 | 2132815 | I:2132815:13A02:A07 |
| 806 | 17475 | N44546 | RG:272992:10008:B01 |
| 807 | 17479 | W03193 | RG:296383:10008:D01 |
| 808 | 17496 | H08652 | RG:45089:10005:D07 |
| 809 | 17511 | K1.H02.Laf3_324742 | RG:1409220:10013:D01 |
| 810 | 17524 | K2.C13.Laf3_325298 | RG:1705470:10015:B07 |
| 811 | 17603 | 1001730 | I:1001730:15A01:B02 |
| 812 | 17609 | 1922531 | I:1922531:15A01:E02 |
| 813 | 17618 | 707667 | I:707667:15B01:A08 |
| 814 | 17726 | 1997233 | I:1997233:14B01:G08 |
| 815 | 17730 | AA128438 | RG:526536:10002:A02 |
| 816 | 17746 | AA070046 | RG:530002:10002:A08 |
| 817 | 17756 | AA197021 | RG:608953:10002:F08 |
| 818 | 17793 | 2054420 | I:2054420:13A01:A02 |
| 819 | 17795 | 1994472 | I:1994472:13A01:B02 |
| 820 | 17851 | H13036 | NIH50_43563 |
| 821 | 17854 | R18972 | RG:33368:10004:G08 |
| 822 | 17867 | AA281116 | RG:711647:10010:F02 |
| 823 | 17878 | K1.E15.Laf3_324947 | RG:1047592:10012:C08 |
| 824 | 18006 | Incyte21.F16.Alpha2_380880 | I:2760114:19B02:C08 |
| 825 | 18062 | 2307314 | I:2307314:14B02:G02 |
| 826 | 18069 | 1981145 | I:1981145:14A02:C08 |
| 827 | 18097 | R99405 | RG:201268:10007:A08 |
| 828 | 18178 | R20998 | RG:36399:10005:A02 |
| 829 | 18187 | W24158 | RG:310019:10008:F02 |
| 830 | 18235 | AA923101 | RG:1521317:10013:F08 |
| 831 | 18305 | 743595 | I:743595:15A01:A03 |
| 832 | 18311 | 2621547 | I:2621547:15A01:D03 |
| 833 | 18314 | 1988412 | I:1988412:15B01:E03 |
| 834 | 18316 | 1987738 | I:1987738:15B01:F03 |
| 835 | 18321 | 1922944 | I:1922944:15A01:A09 |
| 836 | 18323 | 1213932 | I:1213932:15A01:B09 |
| 837 | 18362 | 2296027 | I:2296027:19B01:E09 |
| 838 | 18431 | 1998269 | I:1998269:14A01:H09 |
| 839 | 18445 | R85309 | RG:180296:10006:G03 |
| 840 | 18447 | H30045 | RG:190269:10006:H03 |
| 841 | 18454 | AA131155 | RG:587068:10002:C09 |
| 842 | 18460 | AA167493 | RG:609044:10002:F09 |
| 843 | 18464 | AA197125 | RG:629241:10002:H09 |
| 844 | 18471 | Incyte21.G06.Alpha2_380721 | I:1953051:16A01:D03 |
| 845 | 18473 | Incyte21.I06.Alpha2_380723 | I:518826:16A01:E03 |
| 846 | 18519 | 1997703 | I:1997703:13A01:D09 |
| 847 | 18560 | R14989 | RG:35716:10004:H09 |
| 848 | 18571 | K2.L05.Laf3_325179 | RG:712070:10010:F03 |
| 849 | 18594 | Incyte19.A06.Alpha2_379947 | I:1997779:17B01:A03 |
| 850 | 18620 | Incyte19.K18.Alpha2_380149 | I:1998428:17B01:F09 |
| 851 | 18624 | Incyte19.O18.Alpha2_380153 | I:406788:17B01:H09 |
| 852 | 18665 | 1968413 | I:1968413:15A02:E03 |
| 853 | 18683 | 552654 | I:552654:15A02:F09 |
| 854 | 18687 | 637576 | I:637576:15A02:H09 |
| 855 | 18693 | Incyte20.F06.Alpha2_380336 | I:606875:19A02:C03 |
| 856 | 18724 | 1962095 | I:1962095:18B02:B03 |
| 857 | 18758 | 856900 | I:856900:14B02:C03 |
| 858 | 18760 | 2132752 | I:2132752:14B02:D03 |
| 859 | 18769 | 143987 | I:143987:14A02:A09 |
| 860 | 18787 | K1.D05.Laf3_324786 | RG:206694:10007:B03 |
| 861 | 18797 | N23769 | RG:263708:10007:G03 |
| 862 | 18821 | Incyte18.E05.Alpha2_379545 | I:1461515:16A02:C03 |
| 863 | 18845 | Incyte18.M17.Alpha2_379745 | I:1425861:16A02:G09 |
| 864 | 18860 | 700559 | I:700559:13B02:F03 |
| 865 | 18872 | 1844755 | I:1844755:13B02:D09 |
| 866 | 18891 | W30991 | RG:310347:10008:F03 |
| 867 | 18894 | H19237 | RG:51009:10005:G03 |
| 868 | 18919 | K1.H06.Laf3_324806 | RG:1415437:10013:D03 |
| 869 | 18920 | K2.G05.Laf3_325174 | RG:1734353:10015:D03 |
| 870 | 18926 | AI281021 | RG:1872251:10015:G03 |
| 871 | 18937 | K1.J18.Laf3_325000 | RG:1476452:10013:E09 |
| 872 | 18942 | K2.M17.Laf3_325372 | RG:1895716:10015:G09 |
| 873 | 18988 | Incyte4.L05.T3pINCY_352507 | I:2069305:09B02:F03 |
| 874 | 19005 | 2674167 | I:2674167:09A02:G09 |
| 875 | 19025 | 2296518 | I:2296518:15A01:A10 |
| 876 | 19113 | 692827 | I:692827:14A01:E04 |
| 877 | 19130 | 1998594 | I:1998594:14B01:E10 |
| 878 | 19166 | AA186459 | RG:625691:10002:G10 |
| 879 | 19173 | Incyte21.E08.Alpha2_380751 | I:293495:16A01:C04 |
| 880 | 19183 | 3187911 | I:3187911:16A01:H04 |
| 881 | 19219 | 406016 | I:406016:13A01:B10 |
| 882 | 19227 | 671776 | I:671776:13A01:F10 |
| 883 | 19259 | H06516 | NIH50_44180 |
| 884 | 19287 | AA290719 | RG:700320:10010:D10 |
| 885 | 19348 | Incyte4.C20.T3pINCY_352738 | I:2556708:09B01:B10 |
| 886 | 19370 | 136571 | I:136571:15B02:E04 |
| 887 | 19376 | Incyte18.O08.Alpha2_379603 | I:1988674:15B02:H04 |
| 888 | 19389 | 556016 | I:556016:15A02:G10 |
| 889 | 19401 | 483757 | I:483757:19A02:E04 |
| 890 | 19444 | 1923893 | I:1923893:18B02:B10 |
| 891 | 19473 | 130254 | I:130254:14A02:A10 |
| 892 | 19482 | 2263936 | I:2263936:14B02:E10 |
| 893 | 19506 | AI335696 | RG:1949583:10016:A10 |
| 894 | 19512 | AI523861 | RG:2116699:10016:D10 |
| 895 | 19517 | K1.N19.Laf3_325020 | RG:266649:10007:G10 |
| 896 | 19527 | 996772 | I:996772:16A02:D04 |
| 897 | 19574 | 635178 | I:635178:13B02:C10 |
| 898 | 19600 | T83145 | RG:110764:10005:H04 |
| 899 | 19636 | K2.C19.Laf3_325394 | RG:1706414:10015:B10 |
| 900 | 19641 | K1.J20.Laf3_325032 | RG:1476433:10013:E10 |
| 901 | 19667 | Incyte19.C19.Alpha2_380157 | I:1368834:17A02:B10 |
| 902 | 19684 | Incyte4.D07.T3pINCY_352531 | I:2680168:09B02:B04 |
| 903 | 19701 | 1515905 | I:1515905:09A02:C10 |
| 904 | 19713 | 996104 | I:996104:15A01:A05 |
| 905 | 19725 | 1966446 | I:1966446:15A01:G05 |
| 906 | 19738 | 1999120 | I:1999120:15B01:E11 |
| 907 | 19743 | 591358 | I:591358:15A01:H11 |
| 908 | 19835 | 2055926 | I:2055926:14A01:F11 |
| 909 | 19887 | Incyte21.O10.Alpha2_380793 | I:452536:16A01:H05 |
| 910 | 19907 | 2056035 | I:2056035:13A01:B05 |
| 911 | 19922 | 2102320 | I:2102320:13B01:A11 |
| 912 | 19946 | R38438 | RG:26394:10004:E05 |
| 913 | 19955 | R42581 | NIH50_31143 |
| 914 | 19996 | AA745592 | RG:1283072:10012:F11 |
| 915 | 20084 | Incyte18.C22.Alpha2_379815 | I:79576:15B02:B11 |
| 916 | 20170 | 1431632 | I:1431632:14B02:E05 |
| 917 | 20171 | 234123 | I:234123:14A02:F05 |
| 918 | 20184 | 2027012 | I:2027012:14B02:D11 |
| 919 | 20185 | 128997 | I:128997:14A02:E11 |
| 920 | 20209 | K1.B21.Laf3_325040 | RG:204966:10007:A11 |
| 921 | 20212 | AI377014 | RG:2065950:10016:B11 |
| 922 | 20262 | 1995380 | I:1995380:13B02:C05 |
| 923 | 20302 | H19394 | RG:51505:10005:G05 |
| 924 | 20331 | K1.L10.Laf3_324874 | RG:1519327:10013:F05 |
| 925 | 20401 | 1824332 | I:1824332:09A02:A11 |
| 926 | 20422 | 735149 | I:735149:15B01:C06 |
| 927 | 20436 | 1530218 | I:1530218:15B01:B12 |
| 928 | 20508 | 1963854 | I:1963854:18B01:F12 |
| 929 | 20530 | 167371 | I:167371:14B01:A12 |
| 930 | 20551 | K1.G12.Laf3_324901 | RG:151093:10006:D06 |
| 931 | 20554 | AA143470 | RG:591811:10002:E06 |
| 932 | 20557 | R87294 | RG:180978:10006:G06 |
| 933 | 20558 | AA187806 | RG:624431:10002:G06 |
| 934 | 20570 | AA159912 | RG:593090:10002:E12 |
| 935 | 20587 | Incyte21.K12.Alpha2_380821 | I:2303180:16A01:F06 |
| 936 | 20617 | 911015 | I:911015:13A01:E06 |
| 937 | 20624 | 1968576 | I:1968576:13B01:H06 |
| 938 | 20676 | K1.C11.Laf3_324881 | RG:967302:10012:B06 |
| 939 | 20696 | AA627319 | RG:1157566:10012:D12 |
| 940 | 20714 | Incyte19.I12.Alpha2_380051 | I:1943853:17B01:E06 |
| 941 | 20716 | 1218621 | I:1218621:17B01:F06 |
| 942 | 20799 | 1967095 | I:1967095:15A02:H12 |
| 943 | 20878 | 998612 | I:998612:14B02:G06 |
| 944 | 20892 | 699410 | I:699410:14B02:F12 |
| 945 | 20937 | Incyte18.I11.Alpha2_379645 | I:429577:16A02:E06 |
| 946 | 20939 | Incyte18.K11.Alpha2_379647 | I:2117221:16A02:F06 |
| 947 | 20976 | 1782172 | I:1782172:13B02:H06 |
| 948 | 20986 | 1986809 | I:1986809:13B02:E12 |
| 949 | 20990 | 1986550 | I:1986550:13B02:G12 |
| 950 | 20999 | W07144 | RG:300017:10008:D06 |
| 951 | 21029 | AA890655 | RG:1405692:10013:C06 |
| 952 | 21035 | K1.L12.Laf3_324906 | RG:1519656:10013:F06 |
| 953 | 21038 | AI268327 | RG:1880845:10015:G06 |
| 954 | 21050 | K2.I23.Laf3_325464 | RG:1841029:10015:E12 |
| 955 | 21189 | RTA22200010F.e.10.1.P | M00056386D:H12 |
| 956 | 21212 | 1.L13.Beta5_309680 | M00056193B:C11 |
| 957 | 21214 | 1.N13.Beta5_309682 | M00056193B:D06 |
| 958 | 21234 | 4.B13.Beta5_310822 | M00054882C:C06 |
| 959 | 21245 | 4.M13.Beta5_310833 | M00054680B:D06 |
| 960 | 21290 | RTA00002690F.a.18.2.P | M00042437B:G03 |
| 961 | 21307 | RTA22200001F.g.08.1.P | M00042702D:B02 |
| 962 | 21339 | RTA22200011F.f.10.1.P | M00056569A:B12 |
| 963 | 21345 | W79308 | RG:346944:10009:A01 |
| 964 | 21349 | K2.E02.Laf3_325124 | RG:376801:10009:C01 |
| 965 | 21391 | RTA22200016F.o.05.1.P | M00057273B:H10 |
| 966 | 21407 | RTA22200017F.e.08.1.P | M00057336A:C12 |
| 967 | 21539 | 1.C02.Beta5_309495 | M00055932A:C02 |
| 968 | 21543 | 1.G02.Beta5_309499 | M00055935D:B06 |
| 969 | 21546 | 2.J01.Beta5_309870 | M00056908D:D08 |
| 970 | 21568 | 2.P13.Beta5_310068 | M00056952B:C08 |
| 971 | 21569 | 4.A02.Beta5_310645 | M00054728C:E03 |
| 972 | 21575 | 4.G02.Beta5_310651 | M00054730D:F06 |
| 973 | 21650 | RTA22200009F.o.15.1.P | M00042867B:F03 |
| 974 | 21654 | RTA22200009F.o.18.1.P | M00042868A:A06 |
| 975 | 21658 | RTA22200009F.p.01.1.P | M00042869D:B09 |
| 976 | 21660 | RTA22200009F.p.01.1.P | M00042869D:B09 |
| 977 | 21671 | 2.G01.Beta5_309867 | M00056719C:G03 |
| 978 | 21693 | 2.M13.Beta5_310065 | M00056785D:G01 |
| 979 | 21694 | AI251081 | RG:2007272:20003:G07 |
| 980 | 21701 | AI066797 | RG:1637588:10014:C01 |
| 981 | 21705 | AI123832 | RG:1651303:10014:E01 |
| 982 | 21735 | 3.G01.Beta5_310251 | M00043310D:E11 |
| 983 | 21766 | RTA22200025F.o.18.2.P | M00055398B:C07 |
| 984 | 21781 | RTA22200012F.a.23.1.P | M00056667C:H09 |
| 985 | 21786 | RTA22200026F.d.20.1.P | M00055423C:C03 |
| 986 | 21791 | 3.P14.Beta5_310468 | M00056669B:E07 |
| 987 | 21947 | 4.K15.Beta5_310863 | M00054684B:C07 |
| 988 | 21966 | 5.N03.Beta5_311058 | M00057194B:G12 |
| 989 | 22003 | RTA22200001F.g.22.1.P | M00042711B:G09 |
| 990 | 22040 | ovarian1.G15.amp3_326923 | RG:1862072:20001:D08 |
| 991 | 22071 | W87399 | RG:417093:10009:D08 |
| 992 | 22078 | K2.N16.Laf3_325357 | RG:809602:10011:G08 |
| 993 | 22132 | RTA22200022F.n.06.1.P | M00054980D:H02 |
| 994 | 22227 | AI252058 | RG:1983965:20002:B08 |
| 995 | 22279 | 4.G04.Beta5_310683 | M00054737D:F10 |
| 996 | 22291 | 4.C16.Beta5_310871 | M00054785D:G05 |
| 997 | 22299 | 4.K16.Beta5_310879 | M00054806B:G03 |
| 998 | 22352 | RTA22200009F.l.07.2.P | M00042842B:E02 |
| 999 | 22414 | AA595123 | RG:1102368:10003:G02 |
| 1000 | 22423 | AI040910 | RG:1647954:10014:D08 |
| 1001 | 22451 | RTA00002691F.d.11.3.P | M00043372B:B06 |
| 1002 | 22597 | RTA22200010F.h.09.1.P | M00056417A:F02 |
| 1003 | 22604 | 1.L05.Beta5_309552 | M00056150C:A10 |
| 1004 | 22608 | 1.P05.Beta5_309556 | M00056151C:A12 |
| 1005 | 22627 | RTA22200020F.j.04.1.P | M00054645B:C12 |
| 1006 | 22629 | 4.E05.Beta5_310697 | M00054646A:B10 |
| 1007 | 22632 | 4.H05.Beta5_310700 | M00054858D:F04 |
| 1008 | 22633 | RTA22200020F.j.09.1.P | M00054647A:A09 |
| 1009 | 22637 | RTA22200020F.j.11.1.P | M00054647D:E01 |
| 1010 | 22678 | 5.F17.Beta5_311274 | M00057231A:G04 |
| 1011 | 22697 | RTA22200001F.c.18.1.P | M00042551B:D12 |
| 1012 | 22698 | RTA22200009F.c.12.2.P | M00042513A:D03 |
| 1013 | 22703 | RTA22200001F.c.21.1.P | M00042551D:D12 |
| 1014 | 22710 | RTA22200009F.h.06.1.P | M00042803C:F11 |
| 1015 | 22714 | RTA22200009F.h.11.1.P | M00042805D:D12 |
| 1016 | 22715 | RTA22200001F.i.13.1.P | M00042731A:G04 |
| 1017 | 22729 | RTA22200011F.b.21.1.P | M00056537D:B06 |
| 1018 | 22775 | K2.G18.Laf3_325382 | RG:417109:10009:D09 |
| 1019 | 22848 | RTA22200022F.o.15.1.P | M00054995B:F02 |
| 1020 | 22896 | RTA22200007F.b.23.1.P | M00056151C:A12 |
| 1021 | 22931 | ovarian1.C18.amp3_326967 | RG:1983997:20002:B09 |
| 1022 | 22979 | 4.C06.Beta5_310711 | M00054744C:B02 |
| 1023 | 23050 | RTA22200009F.l.19.2.P | M00042845D:A12 |
| 1024 | 23053 | RTA22200001F.o.20.1.P | M00054800C:H10 |
| 1025 | 23097 | 2.I17.Beta5_310125 | M00056809B:A12 |
| 1026 | 23118 | AA595100 | RG:1102907:10003:G03 |
| 1027 | 23120 | AA640934 | RG:1173536:10003:H03 |
| 1028 | 23127 | AI027379 | RG:1650120:10014:D09 |
| 1029 | 23143 | RTA22200018F.j.04.1.P | M00043329D:E09 |
| 1030 | 23153 | RTA22200018F.p.12.1.P | M00043376A:G08 |
| 1031 | 23193 | RTA22200012F.c.07.1.P | M00056683B:F08 |
| 1032 | 23351 | 4.G19.Beta5_310923 | M00054700C:E02 |
| 1033 | 23407 | 1562.P22.gz43_208154 | M00042570C:H05 |
| 1034 | 23416 | RTA22200009F.i.02.2.P | M00042811B:A05 |
| 1035 | 23511 | 2.H20.Beta5_310172 | M00042457C:A05 |
| 1036 | 23513 | 2.J20.Beta5_310174 | M00042457C:A05 |
| 1037 | 23514 | RTA22200019F.k.01.1.P | M00054520A:D04 |
| 1038 | 23542 | RTA22200022F.p.04.1.P | M00055001A:B01 |
| 1039 | 23544 | RTA22200022F.p.07.1.P | M00055002B:G06 |
| 1040 | 23637 | AI251722 | RG:1984571:20002:C10 |
| 1041 | 23678 | 2.N19.Beta5_310162 | M00056964D:C08 |
| 1042 | 23689 | 4.I08.Beta5_310749 | M00054752A:E11 |
| 1043 | 23695 | 4.O08.Beta5_310755 | M00054760D:B10 |
| 1044 | 23743 | RTA22200016F.a.11.1.P | M00057156D:C12 |
| 1045 | 23755 | RTA22200001F.p.18.1.P | M00054917B:G02 |
| 1046 | 23758 | RTA22200009F.m.16.1.P | M00042850D:A06 |
| 1047 | 23765 | RTA22200002F.f.19.1.P | M00055468D:D05 |
| 1048 | 23770 | RTA22200010F.b.10.1.P | M00056360A:D09 |
| 1049 | 23772 | RTA22200010F.b.11.1.P | M00056360A:E07 |
| 1050 | 23776 | RTA22200010F.b.17.1.P | M00056362D:E05 |
| 1051 | 23784 | AI305307 | RG:1997021:20003:D04 |
| 1052 | 23798 | AI305997 | RG:1996788:20003:C10 |
| 1053 | 23813 | AI017336 | RG:1638979:10014:C04 |
| 1054 | 23816 | AA600197 | RG:949960:10003:D04 |
| 1055 | 23831 | AI027534 | RG:1650444:10014:D10 |
| 1056 | 23847 | 3.G07.Beta5_310347 | M00043350A:C04 |
| 1057 | 23875 | 3.D08.Beta5_310360 | M00056646D:G05 |
| 1058 | 23889 | RTA22200012F.c.19.1.P | M00056688C:E07 |
| 1059 | 24014 | 1.N09.Beta5_309618 | M00056175D:B05 |
| 1060 | 24033 | 4.A09.Beta5_310757 | M00054654A:F12 |
| 1061 | 24034 | 4.B09.Beta5_310758 | M00054868D:F12 |
| 1062 | 24064 | 4.P21.Beta5_310964 | M00054922B:B04 |
| 1063 | 24074 | 5.J09.Beta5_311150 | M00057211D:A03 |
| 1064 | 24094 | 5.N21.Beta5_311346 | M00057253A:C02 |
| 1065 | 24099 | RTA22200001F.e.17.1.P | M00042573B:A02 |
| 1066 | 24115 | RTA22200001F.k.19.1.P | M00042885C:A12 |
| 1067 | 24119 | RTA22200001F.k.23.1.P | M00042886D:H10 |
| 1068 | 24126 | RTA22200009F.i.21.2.P | M00042818D:A08 |
| 1069 | 24128 | RTA22200009F.i.22.2.P | M00042819A:C07 |
| 1070 | 24137 | RTA22200011F.d.18.1.P | M00056553C:E10 |
| 1071 | 24193 | 2.B10.Beta5_310006 | M00057302A:F08 |
| 1072 | 24209 | 2.B22.Beta5_310198 | M00042460B:A08 |
| 1073 | 24213 | 2.F22.Beta5_310202 | M00042516B:A08 |
| 1074 | 24222 | 3.M22.Beta5_310593 | M00054529C:G04 |
| 1075 | 24246 | RTA22200023F.a.09.1.P | M00055015C:H02 |
| 1076 | 24289 | 6.A10.Beta5_311541 | M00055204B:C04 |
| 1077 | 24315 | 6.K22.Beta5_311743 | M00055254C:E11 |
| 1078 | 24395 | 4.K10.Beta5_310783 | M00054765A:F10 |
| 1079 | 24450 | RTA22200009F.m.19.1.P | M00042851D:H04 |
| 1080 | 24452 | RTA22200009F.m.22.1.P | M00042853A:F01 |
| 1081 | 24457 | RTA22200002F.a.12.1.P | M00055426A:G06 |
| 1082 | 24464 | RTA22200009F.n.13.1.P | M00042857C:B11 |
| 1083 | 24466 | RTA22200010F.c.04.1.P | M00056365B:E08 |
| 1084 | 24467 | RTA22200002F.h.01.1.P | M00055496A:G12 |
| 1085 | 24472 | RTA22200010F.c.13.1.P | M00056369A:A06 |
| 1086 | 24479 | RTA22200002F.i.14.1.P | M00055510D:A08 |
| 1087 | 24483 | 2.C09.Beta5_309991 | M00056748C:B08 |
| 1088 | 24485 | 2.E09.Beta5_309993 | M00056749A:F01 |
| 1089 | 24490 | AI223486 | RG:2002551:20003:E05 |
| 1090 | 24510 | AI246847 | RG:2007337:20003:G11 |
| 1091 | 24525 | AI056508 | RG:1669553:10014:G05 |
| 1092 | 24549 | 3.E09.Beta5_310377 | M00043355B:F10 |
| 1093 | 24558 | 3.N09.Beta5_310386 | M00054557C:D09 |
| 1094 | 24559 | 3.O09.Beta5_310387 | M00043358B:G11 |
| 1095 | 24568 | 3.H21.Beta5_310572 | M00054596B:H09 |
| 1096 | 24587 | 3.L10.Beta5_310400 | M00056659A:D08 |
| 1097 | 24595 | RTA22200012F.e.05.1.P | M00056701B:A11 |
| 1098 | 24672 | RTA22200025F.o.13.2.P | M00055396C:E08 |
| 1099 | 24708 | 1.D11.Beta5_309640 | M00056180C:E06 |
| 1100 | 24740 | RTA22200022F.b.10.1.P | M00054876A:H08 |
| 1101 | 24754 | 4.B23.Beta5_310982 | M00054923C:D01 |
| 1102 | 24755 | 4.C23.Beta5_310983 | M00054725A:E09 |
| 1103 | 24762 | 4.J23.Beta5_310990 | M00054927A:H09 |
| 1104 | 24776 | 5.H11.Beta5_311180 | M00057216C:G01 |
| 1105 | 24792 | 5.H23.Beta5_311372 | M00057259B:B08 |
| 1106 | 24805 | RTA22200001F.f.13.1.P | M00042695D:D09 |
| 1107 | 24810 | RTA22200009F.e.15.1.P | M00042772D:F02 |
| 1108 | 24897 | 2.B12.Beta5_310038 | M00057310A:A07 |
| 1109 | 24930 | RTA22200022F.l.01.1.P | M00054961D:E08 |
| 1110 | 24960 | RTA22200023F.b.22.1.P | M00055027B:C11 |
| 1111 | 24996 | 6.D12.Beta5_311576 | M00056180C:E06 |
| 1112 | 25011 | RTA22200024F.o.16.1.P | M00055256D:B12 |
| 1113 | 25030 | AA230271 | RG:1007983:20004:C06 |
| 1114 | 25111 | 4.G24.Beta5_311003 | M00054831A:G04 |
| 1115 | 25156 | RTA22200009F.o.01.1.P | M00042862D:A12 |
| 1116 | 25158 | RTA22200009F.o.01.1.P | M00042862D:A12 |
| 1117 | 25177 | RTA22200002F.j.02.1.P | M00055514B:A05 |
| 1118 | 25191 | 2.G11.Beta5_310027 | M00056763B:A12 |
| 1119 | 25194 | AI223471 | RG:2002542:20003:E06 |
| 1120 | 25198 | AI251083 | RG:2007278:20003:G06 |
| 1121 | 25203 | 2.C23.Beta5_310215 | M00056822A:E08 |
| 1122 | 25205 | 2.E23.Beta5_310217 | M00056822C:G03 |
| 1123 | 25209 | 2.I23.Beta5_310221 | M00056823D:H02 |
| 1124 | 25217 | AI000585 | RG:1609994:10014:A06 |
| 1125 | 25226 | AA573799 | RG:1012852:10003:E06 |
| 1126 | 25236 | AA488335 | RG:842978:10003:B12 |
| 1127 | 25246 | AA643320 | RG:1172262:10003:G12 |
| 1128 | 25248 | AA858424 | RG:1420940:10003:H12 |
| 1129 | 25252 | 3.D11.Beta5_310408 | M00054558D:A01 |
| 1130 | 25261 | RTA22200018F.n.10.1.P | M00043363C:C05 |
| 1131 | 25273 | RTA22200019F.c.13.1.P | M00043407C:A05 |
| 1132 | 25274 | RTA22200020F.g.17.1.P | M00054621D:F07 |
| 1133 | 25286 | RTA22200026F.c.06.1.P | M00055413A:G12 |
| 1134 | 25288 | RTA22200026F.c.11.1.P | M00055414D:A09 |
| 1135 | 25290 | RTA22200026F.c.12.1.P | M00055414D:E01 |
| 1136 | 25301 | 3.F24.Beta5_310618 | M00056707B:C01 |
| 1137 | 25349 | Incyte5.G11.T3pINCY_352982 | I:3134070:10A02:D06 |
| 1138 | 25380 | Incyt14.F12.T3pINCY_377245 | I:2921194:04B02:C06 |
| 1139 | 25384 | Incyt14.J12.T3pINCY_377249 | I:2671453:04B02:E06 |
| 1140 | 25389 | I1.O12.T3pINCY1_343695 | I:1728607:04A02:H06 |
| 1141 | 25392 | Incyt14.B24.T3pINCY_377433 | I:2655513:04B02:A12 |
| 1142 | 25395 | I1.E24.T3pINCY1_343877 | I:1510349:04A02:C12 |
| 1143 | 25405 | I1.O24.T3pINCY1_343887 | I:2683114:04A02:H12 |
| 1144 | 25420 | 1518323 | I:1518323:02B02:G06 |
| 1145 | 25472 | 035JN007.A01.jet718_287634 | 035JN007.A01 |
| 1146 | 25481 | 7264.K01.Beta5_496302 | 035JN005.F01 |
| 1147 | 25482 | 7264.L01.Beta5_496303 | 035JN007.F01 |
| 1148 | 25491 | 7264.E13.Beta5_496488 | 035JN005.C07 |
| 1149 | 25510 | 035JN011.D01.jet718_288405 | 035JN011.D01 |
| 1150 | 25516 | 035JN011.G01.jet718_288408 | 035JN011.G01 |
| 1151 | 25519 | 035JN009.A07.jet718_288066 | 035JN009.A07 |
| 1152 | 25529 | 035JN009.F07.jet718_288071 | 035JN009.F07 |
| 1153 | 25541 | 035JN013.D01.SP6_315878 | 035JN013.D01 |
| 1154 | 25545 | 035JN013.F01.SP6_315880 | 035JN013.F01 |
| 1155 | 25551 | 035JN013.A07.SP6_315923 | 035JN013.A07 |
| 1156 | 25566 | 7815.P13.Beta5_497376 | 035JN015.H07 |
| 1157 | 25571 | 035JN017.C01.SP6_316549 | 035JN017.C01 |
| 1158 | 25593 | 035JN017.F07.SP6_316600 | 035JN017.F07 |
| 1159 | 25596 | 7559.N13.Beta5_511475 | 035JN019.G07 |
| 1160 | 25600 | 035JN023.A01.SP6_317123 | 035JN023.A01 |
| 1161 | 25601 | 035JN021.B01.SP6_316932 | 035JN021.B01 |
| 1162 | 25610 | 035JN023.F01.SP6_317128 | 035JN023.F01 |
| 1163 | 25612 | 035JN023.G01.SP6_317129 | 035JN023.G01 |
| 1164 | 25617 | 035JN021.B07.SP6_316980 | 035JN021.B07 |
| 1165 | 25621 | 035JN021.D07.SP6_316982 | 035JN021.D07 |
| 1166 | 25636 | 035JN027.C01.GZ43_334632 | 035Jn027.C01 |
| 1167 | 25643 | 035JN025.G01.GZ43_334444 | 035JN025.G01 |
| 1168 | 25647 | 035JN025.A07.GZ43_334486 | 035JN025.A07 |
| 1169 | 25648 | 035JN027.A07.GZ43_334678 | 035Jn027.A07 |
| 1170 | 25656 | 035JN027.E07.GZ43_334682 | 035Jn027.E07 |
| 1171 | 25660 | 035JN027.G07.GZ43_334684 | 035Jn027.G07 |
| 1172 | 25666 | 035JN031.B01.GZ43_406194 | 035Jn031.B01 |
| 1173 | 25668 | 7947.F01.Beta5_483642 | 035Jn031.C01 |
| 1174 | 25691 | 035JN029.G07.GZ43_334972 | 035JN029.G07 |
| 1175 | 25697 | 037XN001.B01.sp6_317640 | 037XN001.B01 |
| 1176 | 25715 | 037XN001.C07.sp6_317689 | 037XN001.C07 |
| 1177 | 25731 | 037XN005.C01.sp6_318121 | 037XN005.C01 |
| 1178 | 25736 | 037XN007.E01.sp6_318507 | 037XN007.E01 |
| 1179 | 25744 | 037XN007.A07.sp6_318551 | 037XN007.A07 |
| 1180 | 25745 | 037XN005.B07.sp6_318168 | 037XN005.B07 |
| 1181 | 25751 | 037XN005.E07.sp6_318171 | 037XN005.E07 |
| 1182 | 25752 | 037XN007.E07.sp6_318555 | 037XN007.E07 |
| 1183 | 25812 | 035JN004.C07.jet718_284263 | 035JN004.C07 |
| 1184 | 25822 | 035JN004.H07.jet718_284268 | 035JN004.H07 |
| 1185 | 25824 | 7264.B02.Beta5_496309 | 035JN008.A01 |
| 1186 | 25826 | 7264.D02.Beta5_496311 | 035JN008.B01 |
| 1187 | 25834 | 7264.L02.Beta5_496319 | 035JN008.F01 |
| 1188 | 25837 | 7264.O02.Beta5_496322 | 035JN006.H01 |
| 1189 | 25838 | 035JN008.H01.jet718_287833 | 035JN008.H01 |
| 1190 | 25843 | 7264.E14.Beta5_496504 | 035JN006.C07 |
| 1191 | 25844 | 7264.F14.Beta5_496505 | 035JN008.C07 |
| 1192 | 25849 | 035JN006.F07.jet718_287495 | 035JN006.F07 |
| 1193 | 25853 | 7264.O14.Beta5_496514 | 035JN006.H07 |
| 1194 | 25864 | 7569.J02.Beta5_497578 | 035JN012.E01 |
| 1195 | 25869 | 7569.O02.Beta5_497583 | 035JN010.H01 |
| 1196 | 25872 | 7569.B14.Beta5_497762 | 035JN012.A07 |
| 1197 | 25876 | 7569.F14.Beta5_497766 | 035JN012.C07 |
| 1198 | 25883 | 7569.M14.Beta5_497773 | 035JN010.G07 |
| 1199 | 25893 | 035JN014.D01.SP6_315974 | 035JN014.D01 |
| 1200 | 25897 | 7815.K02.Beta5_497195 | 035JN014.F01 |
| 1201 | 25898 | 035JN016.F01.SP6_316360 | 035JN016.F01 |
| 1202 | 25901 | 7815.O02.Beta5_497199 | 035JN014.H01 |
| 1203 | 25906 | 035JN016.B07.SP6_316404 | 035JN016.B07 |
| 1204 | 25908 | 035JN016.C07.SP6_316405 | 035JN016.C07 |
| 1205 | 25915 | 035JN014.G07.SP6_316025 | 035JN014.G07 |
| 1206 | 25919 | 7559.A02.Beta5_511286 | 035JN018.A01 |
| 1207 | 25920 | 035JN020.A01.SP6_316835 | 035JN020.A01 |
| 1208 | 25922 | 7559.D02.Beta5_511289 | 035JN020.B01 |
| 1209 | 25927 | 7559.I02.Beta5_511294 | 035JN018.E01 |
| 1210 | 25930 | 035JN020.F01.SP6_316840 | 035JN020.F01 |
| 1211 | 25931 | 7559.M02.Beta5_511298 | 035JN018.G01 |
| 1212 | 25933 | 7559.O02.Beta5_511300 | 035JN018.H01 |
| 1213 | 25936 | 7559.B14.Beta5_511479 | 035JN020.A07 |
| 1214 | 25938 | 035JN020.B07.SP6_316884 | 035JN020.B07 |
| 1215 | 25951 | 035JN022.A01.SP6_317027 | 035JN022.A01 |
| 1216 | 25953 | 035JN022.B01.SP6_317028 | 035JN022.B01 |
| 1217 | 25956 | 7852.F02.Beta5_510907 | 035JN024.C01 |
| 1218 | 25958 | 035JN024.D01.SP6_317222 | 035JN024.D01 |
| 1219 | 25960 | 7852.J02.Beta5_510911 | 035JN024.E01 |
| 1220 | 25967 | 035JN022.A07.SP6_317075 | 035JN022.A07 |
| 1221 | 25973 | 7852.G14.Beta5_511100 | 035JN022.D07 |
| 1222 | 25980 | 035JN024.G07.SP6_317273 | 035JN024.G07 |
| 1223 | 25983 | 035JN026.A01.GZ43_334534 | 035JN026.A01 |
| 1224 | 26000 | 035JN028.A07.GZ43_334870 | 035JN028.A07 |
| 1225 | 26001 | 035JN026.B07.GZ43_334583 | 035JN026.B07 |
| 1226 | 26009 | 035JN026.F07.GZ43_334587 | 035JN026.F07 |
| 1227 | 26010 | 7926.L14.Beta5_497004 | 035JN028.F07 |
| 1228 | 26014 | 035JN028.H07.GZ43_334877 | 035JN028.H07 |
| 1229 | 26019 | 035JN030.C01.GZ43_335035 | 035JN030.C01 |
| 1230 | 26024 | 035JN032.E01.GZ43_335229 | 035JN032.E01 |
| 1231 | 26033 | 035JN030.B07.GZ43_335082 | 035JN030.B07 |
| 1232 | 26040 | 035JN032.E07.GZ43_335277 | 035JN032.E07 |
| 1233 | 26042 | 035JN032.F07.GZ43_335278 | 035JN032.F07 |
| 1234 | 26049 | 037XN002.B01.sp6_317832 | 037XN002.B01 |
| 1235 | 26058 | 037XN004.F01.sp6_318028 | 037XN004.F01 |
| 1236 | 26059 | 037XN002.G01.sp6_317837 | 037XN002.G01 |
| 1237 | 26105 | 037XN006.F07.sp6_318460 | 037XN006.F07 |
| 1238 | 26109 | 037XN006.H07.sp6_318462 | 037XN006.H07 |
| 1239 | 26167 | 035JN001.E08.jet718_272145 | 035JN001.E08 |
| 1240 | 26177 | 035JN005.B02.jet718_284414 | 035JN005.B02 |
| 1241 | 26179 | 035JN005.C02.jet718_284415 | 035JN005.C02 |
| 1242 | 26182 | 7264.H03.Beta5_496331 | 035JN007.D02 |
| 1243 | 26187 | 035JN005.G02.jet718_284419 | 035JN005.G02 |
| 1244 | 26194 | 7264.D15.Beta5_496519 | 035JN007.B08 |
| 1245 | 26196 | 7264.F15.Beta5_496521 | 035JN007.C08 |
| 1246 | 26202 | 7264.L15.Beta5_496527 | 035JN007.F08 |
| 1247 | 26204 | 7264.N15.Beta5_496529 | 035JN007.G08 |
| 1248 | 26205 | 7264.O15.Beta5_496530 | 035JN005.H08 |
| 1249 | 26207 | 7569.A03.Beta5_497585 | 035JN009.A02 |
| 1250 | 26213 | 035JN009.D02.jet718_288029 | 035JN009.D02 |
| 1251 | 26221 | 7569.O03.Beta5_497599 | 035JN009.H02 |
| 1252 | 26228 | 035JN011.C08.jet718_288460 | 035JN011.C08 |
| 1253 | 26234 | 035JN011.F08.jet718_288463 | 035JN011.F08 |
| 1254 | 26238 | 035JN011.H08.jet718_288465 | 035JN011.H08 |
| 1255 | 26240 | 035JN015.A02.SP6_316075 | 035JN015.A02 |
| 1256 | 26264 | 035JN015.E08.SP6_316127 | 035JN015.E08 |
| 1257 | 26266 | 035JN015.F08.SP6_316128 | 035JN015.F08 |
| 1258 | 26269 | 035JN013.H08.SP6_315938 | 035JN013.H08 |
| 1259 | 26303 | 7852.A03.Beta5_510918 | 035JN021.A02 |
| 1260 | 26315 | 7852.M03.Beta5_510930 | 035JN021.G02 |
| 1261 | 26318 | 7852.P03.Beta5_510933 | 035JN023.H02 |
| 1262 | 26322 | 035JN023.B08.SP6_317180 | 035JN023.B08 |
| 1263 | 26329 | 7852.K15.Beta5_511120 | 035JN021.F08 |
| 1264 | 26347 | 035JN025.G02.GZ43_334452 | 035JN025.G02 |
| 1265 | 26358 | 035JN027.D08.GZ43_334689 | 035Jn027.D08 |
| 1266 | 26364 | 035JN027.G08.GZ43_334692 | 035Jn027.G08 |
| 1267 | 26365 | 035JN025.H08.GZ43_334501 | 035JN025.H08 |
| 1268 | 26369 | 035JN029.B02.GZ43_334927 | 035JN029.B02 |
| 1269 | 26371 | 035JN029.C02.GZ43_334928 | 035JN029.C02 |
| 1270 | 26378 | 035JN031.F02.GZ43_406206 | 035Jn031.F02 |
| 1271 | 26384 | 035JN031.A08.GZ43_406249 | 035Jn031.A08 |
| 1272 | 26387 | 035JN029.C08.GZ43_334976 | 035JN029.C08 |
| 1273 | 26389 | 035JN029.D08.GZ43_334977 | 035JN029.D08 |
| 1274 | 26396 | 7947.N15.Beta5_483874 | 035Jn031.G08 |
| 1275 | 26415 | 037XN001.A08.sp6_317695 | 037XN001.A08 |
| 1276 | 26422 | 037XN003.D08.sp6_317986 | 037XN003.D08 |
| 1277 | 26425 | 037XN001.F08.sp6_317700 | 037XN001.F08 |
| 1278 | 26433 | 037XN005.B02.sp6_318128 | 037XN005.B02 |
| 1279 | 26496 | 035JN004.A02.jet718_284221 | 035JN004.A02 |
| 1280 | 26500 | 035JN004.C02.jet718_284223 | 035JN004.C02 |
| 1281 | 26515 | 035JN002.C08.jet718_283887 | 035JN002.C08 |
| 1282 | 26517 | 035JN002.D08.jet718_283888 | 035JN002.D08 |
| 1283 | 26522 | 035JN004.F08.jet718_284274 | 035JN004.F08 |
| 1284 | 26529 | 7264.C04.Beta5_496342 | 035JN006.B02 |
| 1285 | 26531 | 7264.E04.Beta5_496344 | 035JN006.C02 |
| 1286 | 26542 | 035JN008.H02.jet718_287841 | 035JN008.H02 |
| 1287 | 26550 | 035JN008.D08.jet718_287885 | 035JN008.D08 |
| 1288 | 26552 | 035JN008.E08.jet718_287886 | 035JN008.E08 |
| 1289 | 26555 | 7264.M16.Beta5_496544 | 035JN006.G08 |
| 1290 | 26564 | 035JN012.C02.jet718_288604 | 035JN012.C02 |
| 1291 | 26565 | 035JN010.D02.jet718_288221 | 035JN010.D02 |
| 1292 | 26574 | 7569.P04.Beta5_497616 | 035JN012.H02 |
| 1293 | 26579 | 7569.E16.Beta5_497797 | 035JN010.C08 |
| 1294 | 26581 | 7569.G16.Beta5_497799 | 035JN010.D08 |
| 1295 | 26588 | 7569.N16.Beta5_497806 | 035JN012.G08 |
| 1296 | 26590 | 7569.P16.Beta5_497808 | 035JN012.H08 |
| 1297 | 26595 | 035JN014.C02.SP6_315981 | 035JN014.C02 |
| 1298 | 26604 | 035JN016.G02.SP6_316369 | 035JN016.G02 |
| 1299 | 26617 | 035JN014.F08.SP6_316032 | 035JN014.F08 |
| 1300 | 26618 | 035JN016.F08.SP6_316416 | 035JN016.F08 |
| 1301 | 26632 | 035JN020.E02.SP6_316847 | 035JN020.E02 |
| 1302 | 26636 | 035JN020.G02.SP6_316849 | 035JN020.G02 |
| 1303 | 26641 | 035JN018.B08.SP6_316700 | 035JN018.B08 |
| 1304 | 26643 | 035JN018.C08.SP6_316701 | 035JN018.C08 |
| 1305 | 26654 | 035JN020.H08.SP6_316898 | 035JN020.H08 |
| 1306 | 26670 | 7852.P04.Beta5_510949 | 035JN024.H02 |
| 1307 | 26676 | 7852.F16.Beta5_511131 | 035JN024.C08 |
| 1308 | 26690 | 035JN028.B02.GZ43_334831 | 035JN028.B02 |
| 1309 | 26691 | 035JN026.C02.GZ43_334544 | 035JN026.C02 |
| 1310 | 26694 | 035JN028.D02.GZ43_334833 | 035JN028.D02 |
| 1311 | 26696 | 035JN028.E02.GZ43_334834 | 035JN028.E02 |
| 1312 | 26714 | 035JN028.F08.GZ43_334883 | 035JN028.F08 |
| 1313 | 26719 | 035JN030.A02.GZ43_335041 | 035JN030.A02 |
| 1314 | 26723 | 035JN030.C02.GZ43_335043 | 035JN030.C02 |
| 1315 | 26732 | 035JN032.G02.GZ43_335239 | 035JN032.G02 |
| 1316 | 26741 | 035JN030.D08.GZ43_335092 | 035JN030.D08 |
| 1317 | 26742 | 7947.H16.Beta5_483884 | 035JN032.D08 |
| 1318 | 26760 | 037XN004.E02.sp6_318035 | 037XN004.E02 |
| 1319 | 26765 | 037XN002.H02.sp6_317846 | 037XN002.H02 |
| 1320 | 26771 | 037XN002.C08.sp6_317889 | 037XN002.C08 |
| 1321 | 26791 | 037XN006.E02.sp6_318419 | 037XN006.E02 |
| 1322 | 26801 | 037XN006.B08.sp6_318464 | 037XN006.B08 |
| 1323 | 26803 | 037XN006.C08.sp6_318465 | 037XN006.C08 |
| 1324 | 26809 | 037XN006.F08.sp6_318468 | 037XN006.F08 |
| 1325 | 26882 | 7264.D05.Beta5_496359 | 035JN007.B03 |
| 1326 | 26884 | 7264.F05.Beta5_496361 | 035JN007.C03 |
| 1327 | 26889 | 7264.K05.Beta5_496366 | 035JN005.F03 |
| 1328 | 26895 | 7264.A17.Beta5_496548 | 035JN005.A09 |
| 1329 | 26906 | 7264.L17.Beta5_496559 | 035JN007.F09 |
| 1330 | 26909 | 035JN005.H09.jet718_284476 | 035JN005.H09 |
| 1331 | 26918 | 035JN011.D03.jet718_288421 | 035JN011.D03 |
| 1332 | 26922 | 035JN011.F03.jet718_288423 | 035JN011.F03 |
| 1333 | 26924 | 7569.N05.Beta5_497630 | 035JN011.G03 |
| 1334 | 26939 | 035JN009.G09.jet718_288088 | 035JN009.G09 |
| 1335 | 26942 | 035JN011.H09.jet718_288473 | 035JN011.H09 |
| 1336 | 26948 | 035JN015.C03.SP6_316085 | 035JN015.C03 |
| 1337 | 26953 | 035JN013.F03.SP6_315896 | 035JN013.F03 |
| 1338 | 26958 | 035JN015.H03.SP6_316090 | 035JN015.H03 |
| 1339 | 26966 | 035JN015.D09.SP6_316134 | 035JN015.D09 |
| 1340 | 26970 | 035JN015.F09.SP6_316136 | 035JN015.F09 |
| 1341 | 26974 | 035JN015.H09.SP6_316138 | 035JN015.H09 |
| 1342 | 26979 | 7559.E05.Beta5_511338 | 035JN017.C03 |
| 1343 | 26995 | 035JN017.C09.SP6_316613 | 035JN017.C09 |
| 1344 | 27000 | 035JN019.E09.SP6_316807 | 035JN019.E09 |
| 1345 | 27012 | 035JN023.C03.sp6_317141 | 035JN023.C03 |
| 1346 | 27017 | 035JN021.F03.sp6_316952 | 035JN021.F03 |
| 1347 | 27019 | 035JN021.G03.sp6_316953 | 035JN021.G03 |
| 1348 | 27037 | 7852.O17.Beta5_511156 | 035JN021.H09 |
| 1349 | 27041 | 035JN025.B03.GZ43_334455 | 035JN025.B03 |
| 1350 | 27043 | 035JN025.C03.GZ43_334456 | 035JN025.C03 |
| 1351 | 27045 | 035JN025.D03.GZ43_334457 | 035JN025.D03 |
| 1352 | 27046 | 035JN027.D03.GZ43_334649 | 035Jn027.D03 |
| 1353 | 27050 | 035JN027.F03.GZ43_334651 | 035Jn027.F03 |
| 1354 | 27061 | 035JN025.D09.GZ43_334505 | 035JN025.D09 |
| 1355 | 27070 | 035JN027.H09.GZ43_334701 | 035Jn027.H09 |
| 1356 | 27083 | 035JN029.G03.GZ43_334940 | 035JN029.G03 |
| 1357 | 27089 | 035JN029.B09.GZ43_334983 | 035JN029.B09 |
| 1358 | 27091 | 035JN029.C09.GZ43_334984 | 035JN029.C09 |
| 1359 | 27093 | 035JN029.D09.GZ43_334985 | 035JN029.D09 |
| 1360 | 27095 | 035JN029.E09.GZ43_334986 | 035JN029.E09 |
| 1361 | 27096 | 035JN031.E09.GZ43_406261 | 035Jn031.E09 |
| 1362 | 27098 | 7947.L17.Beta5_483904 | 035Jn031.F09 |
| 1363 | 27109 | 037XN001.D03.sp6_317658 | 037XN001.D03 |
| 1364 | 27113 | 037XN001.F03.sp6_317660 | 037XN001.F03 |
| 1365 | 27114 | 037XN003.F03.sp6_317948 | 037XN003.F03 |
| 1366 | 27123 | 037XN001.C09.sp6_317705 | 037XN001.C09 |
| 1367 | 27133 | 037XN001.H09.sp6_317710 | 037XN001.H09 |
| 1368 | 27148 | 037XN007.G03.sp6_318525 | 037XN007.G03 |
| 1369 | 27158 | 037XN007.D09.sp6_318570 | 037XN007.D09 |
| 1370 | 27205 | 035JN002.D03.jet718_283848 | 035JN002.D03 |
| 1371 | 27221 | 035JN002.D09.jet718_283896 | 035JN002.D09 |
| 1372 | 27244 | 035JN008.G03.jet718_287848 | 035JN008.G03 |
| 1373 | 27249 | 035JN006.B09.jet718_287507 | 035JN006.B09 |
| 1374 | 27268 | 7569.F06.Beta5_497638 | 035JN012.C03 |
| 1375 | 27269 | 7569.G06.Beta5_497639 | 035JN010.D03 |
| 1376 | 27275 | 7569.M06.Beta5_497645 | 035JN010.G03 |
| 1377 | 27298 | 035JN016.B03.SP6_316372 | 035JN016.B03 |
| 1378 | 27306 | 035JN016.F03.SP6_316376 | 035JN016.F03 |
| 1379 | 27316 | 7815.F18.Beta5_497446 | 035JN016.C09 |
| 1380 | 27318 | 035JN016.D09.SP6_316422 | 035JN016.D09 |
| 1381 | 27323 | 035JN014.G09.SP6_316041 | 035JN014.G09 |
| 1382 | 27331 | 035JN018.C03.SP6_316661 | 035JN018.C03 |
| 1383 | 27336 | 035JN020.E03.SP6_316855 | 035JN020.E03 |
| 1384 | 27344 | 035JN020.A09.SP6_316899 | 035JN020.A09 |
| 1385 | 27350 | 035JN020.D09.SP6_316902 | 035JN020.D09 |
| 1386 | 27366 | 035JN024.D03.SP6_317238 | 035JN024.D03 |
| 1387 | 27368 | 035JN024.E03.SP6_317239 | 035JN024.E03 |
| 1388 | 27369 | 035JN022.F03.SP6_317048 | 035JN022.F03 |
| 1389 | 27378 | 035JN024.B09.SP6_317284 | 035JN024.B09 |
| 1390 | 27386 | 035JN024.F09.SP6_317288 | 035JN024.F09 |
| 1391 | 27389 | 7852.O18.Beta5_511172 | 035JN022.H09 |
| 1392 | 27406 | 035JN028.H03.GZ43_334845 | 035JN028.H03 |
| 1393 | 27427 | 035JN030.C03.GZ43_335051 | 035JN030.C03 |
| 1394 | 27431 | 035JN030.E03.GZ43_335053 | 035JN030.E03 |
| 1395 | 27433 | 035JN030.F03.GZ43_335054 | 035JN030.F03 |
| 1396 | 27435 | 035JN030.G03.GZ43_335055 | 035JN030.G03 |
| 1397 | 27450 | 035JN032.F09.GZ43_335294 | 035JN032.F09 |
| 1398 | 27451 | 035JN030.G09.GZ43_335103 | 035JN030.G09 |
| 1399 | 27453 | 035JN030.H09.GZ43_335104 | 035JN030.H09 |
| 1400 | 27517 | 037XN006.H09.sp6_318478 | 037XN006.H09 |
| 1401 | 27574 | 035JN003.D10.jet718_284096 | 035JN003.D10 |
| 1402 | 27576 | 035JN003.E10.jet718_284097 | 035JN003.E10 |
| 1403 | 27581 | 035JN001.H10.jet718_272164 | 035JN001.H10 |
| 1404 | 27586 | 7264.D07.Beta5_496391 | 035JN007.B04 |
| 1405 | 27599 | 035JN005.A10.jet718_284477 | 035JN005.A10 |
| 1406 | 27603 | 7264.E19.Beta5_496584 | 035JN005.C10 |
| 1407 | 27612 | 035JN007.G10.jet718_287712 | 035JN007.G10 |
| 1408 | 27616 | 035JN011.A04.jet718_288426 | 035JN011.A04 |
| 1409 | 27634 | 035JN011.B10.jet718_288475 | 035JN011.B10 |
| 1410 | 27640 | 035JN011.E10.jet718_288478 | 035JN011.E10 |
| 1411 | 27654 | 035JN015.D04.SP6_316094 | 035JN015.D04 |
| 1412 | 27666 | 035JN015.B10.SP6_316140 | 035JN015.B10 |
| 1413 | 27674 | 7815.L19.Beta5_497468 | 035JN015.F10 |
| 1414 | 27676 | 7815.N19.Beta5_497470 | 035JN015.G10 |
| 1415 | 27677 | 035JN013.H10.SP6_315954 | 035JN013.H10 |
| 1416 | 27699 | 7559.E19.Beta5_511562 | 035JN017.C10 |
| 1417 | 27705 | 035JN017.F10.SP6_316624 | 035JN017.F10 |
| 1418 | 27719 | 035JN021.E04.SP6_316959 | 035JN021.E04 |
| 1419 | 27721 | 035JN021.F04.SP6_316960 | 035JN021.F04 |
| 1420 | 27722 | 035JN023.F04.SP6_317152 | 035JN023.F04 |
| 1421 | 27726 | 035JN023.H04.SP6_317154 | 035JN023.H04 |
| 1422 | 27732 | 035JN023.C10.SP6_317197 | 035JN023.C10 |
| 1423 | 27735 | 035JN021.E10.SP6_317007 | 035JN021.E10 |
| 1424 | 27752 | 035JN027.E04.GZ43_334658 | 035Jn027.E04 |
| 1425 | 27753 | 035JN025.F04.GZ43_334467 | 035JN025.F04 |
| 1426 | 27754 | 035JN027.F04.GZ43_334659 | 035Jn027.F04 |
| 1427 | 27767 | 035JN025.E10.GZ43_334514 | 035JN025.E10 |
| 1428 | 27773 | 035JN025.H10.GZ43_334517 | 035JN025.H10 |
| 1429 | 27793 | 035JN029.B10.GZ43_334991 | 035JN029.B10 |
| 1430 | 27794 | 7947.D19.Beta5_483928 | 035Jn031.B10 |
| 1431 | 27799 | 035JN029.E10.GZ43_334994 | 035JN029.E10 |
| 1432 | 27801 | 035JN029.F10.GZ43_334995 | 035JN029.F10 |
| 1433 | 27831 | 037XN001.E10.sp6_317715 | 037XN001.E10 |
| 1434 | 27919 | 035JN002.A10.jet718_283901 | 035JN002.A10 |
| 1435 | 27932 | 035JN004.G10.jet718_284291 | 035JN004.G10 |
| 1436 | 27935 | 7264.A08.Beta5_496404 | 035JN006.A04 |
| 1437 | 27939 | 7264.E08.Beta5_496408 | 035JN006.C04 |
| 1438 | 27943 | 035JN006.E04.jet718_287470 | 035JN006.E04 |
| 1439 | 27948 | 035JN008.G04.jet718_287856 | 035JN008.G04 |
| 1440 | 27952 | 035JN008.A10.jet718_287898 | 035JN008.A10 |
| 1441 | 27979 | 7569.M08.Beta5_497677 | 035JN010.G04 |
| 1442 | 27984 | 035JN012.A10.jet718_288666 | 035JN012.A10 |
| 1443 | 27990 | 7569.H20.Beta5_497864 | 035JN012.D10 |
| 1444 | 27992 | 035JN012.E10.jet718_288670 | 035JN012.E10 |
| 1445 | 28002 | 035JN016.B04.SP6_316380 | 035JN016.B04 |
| 1446 | 28021 | 035JN014.D10.SP6_316046 | 035JN014.D10 |
| 1447 | 28040 | 035JN020.E04.SP6_316863 | 035JN020.E04 |
| 1448 | 28048 | 7559.B20.Beta5_511575 | 035JN020.A10 |
| 1449 | 28076 | 035JN024.G04.SP6_317249 | 035JN024.G04 |
| 1450 | 28085 | 035JN022.D10.SP6_317102 | 035JN022.D10 |
| 1451 | 28106 | 7926.L08.Beta5_496908 | 035JN028.F04 |
| 1452 | 28108 | 035JN028.G04.GZ43_334852 | 035JN028.G04 |
| 1453 | 28115 | 7926.E20.Beta5_497093 | 035JN026.C10 |
| 1454 | 28116 | 035JN028.C10.GZ43_334896 | 035JN028.C10 |
| 1455 | 28122 | 035JN028.F10.GZ43_334899 | 035JN028.F10 |
| 1456 | 28125 | 035JN026.H10.GZ43_334613 | 035JN026.H10 |
| 1457 | 28130 | 035JN032.B04.GZ43_335250 | 035JN032.B04 |
| 1458 | 28138 | 035JN032.F04.GZ43_335254 | 035JN032.F04 |
| 1459 | 28139 | 035JN030.G04.GZ43_335063 | 035JN030.G04 |
| 1460 | 28147 | 035JN030.C10.GZ43_335107 | 035JN030.C10 |
| 1461 | 28167 | 037XN002.E04.sp6_317859 | 037XN002.E04 |
| 1462 | 28189 | 037XN002.H10.sp6_317910 | 037XN002.H10 |
| 1463 | 28213 | 037XN006.D10.sp6_318482 | 037XN006.D10 |
| 1464 | 28215 | 037XN006.E10.sp6_318483 | 037XN006.E10 |
| 1465 | 28219 | 037XN006.G10.sp6_318485 | 037XN006.G10 |
| 1466 | 28222 | 037XN008.H10.sp6_318678 | 037XN008.H10 |
| 1467 | 28284 | 035JN003.G11.jet718_284107 | 035JN003.G11 |
| 1468 | 28289 | 035JN005.B05.jet718_284438 | 035JN005.B05 |
| 1469 | 28290 | 7264.D09.Beta5_496423 | 035JN007.B05 |
| 1470 | 28291 | 035JN005.C05.jet718_284439 | 035JN005.C05 |
| 1471 | 28292 | 7264.F09.Beta5_496425 | 035JN007.C05 |
| 1472 | 28299 | 7264.M09.Beta5_496432 | 035JN005.G05 |
| 1473 | 28325 | 035JN009.D05.jet718_288053 | 035JN009.D05 |
| 1474 | 28330 | 7569.L09.Beta5_497692 | 035JN011.F05 |
| 1475 | 28341 | 035JN009.D11.jet718_288101 | 035JN009.D11 |
| 1476 | 28382 | 7815.P21.Beta5_497504 | 035JN015.H11 |
| 1477 | 28384 | 7559.B09.Beta5_511399 | 035JN019.A05 |
| 1478 | 28397 | 035JN017.H05.SP6_316586 | 035JN017.H05 |
| 1479 | 28399 | 7559.A21.Beta5_511590 | 035JN017.A11 |
| 1480 | 28409 | 035JN017.F11.SP6_316632 | 035JN017.F11 |
| 1481 | 28413 | 035JN017.H11.SP6_316634 | 035JN017.H11 |
| 1482 | 28416 | 035JN023.A05.SP6_317155 | 035JN023.A05 |
| 1483 | 28437 | 7852.G21.Beta5_511212 | 035JN021.D11 |
| 1484 | 28439 | 035JN021.E11.SP6_317015 | 035JN021.E11 |
| 1485 | 28444 | 7852.N21.Beta5_511219 | 035JN023.G11 |
| 1486 | 28469 | 035JN025.D11.GZ43_334521 | 035JN025.D11 |
| 1487 | 28475 | 7926.M21.Beta5_497117 | 035JN025.G11 |
| 1488 | 28485 | 035JN029.D05.GZ43_334953 | 035JN029.D05 |
| 1489 | 28492 | 7947.N09.Beta5_483778 | 035Jn031.G05 |
| 1490 | 28503 | 035JN029.E11.GZ43_335002 | 035JN029.E11 |
| 1491 | 28506 | 7947.L21.Beta5_483968 | 035Jn031.F11 |
| 1492 | 28507 | 035JN029.G11.GZ43_335004 | 035JN029.G11 |
| 1493 | 28523 | 037XN001.G05.sp6_317677 | 037XN001.G05 |
| 1494 | 28546 | 037XN007.B05.sp6_318536 | 037XN007.B05 |
| 1495 | 28562 | 037XN007.B11.sp6_318584 | 037XN007.B11 |
| 1496 | 28569 | 037XN005.F11.sp6_318204 | 037XN005.F11 |
| 1497 | 28607 | 035JN002.A05.jet718_283861 | 035JN002.A05 |
| 1498 | 28608 | 035JN004.A05.jet718_284245 | 035JN004.A05 |
| 1499 | 28615 | 035JN002.E05.jet718_283865 | 035JN002.E05 |
| 1500 | 28625 | 035JN002.B11.jet718_283910 | 035JN002.B11 |
| 1501 | 28629 | 035JN002.D11.jet718_283912 | 035JN002.D11 |
| 1502 | 28631 | 035JN002.E11.jet718_283913 | 035JN002.E11 |
| 1503 | 28632 | 035JN004.E11.jet718_284297 | 035JN004.E11 |
| 1504 | 28650 | 035JN008.F05.jet718_287863 | 035JN008.F05 |
| 1505 | 28669 | 035JN006.H11.jet718_287529 | 035JN006.H11 |
| 1506 | 28670 | 035JN008.H11.jet718_287913 | 035JN008.H11 |
| 1507 | 28683 | 035JN010.G05.jet718_288248 | 035JN010.G05 |
| 1508 | 28693 | 035JN010.D11.jet718_288293 | 035JN010.D11 |
| 1509 | 28696 | 035JN012.E11.jet718_288678 | 035JN012.E11 |
| 1510 | 28706 | 035JN016.B05.SP6_316388 | 035JN016.B05 |
| 1511 | 28737 | 035JN018.B05.SP6_316676 | 035JN018.B05 |
| 1512 | 28738 | 7559.D10.Beta5_511417 | 035JN020.B05 |
| 1513 | 28743 | 035JN018.E05.SP6_316679 | 035JN018.E05 |
| 1514 | 28754 | 7559.D22.Beta5_511609 | 035JN020.B11 |
| 1515 | 28773 | 035JN022.D05.SP6_317062 | 035JN022.D05 |
| 1516 | 28774 | 7852.H10.Beta5_511037 | 035JN024.D05 |
| 1517 | 28787 | 7852.E22.Beta5_511226 | 035JN022.C11 |
| 1518 | 28799 | 035JN026.A05.GZ43_334566 | 035JN026.A05 |
| 1519 | 28800 | 035JN028.A05.GZ43_334854 | 035JN028.A05 |
| 1520 | 28802 | 035JN028.B05.GZ43_334855 | 035JN028.B05 |
| 1521 | 28813 | 035JN026.H05.GZ43_334573 | 035JN026.H05 |
| 1522 | 28827 | 035JN026.G11.GZ43_334620 | 035JN026.G11 |
| 1523 | 28829 | 035JN026.H11.GZ43_334621 | 035JN026.H11 |
| 1524 | 28830 | 035JN028.H11.GZ43_334909 | 035JN028.H11 |
| 1525 | 28838 | 035JN032.D05.GZ43_335260 | 035JN032.D05 |
| 1526 | 28840 | 035JN032.E05.GZ43_335261 | 035JN032.E05 |
| 1527 | 28842 | 035JN032.F05.GZ43_335262 | 035JN032.F05 |
| 1528 | 28847 | 035JN030.A11.GZ43_335113 | 035JN030.A11 |
| 1529 | 28849 | 035JN030.B11.GZ43_335114 | 035JN030.B11 |
| 1530 | 28853 | 035JN030.D11.GZ43_335116 | 035JN030.D11 |
| 1531 | 28858 | 035JN032.F11.GZ43_335310 | 035JN032.F11 |
| 1532 | 28863 | 037XN002.A05.sp6_317863 | 037XN002.A05 |
| 1533 | 28881 | 037XN002.B11.sp6_317912 | 037XN002.B11 |
| 1534 | 28890 | 037XN004.F11.sp6_318108 | 037XN004.F11 |
| 1535 | 28899 | 037XN006.C05.sp6_318441 | 037XN006.C05 |
| 1536 | 28911 | 037XN006.A11.sp6_318487 | 037XN006.A11 |
| 1537 | 28961 | 035JN001.B06.jet718_272126 | 035JN001.B06 |
| 1538 | 28996 | 035JN007.C06.jet718_287676 | 035JN007.C06 |
| 1539 | 28997 | 7264.G11.Beta5_496458 | 035JN005.D06 |
| 1540 | 29000 | 7264.J11.Beta5_496461 | 035JN007.E06 |
| 1541 | 29002 | 7264.L11.Beta5_496463 | 035JN007.F06 |
| 1542 | 29016 | 7264.J23.Beta5_496653 | 035JN007.E12 |
| 1543 | 29022 | 035JN007.H12.jet718_287729 | 035JN007.H12 |
| 1544 | 29023 | 035JN009.A06.jet718_288058 | 035JN009.A06 |
| 1545 | 29025 | 7569.C11.Beta5_497715 | 035JN009.B06 |
| 1546 | 29027 | 7569.E11.Beta5_497717 | 035JN009.C06 |
| 1547 | 29038 | 035JN011.H06.jet718_288449 | 035JN011.H06 |
| 1548 | 29044 | 7569.F23.Beta5_497910 | 035JN011.C12 |
| 1549 | 29057 | 035JN013.B06.SP6_315916 | 035JN013.B06 |
| 1550 | 29064 | 7815.J11.Beta5_497338 | 035JN015.E06 |
| 1551 | 29065 | 035JN013.F06.SP6_315920 | 035JN013.F06 |
| 1552 | 29067 | 035JN013.G06.SP6_315921 | 035JN013.G06 |
| 1553 | 29081 | 035JN013.F12.SP6_315968 | 035JN013.F12 |
| 1554 | 29105 | 035JN017.B12.SP6_316636 | 035JN017.B12 |
| 1555 | 29119 | 035JN021.A06.SP6_316971 | 035JN021.A06 |
| 1556 | 29122 | 035JN023.B06.SP6_317164 | 035JN023.B06 |
| 1557 | 29124 | 7852.F11.Beta5_511051 | 035JN023.C06 |
| 1558 | 29129 | 035JN021.F06.SP6_316976 | 035JN021.F06 |
| 1559 | 29142 | 7852.H23.Beta5_511245 | 035JN023.D12 |
| 1560 | 29145 | 7852.K23.Beta5_511248 | 035JN021.F12 |
| 1561 | 29147 | 035JN021.G12.SP6_317025 | 035JN021.G12 |
| 1562 | 29158 | 035JN027.D06.GZ43_334673 | 035Jn027.D06 |
| 1563 | 29191 | 035JN029.E06.GZ43_334962 | 035JN029.E06 |
| 1564 | 29194 | 7947.L11.Beta5_483808 | 035Jn031.F06 |
| 1565 | 29204 | 7947.F23.Beta5_483994 | 035Jn031.C12 |
| 1566 | 29219 | 037XN001.C06.sp6_317681 | 037XN001.C06 |
| 1567 | 29221 | 037XN001.D06.sp6_317682 | 037XN001.D06 |
| 1568 | 29224 | 037XN003.E06.sp6_317971 | 037XN003.E06 |
| 1569 | 29235 | 037XN001.C12.sp6_317729 | 037XN001.C12 |
| 1570 | 29245 | 037XN001.H12.sp6_317734 | 037XN001.H12 |
| 1571 | 29267 | 037XN005.C12.sp6_318209 | 037XN005.C12 |
| 1572 | 29327 | 035JN002.A12.jet718_283917 | 035JN002.A12 |
| 1573 | 29341 | 035JN002.H12.jet718_283924 | 035JN002.H12 |
| 1574 | 29348 | 035JN008.C06.jet718_287868 | 035JN008.C06 |
| 1575 | 29349 | 7264.G12.Beta5_496474 | 035JN006.D06 |
| 1576 | 29350 | 035JN008.D06.jet718_287869 | 035JN008.D06 |
| 1577 | 29352 | 035JN008.E06.jet718_287870 | 035JN008.E06 |
| 1578 | 29356 | 035JN008.G06.jet718_287872 | 035JN008.G06 |
| 1579 | 29361 | 7264.C24.Beta5_496662 | 035JN006.B12 |
| 1580 | 29362 | 035JN008.B12.jet718_287915 | 035JN008.B12 |
| 1581 | 29369 | 7264.K24.Beta5_496670 | 035JN006.F12 |
| 1582 | 29370 | 035JN008.F12.jet718_287919 | 035JN008.F12 |
| 1583 | 29378 | 7569.D12.Beta5_497732 | 035JN012.B06 |
| 1584 | 29383 | 7569.I12.Beta5_497737 | 035JN010.E06 |
| 1585 | 29386 | 035JN012.F06.jet718_288639 | 035JN012.F06 |
| 1586 | 29388 | 035JN012.G06.jet718_288640 | 035JN012.G06 |
| 1587 | 29395 | 7569.E24.Beta5_497925 | 035JN010.C12 |
| 1588 | 29421 | 035JN014.H06.SP6_316018 | 035JN014.H06 |
| 1589 | 29427 | 7815.E24.Beta5_497541 | 035JN014.C12 |
| 1590 | 29442 | 035JN020.B06.SP6_316876 | 035JN020.B06 |
| 1591 | 29444 | 035JN020.C06.SP6_316877 | 035JN020.C06 |
| 1592 | 29454 | 7559.P12.Beta5_511461 | 035JN020.H06 |
| 1593 | 29474 | 035JN024.B06.SP6_317260 | 035JN024.B06 |
| 1594 | 29476 | 7852.F12.Beta5_511067 | 035JN024.C06 |
| 1595 | 29481 | 035JN022.F06.SP6_317072 | 035JN022.F06 |
| 1598 | 29490 | 035JN024.E12.SP6_317308 | 035JN024.B12 |
| 1597 | 29493 | 7852.G24.Beta5_511260 | 035JN022.D12 |
| 1598 | 29496 | 035JN024.E12.SP6_317311 | 035JN024.E12 |
| 1599 | 29498 | 7852.L24.Beta5_511265 | 035JN024.F12 |
| 1600 | 29502 | 7852.P24.Beta5_511269 | 035JN024.H12 |
| 1601 | 29516 | 035JN028.G06.GZ43_334868 | 035JN028.G06 |
| 1602 | 29529 | 035JN026.F12.GZ43_334627 | 035JN026.F12 |
| 1603 | 29534 | 035JN028.H12.GZ43_334917 | 035JN028.H12 |
| 1604 | 29535 | 035JN030.A06.GZ43_335073 | 035JN030.A06 |
| 1605 | 29540 | 035JN032.C06.GZ43_335267 | 035JN032.C06 |
| 1606 | 29544 | 035JN032.E06.GZ43_335269 | 035JN032.E06 |
| 1607 | 29547 | 035JN030.G06.GZ43_335079 | 035JN030.G06 |
| 1608 | 29548 | 035JN032.G06.GZ43_335271 | 035JN032.G06 |
| 1609 | 29553 | 035JN030.B12.GZ43_335122 | 035JN030.B12 |
| 1610 | 29557 | 7947.G24.Beta5_484011 | 035JN030.D12 |
| 1611 | 29573 | 037XN002.D06.sp6_317874 | 037XN002.D06 |
| 1612 | 29619 | 037XN006.C12.sp6_318497 | 037XN006.C12 |
| 1613 | 29621 | 037XN006.D12.sp6_318498 | 037XN006.D12 |
| 1614 | 29652 | 016923 | M00001610C:D05 |
| 1615 | 29668 | 538.C01.BETA5_582849 | 1TNT051800C01 |
| 1616 | 29678 | 538.H01.BETA5_582854 | 1TNT051800H01 |
| 1617 | 29684 | 1TNT051800.C07.GZ43_421387 | 1TNT051800C07 |
| 1618 | 29690 | 538.F07.BETA5_582900 | 1TNT051800F07 |
| 1619 | 29691 | 5383.F07.T3_583092 | 3TNT052200F07 |
| 1620 | 29702 | 539.G01.Laf3_581001 | RG:2169096:8119907:D01 |
| 1621 | 29704 | AI656423 | RG:2244263:8119907:E01 |
| 1622 | 29706 | AI632432 | RG:2305132:8119907:F01 |
| 1623 | 29708 | 539.M01.Laf3_581007 | RG:2330779:8119907:G01 |
| 1624 | 29710 | 539.O01.Laf3_581009 | RG:2343699:8119907:H01 |
| 1625 | 29716 | 539.E13.Laf3_581191 | RG:2162304:8119907:C07 |
| 1626 | 29724 | AI693174 | RG:2336749:8119907:G07 |
| 1627 | 29754 | 518.K13.laf3_548279 | RG:233016:12039905:F07 |
| 1628 | 29757 | AI347985 | RG:1926969:12039908:G07 |
| 1629 | 29771 | 519.L01.laf3_548472 | RG:267235:Order7TM21:F01 |
| 1630 | 29796 | N94487 | RG:309893:Order7TM23:C01 |
| 1631 | 29805 | 520.N01.laf3_558990 | RG:2370175:OrderK03:G01 |
| 1632 | 29808 | N95025 | RG:306549:Order7TM23:A07 |
| 1633 | 29814 | 520.G13.laf3_559175 | RG:323370:Order7TM23:D07 |
| 1634 | 29834 | 521.K01.laf3_559371 | RG:46429:Order7TM02:F01 |
| 1635 | 29846 | 521.G13.laf3_559559 | RG:43428:Order7TM02:D07 |
| 1636 | 29859 | 522.D01.laf3_559748 | RG:469703:Order7TM27:B01 |
| 1637 | 29870 | 522.O01.laf3_559759 | RG:450056:Order7TM26:H01 |
| 1638 | 29880 | AA203687 | RG:446190:Order7TM26:E07 |
| 1639 | 29886 | AA700861 | RG:452343:Order7TM26:H07 |
| 1640 | 29888 | 523.A01.laf3_560129 | RG:725230:Order7TM31:A01 |
| 1641 | 29891 | 523.D01.laf3_560132 | RG:1160829:Order7TM33:B01 |
| 1642 | 29907 | 523.D13.laf3_560324 | RG:1161304:Order7TM33:B07 |
| 1643 | 29957 | 525.F01.laf3_560902 | RG:2149250:Order7TM41:C01 |
| 1644 | 29966 | AA937194 | RG:1507689:Order7TM37:H01 |
| 1645 | 29987 | AI270150 | RG:1985920:20003:B01 |
| 1646 | 29997 | AI250101 | RG:2006710:20003:G01 |
| 1647 | 30013 | AI251081 | RG:2007272:20003:G07 |
| 1648 | 30016 | 5382.A01.BETA5_582943 | 2TNT052200A01 |
| 1649 | 30022 | 5382.D01.BETA5_582946 | 2TNT052200D01 |
| 1650 | 30024 | 5382.E01.BETA5_582947 | 2TNT052200E01 |
| 1651 | 30027 | PL4B052400.A04.GZ43_421705 | PL4B052400A04 |
| 1652 | 30043 | PL4B052400.G04.GZ43_421711 | PL4B052400G04 |
| 1653 | 30047 | PL4B052400.G07.GZ43_421735 | PL4B052400G07 |
| 1654 | 30073 | 539.J14.Laf3_581212 | RG:326321:OrderK01:E07 |
| 1655 | 30080 | 518.A02.laf3_548093 | RG:342025:12039906:A01 |
| 1656 | 30092 | 518.M02.laf3_548105 | RG:704530:12039906:G01 |
| 1657 | 30094 | AA625677 | RG:744852:12039906:H01 |
| 1658 | 30095 | 518.P02.laf3_548108 | RG:1486908:Order7TM11:H01 |
| 1659 | 30097 | AA643303 | RG:1172246:Order7TM11:A07 |
| 1660 | 30099 | AA657977 | RG:1174569:Order7TM11:B07 |
| 1661 | 30114 | 519.C02.laf3_548479 | RG:200526:Order7TM20:B01 |
| 1662 | 30120 | 519.I02.laf3_548485 | RG:219754:Order7TM20:E01 |
| 1663 | 30137 | W05177 | RG:295191:Order7TM22:E07 |
| 1664 | 30156 | AA016156 | RG:360639:Order7TM24:G01 |
| 1665 | 30205 | 521.N14.laf3_559582 | RG:152346:Order7TM17:G07 |
| 1666 | 30231 | 522.H14.laf3_559960 | RG:712130:Order7TM30:D07 |
| 1667 | 30232 | AA059350 | RG:381856:Order7TM25:E07 |
| 1668 | 30241 | AA741244 | RG:1286112:Order7TM34:A01 |
| 1669 | 30248 | AA465303 | RG:814153:Order7TM32:E01 |
| 1670 | 30274 | 524.C02.laf3_560531 | RG:1387330:Order7TM36:B01 |
| 1671 | 30282 | 524.K02.laf3_560539 | RG:1408000:Order7TM36:F01 |
| 1672 | 30303 | 524.P14.laf3_560736 | RG:1569511:Order7TM38:H07 |
| 1673 | 30329 | 525.J14.laf3_561114 | RG:2393918:Order7TM42:E07 |
| 1674 | 30372 | 538.C02.BETA5_582857 | 1TNT051800C02 |
| 1675 | 30374 | 1TNT051800.D02.GZ43_421348 | 1TNT051800D02 |
| 1676 | 30377 | 3TNT052200.E02.T3_421561 | 3TNT052200E02 |
| 1677 | 30380 | 1TNT051800.G02.GZ43_421351 | 1TNT051800G02 |
| 1678 | 30394 | 1TNT051800.F08.GZ43_421398 | 1TNT051800F08 |
| 1679 | 30397 | 3TNT052200.G08.T3_421611 | 3TNT052200G08 |
| 1680 | 30420 | 539.E15.Laf3_581223 | RG:2166404:8119907:C08 |
| 1681 | 30457 | AI143947 | RG:1737690:12039908:E08 |
| 1682 | 30462 | 518.O15.laf3_548315 | RG:322130:12039905:H08 |
| 1683 | 30463 | 518.P15.laf3_548316 | RG:2114092:12039908:H08 |
| 1684 | 30472 | 519.I03.laf3_548501 | RG:182411:Order7TM19:E02 |
| 1685 | 30486 | 519.G15.laf3_548691 | RG:180757:Order7TM19:D08 |
| 1686 | 30489 | N26748 | RG:266375:Order7TM21:E08 |
| 1687 | 30492 | 519.M15.laf3_548697 | RG:188269:Order7TM19:G08 |
| 1688 | 30510 | 520.O03.laf3_559023 | RG:342337:Order7TM23:H02 |
| 1689 | 30538 | 521.K03.laf3_559403 | RG:46640:Order7TM02:F02 |
| 1690 | 30541 | 521.N03.laf3_559406 | RG:128956:Order7TM16:G02 |
| 1691 | 30546 | 521.C15.laf3_559587 | RG:41160:Order7TM02:B08 |
| 1692 | 30569 | AA125857 | RG:490269:Order7TM27:E02 |
| 1693 | 30579 | AA031460 | RG:470675:Order7TM27:B08 |
| 1694 | 30597 | 523.F03.laf3_560166 | RG:1185595:Order7TM33:C02 |
| 1695 | 30603 | AA746602 | RG:1256454:Order7TM33:F02 |
| 1696 | 30606 | 523.O03.laf3_560175 | RG:739884:Order7TM31:H02 |
| 1697 | 30617 | AA731737 | RG:1251980:Order7TM33:E08 |
| 1698 | 30641 | 524.B15.laf3_560738 | RG:1584415:Order7TM39:A08 |
| 1699 | 30660 | 525.E03.laf3_560933 | RG:1468027:Order7TM37:C02 |
| 1700 | 30662 | 525.G03.laf3_560935 | RG:1470342:Order7TM37:D02 |
| 1701 | 30685 | AI688238 | RG:2326234:Order7TM41:G08 |
| 1702 | 30690 | R28103 | RG:133909:OrderP01:B02 |
| 1703 | 30708 | H85938 | RG:222589:OrderP01:C08 |
| 1704 | 30715 | AI279390 | RG:2006302:20003:F08 |
| 1705 | 30720 | 2TNT052200.A02.GZ43_421441 | 2TNT052200A02 |
| 1706 | 30722 | 2TNT052200.B02.GZ43_421442 | 2TNT052200B02 |
| 1707 | 30723 | 5384.B02.T3_583144 | 4ATNT052400F02 |
| 1708 | 30725 | 5384.C02.T3_583145 | 4ATNT052400B04 |
| 1709 | 30728 | 5382.E02.BETA5_582955 | 2TNT052200E02 |
| 1710 | 30731 | PL4B052400.B04.GZ43_421706 | PL4B052400B04 |
| 1711 | 30787 | 518.D04.laf3_548128 | RG:1173695:Order7TM11:B02 |
| 1712 | 30789 | AA650509 | RG:1191849:Order7TM11:C02 |
| 1713 | 30795 | 518.L04.laf3_548136 | RG:1420834:Order7TM11:F02 |
| 1714 | 30796 | 518.M04.laf3_548137 | RG:713079:12039906:G02 |
| 1715 | 30798 | AA625800 | RG:744928:12039906:H02 |
| 1716 | 30803 | AA827000 | RG:1174978:Order7TM11:B08 |
| 1717 | 30818 | 519.C04.laf3_548511 | RG:200526:Order7TM20:B02 |
| 1718 | 30819 | 519.D04.laf3_548512 | RG:279704:Order7TM22:B02 |
| 1719 | 30825 | 519.J04.laf3_548518 | RG:293781:Order7TM22:E02 |
| 1720 | 30831 | 519.P04.laf3_548524 | RG:301734:Order7TM22:H02 |
| 1721 | 30836 | H48592 | RG:207207:Order7TM20:C08 |
| 1722 | 30840 | 519.I16.laf3_548709 | RG:221499:Order7TM20:E08 |
| 1723 | 30841 | 519.J16.laf3_548710 | RG:295687:Order7TM22:E08 |
| 1724 | 30852 | W72005 | RG:345670:Order7TM24:C02 |
| 1725 | 30853 | 520.F04.laf3_559030 | RG:25631:Order7TM01:C02 |
| 1726 | 30860 | AA015780 | RG:360663:Order7TM24:G02 |
| 1727 | 30881 | 521.B04.laf3_559410 | RG:136866:Order7TM17:A02 |
| 1728 | 30898 | 521.C16.laf3_559603 | RG:155253:Order7TM18:B08 |
| 1729 | 30905 | 521.J16.laf3_559610 | RG:147116:Order7TM17:E08 |
| 1730 | 30906 | 521.K16.laf3_559611 | RG:163644:Order7TM18:F08 |
| 1731 | 30908 | 521.M16.laf3_559613 | RG:166144:Order7TM18:G08 |
| 1732 | 30910 | H18391 | RG:171738:Order7TM18:H08 |
| 1733 | 30914 | AA032228 | RG:375685:Order7TM25:B02 |
| 1734 | 30925 | 522.N04.laf3_559806 | RG:714002:Order7TM30:G02 |
| 1735 | 30934 | 522.G16.laf3_559991 | RG:380369:Order7TM25:D08 |
| 1736 | 30938 | AA709067 | RG:384795:Order7TM25:F08 |
| 1737 | 30940 | 522.M16.laf3_559997 | RG:397720:Order7TM25:G08 |
| 1738 | 30943 | 522.P16.laf3_560000 | RG:724677:Order7TM30:H08 |
| 1739 | 30963 | 523.D16.laf3_560372 | RG:1290416:Order7TM34:B08 |
| 1740 | 30988 | AA846062 | RG:1414105:Order7TM36:G02 |
| 1741 | 30999 | 524.H16.laf3_560760 | RG:1541688:Order7TM38:D08 |
| 1742 | 31004 | 524.M16.laf3_560765 | RG:1415237:Order7TM36:G08 |
| 1743 | 31006 | 524.O16.laf3_560767 | RG:1455902:Order7TM36:H08 |
| 1744 | 31007 | 524.P16.laf3_560768 | RG:1570363:Order7TM38:H08 |
| 1745 | 31013 | 525.F04.laf3_560950 | RG:2362806:Order7TM42:C02 |
| 1746 | 31016 | 525.I04.laf3_560953 | RG:1939313:Order7TM40:E02 |
| 1747 | 31044 | 526.E04.laf3_561333 | RG:1369150:OrderP02:C02 |
| 1748 | 31048 | 526.I04.laf3_561337 | RG:1750632:OrderP02:E02 |
| 1749 | 31076 | 538.C03.BETA5_582865 | 1TNT051800C03 |
| 1750 | 31080 | 1TNT051800.E03.GZ43_421357 | 1TNT051800E03 |
| 1751 | 31085 | 5383.G03.T3_583061 | 3TNT052200G03 |
| 1752 | 31091 | 5383.B09.T3_583104 | 3TNT052200B09 |
| 1753 | 31092 | 1TNT051800.C09.GZ43_421403 | 1TNT051800C09 |
| 1754 | 31094 | 538.D09.BETA5_582914 | 1TNT051800D09 |
| 1755 | 31098 | 538.F09.BETA5_582916 | 1TNT051800F09 |
| 1756 | 31100 | 538.G09.BETA5_582917 | 1TNT051800G09 |
| 1757 | 31105 | 539.B05.Laf3_581060 | RG:796055:12039907:A03 |
| 1758 | 31107 | 539.D05.Laf3_581062 | RG:986456:12039907:B03 |
| 1759 | 31123 | AA639504 | RG:1159614:12039907:B09 |
| 1760 | 31127 | AA844912 | RG:1411982:12039907:D09 |
| 1761 | 31130 | AI676053 | RG:2314226:8119907:F09 |
| 1762 | 31149 | 518.N05.laf3_548154 | RG:1902348:12039908:G03 |
| 1763 | 31159 | AA996029 | RG:1606839:12039908:D09 |
| 1764 | 31187 | 519.D17.laf3_548720 | RG:252455:Order7TM21:B09 |
| 1765 | 31192 | H44426 | RG:183706:Order7TM19:E09 |
| 1766 | 31195 | 519.L17.laf3_548728 | RG:269238:Order7TM21:F09 |
| 1767 | 31232 | 521.A05.laf3_559425 | RG:38689:Order7TM02:A03 |
| 1768 | 31282 | 522.C17.laf3_560003 | RG:417746:Order7TM26:B09 |
| 1769 | 31286 | 522.G17.laf3_560007 | RG:435378:Order7TM26:D09 |
| 1770 | 31296 | 523.A05.laf3_560193 | RG:725269:Order7TM31:A03 |
| 1771 | 31299 | 523.D05.laf3_560196 | RG:1160942:Order7TM33:B03 |
| 1772 | 31300 | 523.E05.laf3_560197 | RG:726119:Order7TM31:C03 |
| 1773 | 31303 | AA652642 | RG:1188375:Order7TM33:D03 |
| 1774 | 31309 | 523.N05.laf3_560206 | RG:1270265:Order7TM33:G03 |
| 1775 | 31312 | 523.A17.laf3_560385 | RG:725415:Order7TM31:A09 |
| 1776 | 31314 | AA292293 | RG:725865:Order7TM31:B09 |
| 1777 | 31335 | AI051307 | RG:1657255:Order7TM39:D03 |
| 1778 | 31337 | AI076453 | RG:1675585:Order7TM39:E03 |
| 1779 | 31351 | 524.H17.laf3_560776 | RG:1667691:Order7TM39:D09 |
| 1780 | 31361 | 525.B05.laf3_560962 | RG:2115059:Order7TM41:A03 |
| 1781 | 31367 | AI623315 | RG:2237582:Order7TM41:D03 |
| 1782 | 31369 | AI659657 | RG:2252059:Order7TM41:E03 |
| 1783 | 31389 | 525.N17.laf3_561166 | RG:2327992:Order7TM41:G09 |
| 1784 | 31393 | AI733957 | RG:1985759:20003:A03 |
| 1785 | 31399 | AI305310 | RG:1997027:20003:D03 |
| 1786 | 31408 | 526.A17.laf3_561537 | RG:126566:OrderP01:A09 |
| 1787 | 31410 | R87386 | RG:166034:OrderP01:B09 |
| 1788 | 31419 | AI265909 | RG:2006498:20003:F09 |
| 1789 | 31426 | 5382.B03.BETA5_582960 | 2TNT052200B03 |
| 1790 | 31435 | PL4B052400.C04.GZ43_421707 | PL4B052400C04 |
| 1791 | 31444 | 5382.C09.BETA5_583009 | 2TNT052200C09 |
| 1792 | 31447 | PL4B052400.A02.GZ43_421689 | PL4B052400A02 |
| 1793 | 31449 | PL4B052400.E03.GZ43_421701 | PL4B052400E03 |
| 1794 | 31451 | PL4B052400.A05.GZ43_421713 | PL4B052400A05 |
| 1795 | 31499 | AA858353 | RG:1420889:Order7TM11:F03 |
| 1796 | 31512 | 518.I18.laf3_548357 | RG:1675510:12039906:E09 |
| 1797 | 31515 | 518.L18.laf3_548360 | RG:1422884:Order7TM11:F09 |
| 1798 | 31526 | H68010 | RG:211252:Order7TM20:D03 |
| 1799 | 31535 | 519.P06.laf3_548556 | RG:301871:Order7TM22:H03 |
| 1800 | 31538 | 519.C18.laf3_548735 | RG:202264:Order7TM20:B09 |
| 1801 | 31549 | 519.N18.laf3_548746 | RG:301416:Order7TM22:G09 |
| 1802 | 31554 | 520.C06.laf3_559059 | RG:344661:Order7TM24:B03 |
| 1803 | 31572 | 520.E18.laf3_559253 | RG:346417:Order7TM24:C09 |
| 1804 | 31601 | 521.B18.laf3_559634 | RG:139207:Order7TM17:A09 |
| 1805 | 31629 | 522.N06.laf3_559838 | RG:714036:Order7TM30:G03 |
| 1806 | 31640 | 522.I18.laf3_560025 | RG:381998:Order7TM25:E09 |
| 1807 | 31647 | 522.P18.laf3_560032 | RG:724738:Order7TM30:H09 |
| 1808 | 31663 | 523.P06.laf3_560224 | RG:1323963:Order7TM34:H03 |
| 1809 | 31702 | 524.G18.laf3_560791 | RG:1404328:Order7TM36:D09 |
| 1810 | 31708 | 524.M18.laf3_560797 | RG:1415437:Order7TM36:G09 |
| 1811 | 31729 | 525.B18.laf3_561170 | RG:2350539:Order7TM42:A09 |
| 1812 | 31739 | AI858001 | RG:2408051:Order7TM42:F09 |
| 1813 | 31748 | 526.E06.laf3_561365 | RG:1408115:OrderP02:C03 |
| 1814 | 31763 | AI251231 | RG:1983997:20002:B09 |
| 1815 | 31780 | 538.C04.BETA5_582873 | 1TNT051800C04 |
| 1816 | 31782 | 1TNT051800.D04.GZ43_421364 | 1TNT051800D04 |
| 1817 | 31786 | 538.F04.BETA5_582876 | 1TNT051800F04 |
| 1818 | 31787 | 5383.F04.T3_583068 | 3TNT052200F04 |
| 1819 | 31788 | 1TNT051800.G04.GZ43_421367 | 1TNT051800G04 |
| 1820 | 31796 | 538.C10.BETA5_582921 | 1TNT051800C10 |
| 1821 | 31799 | 5383.D10.T3_583114 | 3TNT052200D10 |
| 1822 | 31804 | 1TNT051800.G10.GZ43_421415 | 1TNT051800G10 |
| 1823 | 31805 | 3TNT052200.G10.T3_421627 | 3TNT052200G10 |
| 1824 | 31813 | 539.F07.Laf3_581096 | RG:1269319:12039907:C04 |
| 1825 | 31850 | 518.K07.laf3_548183 | RG:230376:12039905:F04 |
| 1826 | 31856 | T85544 | RG:114712:12039905:A10 |
| 1827 | 31862 | 518.G19.laf3_548371 | RG:195021:12039905:D10 |
| 1828 | 31865 | AI148954 | RG:1752672:12039908:E10 |
| 1829 | 31869 | 518.N19.laf3_548378 | RG:2028487:12039908:G10 |
| 1830 | 31871 | 518.P19.laf3_548380 | RG:2124370:12039908:H10 |
| 1831 | 31886 | H39120 | RG:192444:Order7TM19:H04 |
| 1832 | 31887 | 519.P07.laf3_548572 | RG:273979:Order7TM21:H04 |
| 1833 | 31928 | 520.I19.laf3_559273 | RG:324794:Order7TM23:E10 |
| 1834 | 31952 | 521.A19.laf3_559649 | RG:39899:Order7TM02:A10 |
| 1835 | 31965 | R25637 | RG:132735:Order7TM16:G10 |
| 1836 | 31997 | 522.N19.laf3_560046 | RG:504638:Order7TM27:G10 |
| 1837 | 32006 | 523.G07.laf3_560231 | RG:726383:Order7TM31:D04 |
| 1838 | 32007 | 523.H07.laf3_560232 | RG:1188503:Order7TM33:D04 |
| 1839 | 32023 | 523.H19.laf3_560424 | RG:1218621:Order7TM33:D10 |
| 1840 | 32043 | AI092466 | RG:1692984:Order7TM39:F04 |
| 1841 | 32062 | AA836494 | RG:1370254:Order7TM35:H10 |
| 1842 | 32065 | 525.B07.laf3_560994 | RG:2115148:Order7TM41:A04 |
| 1843 | 32068 | AA884832 | RG:1468143:Order7TM37:C04 |
| 1844 | 32082 | 525.C19.laf3_561187 | RG:1466558:Order7TM37:B10 |
| 1845 | 32097 | AI734002 | RG:1985794:20003:A04 |
| 1846 | 32103 | AI305307 | RG:1997021:20003:D04 |
| 1847 | 32104 | 526.I07.laf3_561385 | RG:299652:OrderP01:E04 |
| 1848 | 32125 | AI249647 | RG:2007319:20003:G10 |
| 1849 | 32128 | 5382.A04.BETA5_582967 | 2TNT052200A04 |
| 1850 | 32139 | PL4B052400.D04.GZ43_421708 | PL4B052400D04 |
| 1851 | 32142 | 2TNT052200.H04.GZ43_421464 | 2TNT052200H04 |
| 1852 | 32155 | PL4B052400.B05.GZ43_421714 | PL4B052400B05 |
| 1853 | 32158 | 5382.H10.BETA5_583022 | 2TNT052200H10 |
| 1854 | 32198 | AA428964 | RG:769707:12039906:D04 |
| 1855 | 32208 | 518.A20.laf3_548381 | RG:347271:12039906:A10 |
| 1856 | 32209 | AA641485 | RG:1172529:Order7TM11:A10 |
| 1857 | 32212 | AA411086 | RG:724468:12039906:C10 |
| 1858 | 32217 | AA826627 | RG:1420265:Order7TM11:E10 |
| 1859 | 32219 | AA828222 | RG:1422995:Order7TM11:F10 |
| 1860 | 32221 | AA862155 | RG:1485919:Order7TM11:G10 |
| 1861 | 32231 | 519.H08.laf3_548580 | RG:291488:Order7TM22:D04 |
| 1862 | 32241 | 519.B20.laf3_548766 | RG:279067:Order7TM22:A10 |
| 1863 | 32248 | H86259 | RG:223442:Order7TM20:E10 |
| 1864 | 32275 | 520.D20.laf3_559284 | RG:24729:Order7TM01:B10 |
| 1865 | 32282 | AA013201 | RG:360131:Order7TM24:F10 |
| 1866 | 32284 | AA018407 | RG:362533:Order7TM24:G10 |
| 1867 | 32285 | R49164 | RG:36797:Order7TM01:G10 |
| 1868 | 32288 | 521.A08.laf3_559473 | RG:153781:Order7TM18:A04 |
| 1869 | 32292 | 521.E08.laf3_559477 | RG:155964:Order7TM18:C04 |
| 1870 | 32295 | 521.H08.laf3_559480 | RG:144155:Order7TM17:D04 |
| 1871 | 32304 | R53113 | RG:154422:Order7TM18:A10 |
| 1872 | 32309 | 521.F20.laf3_559670 | RG:143670:Order7TM17:C10 |
| 1873 | 32317 | R49761 | RG:152624:Order7TM17:G10 |
| 1874 | 32320 | 522.A08.laf3_559857 | RG:365486:Order7TM25:A04 |
| 1875 | 32347 | AA292684 | RG:713779:Order7TM30:F10 |
| 1876 | 32358 | AA460529 | RG:796624:Order7TM32:D04 |
| 1877 | 32371 | AA761894 | RG:1290472:Order7TM34:B10 |
| 1878 | 32386 | 524.C08.laf3_560627 | RG:1387448:Order7TM36:B04 |
| 1879 | 32388 | AA844385 | RG:1390752:Order7TM36:C04 |
| 1880 | 32395 | AA913293 | RG:1554722:Order7TM38:F04 |
| 1881 | 32465 | AI254029 | RG:1983593:20002:A10 |
| 1882 | 32469 | AI251722 | RG:1984571:20002:C10 |
| 1883 | 32480 | 1TNT051800.A05.GZ43_421369 | 1TNT051800A05 |
| 1884 | 32484 | 1TNT051800.C05.GZ43_421371 | 1TNT051800C05 |
| 1885 | 32488 | 538.E05.BETA5_582883 | 1TNT051800E05 |
| 1886 | 32499 | 5383.B11.T3_583120 | 3TNT052200B11 |
| 1887 | 32506 | 538.F11.BETA5_582932 | 1TNT051800F11 |
| 1888 | 32512 | 539.A09.Laf3_581123 | RG:2124082:8119907:A05 |
| 1889 | 32516 | 539.E09.laf3_581127 | RG:2160113:8119907:C05 |
| 1890 | 32544 | T81096 | RG:109165:12039905:A05 |
| 1891 | 32556 | N30787 | RG:257079:12039905:G05 |
| 1892 | 32558 | 518.O09.laf3_548219 | RG:300634:12039905:H05 |
| 1893 | 32564 | R55625 | RG:154770:12039905:C11 |
| 1894 | 32574 | 518.O21.laf3_548411 | RG:325930:12039905:H11 |
| 1895 | 32580 | 519.E09.laf3_548593 | RG:179266:Order7TM19:C05 |
| 1896 | 32583 | 519.H09.laf3_548596 | RG:263993:Order7TM21:D05 |
| 1897 | 32591 | 519.P09.laf3_548604 | RG:273969:Order7TM21:H05 |
| 1898 | 32594 | 519.C21.laf3_548783 | RG:178479:Order7TM19:B11 |
| 1899 | 32596 | H51124 | RG:179642:Order7TM19:C11 |
| 1900 | 32628 | 520.E21.laf3_559301 | RG:321260:Order7TM23:C11 |
| 1901 | 32645 | T77432 | RG:113840:Order7TM16:C05 |
| 1902 | 32652 | 521.M09.laf3_559501 | RG:48922:Order7TM02:G05 |
| 1903 | 32654 | 521.O09.laf3_559503 | RG:50127:Order7TM02:H05 |
| 1904 | 32662 | 521.G21.laf3_559687 | RG:44286:Order7TM02:D11 |
| 1905 | 32666 | 521.K21.laf3_559691 | RG:48256:Order7TM02:F11 |
| 1906 | 32670 | 521.O21.laf3_559695 | RG:51009:Order7TM02:H11 |
| 1907 | 32684 | AA702455 | RG:447950:Order7TM26:G05 |
| 1908 | 32688 | 522.A21.laf3_560065 | RG:415681:Order7TM26:A11 |
| 1909 | 32702 | AA779154 | RG:452641:Order7TM26:H11 |
| 1910 | 32725 | AA650031 | RG:1187678:Order7TM33:C11 |
| 1911 | 32733 | AA743401 | RG:1272563:Order7TM33:G11 |
| 1912 | 32751 | 524.P09.laf3_560656 | RG:1752807:Order7TM39:H05 |
| 1913 | 32775 | AI638529 | RG:2240207:Order7TM41:D05 |
| 1914 | 32799 | 525.P21.laf3_561232 | RG:2342176:Order7TM41:H11 |
| 1915 | 32811 | AI223784 | RG:2003087:20003:F05 |
| 1916 | 32828 | AA250856 | RG:684365:OrderP01:G11 |
| 1917 | 32829 | AI246847 | RG:2007337:20003:G11 |
| 1918 | 32830 | 526.O21.laf3_561615 | RG:753277:OrderP01:H11 |
| 1919 | 32835 | 4ATNT052400.A03.T3_421661 | 4ATNT052400A03 |
| 1920 | 32839 | PL4B052400.E01.GZ43_421685 | PL4B052400E01 |
| 1921 | 32842 | 5382.F05.BETA5_582980 | 2TNT052200F05 |
| 1922 | 32843 | PL4B052400.E04.GZ43_421709 | PL4B052400E04 |
| 1923 | 32848 | 5382.A11.BETA5_583023 | 2TNT052200A11 |
| 1924 | 32854 | 5382.D11.BETA5_583026 | 2TNT052200D11 |
| 1925 | 32872 | AI150354 | RG:1752018:OrderK02:E05 |
| 1926 | 32883 | 539.D22.Laf3_581334 | RG:180447:OrderK01:B11 |
| 1927 | 32891 | 539.L22.Laf3_581342 | RG:470447:OrderK01:F11 |
| 1928 | 32904 | AI033477 | RG:1655516:12039906:E05 |
| 1929 | 32907 | AA834081 | RG:1422219:Order7TM11:F05 |
| 1930 | 32930 | 519.C10.laf3_548607 | RG:201469:Order7TM20:B05 |
| 1931 | 32932 | 519.E10.laf3_548609 | RG:205963:Order7TM20:C05 |
| 1932 | 32934 | 519.G10.laf3_548611 | RG:211565:Order7TM20:D05 |
| 1933 | 32938 | 519.K10.laf3_548615 | RG:232881:Order7TM20:F05 |
| 1934 | 32940 | 519.M10.laf3_548617 | RG:236186:Order7TM20:G05 |
| 1935 | 32952 | 519.I22.laf3_548805 | RG:229279:Order7TM20:E11 |
| 1936 | 32963 | 520.D10.laf3_559124 | RG:23984:Order7TM01:B05 |
| 1937 | 32998 | 521.G10.laf3_559511 | RG:158151:Order7TM18:D05 |
| 1938 | 33016 | 521.I22.laf3_559705 | RG:163004:Order7TM18:E11 |
| 1939 | 33018 | 521.K22.laf3_559707 | RG:165830:Order7TM18:F11 |
| 1940 | 33023 | 521.P22.laf3_559712 | RG:153398:Order7TM17:H11 |
| 1941 | 33037 | 522.N10.laf3_559902 | RG:714057:Order7TM30:G05 |
| 1942 | 33044 | 522.E22.laf3_560085 | RG:378869:Order7TM25:C11 |
| 1943 | 33047 | 522.H22.laf3_560088 | RG:712463:Order7TM30:D11 |
| 1944 | 33109 | AA919075 | RG:1535701:Order7TM38:C11 |
| 1945 | 33122 | AI263529 | RG:1857034:Order7TM40:B05 |
| 1946 | 33125 | 525.F10.laf3_561046 | RG:2365503:Order7TM42:C05 |
| 1947 | 33135 | 525.P10.laf3_561056 | RG:2504825:Order7TM42:H05 |
| 1948 | 33136 | AI248597 | RG:1850163:Order7TM40:A11 |
| 1949 | 33147 | AI820024 | RG:2408918:Order7TM42:F11 |
| 1950 | 33148 | AI553937 | RG:2090491:Order7TM40:G11 |
| 1951 | 33155 | AI251395 | RG:1983835:20002:B05 |
| 1952 | 33180 | 526.M22.laf3_561629 | RG:2271099:OrderP02:G11 |
| 1953 | 33191 | 5383.D06.T3_583082 | 3TNT052200D06 |
| 1954 | 33202 | 538.B12.BETA5_582936 | 1TNT051800B12 |
| 1955 | 33204 | 538.C12.BETA5_582937 | 1TNT051800C12 |
| 1956 | 33209 | 5383.E12.T3_583131 | 3TNT052200E12 |
| 1957 | 33216 | 539.A11.Laf3_581155 | RG:2124966:8119907:A06 |
| 1958 | 33218 | AI457674 | RG:2144771:8119907:B06 |
| 1959 | 33220 | AI478225 | RG:2161567:8119907:C06 |
| 1960 | 33221 | 539.F11.Laf3_581160 | RG:1322461:12039907:C06 |
| 1961 | 33222 | 539.G11.Laf3_581161 | RG:2213638:8119907:D06 |
| 1962 | 33232 | 539.A23.Laf3_581347 | RG:2131578:8119907:A12 |
| 1963 | 33235 | AA662728 | RG:1218062:12039907:B12 |
| 1964 | 33244 | 539.M23.Laf3_581359 | RG:2341674:8119907:G12 |
| 1965 | 33248 | 518.A11.laf3_548237 | RG:110380:12039905:A06 |
| 1966 | 33249 | 518.B11.laf3_548238 | RG:1412814:12039908:A06 |
| 1967 | 33253 | 518.F11.laf3_548242 | RG:1526787:12039908:C06 |
| 1968 | 33254 | 518.G11.laf3_548243 | RG:183599:12039905:D06 |
| 1969 | 33261 | AI346645 | RG:1926602:12039908:G06 |
| 1970 | 33275 | 518.L23.laf3_548440 | RG:1872818:12039908:F12 |
| 1971 | 33287 | N28612 | RG:264033:Order7TM21:D06 |
| 1972 | 33291 | 519.L11.laf3_548632 | RG:269093:Order7TM21:F06 |
| 1973 | 33293 | 519.N11.laf3_548634 | RG:271623:Order7TM21:G06 |
| 1974 | 33294 | H38515 | RG:192671:Order7TM19:H06 |
| 1975 | 33301 | 519.F23.laf3_548818 | RG:262317:Order7TM21:C12 |
| 1976 | 33328 | 520.A23.laf3_559329 | RG:308004:Order7TM23:A12 |
| 1977 | 33330 | 520.C23.laf3_559331 | RG:309559:Order7TM23:B12 |
| 1978 | 33350 | R61591 | RG:37697:Order7TM02:D06 |
| 1979 | 33351 | T91350 | RG:116459:Order7TM16:D06 |
| 1980 | 33355 | 521.L11.laf3_559532 | RG:126266:Order7TM16:F06 |
| 1981 | 33359 | 521.P11.laf3_559536 | RG:134800:Order7TM16:H06 |
| 1982 | 33360 | 521.A23.laf3_559713 | RG:39932:Order7TM02:A12 |
| 1983 | 33374 | 521.O23.laf3_559727 | RG:51276:Order7TM02:H12 |
| 1984 | 33396 | AA678187 | RG:430831:Order7TM26:C12 |
| 1985 | 33417 | AA731087 | RG:1251730:Order7TM33:E06 |
| 1986 | 33434 | 523.K23.laf3_560491 | RG:728661:Order7TM31:F12 |
| 1987 | 33458 | AA810410 | RG:1338465:Order7TM35:B12 |
| 1988 | 33486 | AA902928 | RG:1516750:Order7TM37:H06 |
| 1989 | 33496 | AA909778 | RG:1476569:Order7TM37:E12 |
| 1990 | 33506 | 526.C11.laf3_561443 | RG:151456:OrderP01:B06 |
| 1991 | 33513 | AI223471 | RG:2002542:20003:E06 |
| 1992 | 33531 | AI265824 | RG:2006592:20003:F12 |
| 1993 | 33533 | AI246860 | RG:2007366:20003:G12 |
| 1994 | 33539 | 5384.B06.T3_583176 | 4ATNT052400B03 |
| 1995 | 33551 | PL4B052400.F07.GZ43_421734 | PL4B052400F07 |
| 1996 | 33554 | 5382.B12.BETA5_583032 | 2TNT052200B12 |
| 1997 | 33555 | 5384.B12.T3_583224 | 4ATNT052400H03 |
| 1998 | 33561 | PL4B052400.H03.GZ43_421704 | PL4B052400H03 |
| 1999 | 33563 | PL4B052400.D05.GZ43_421716 | PL4B052400D05 |
| 2000 | 33565 | PL4B052400.H06.GZ43_421728 | PL4B052400H06 |
| 2001 | 33593 | 539.J24.Laf3_581372 | RG:362359:OrderK01:E12 |
| 2002 | 33603 | 518.D12.laf3_548256 | RG:1173873:Order7TM11:B06 |
| 2003 | 33607 | AA837505 | RG:1410138:Order7TM11:D06 |
| 2004 | 33615 | 518.P12.laf3_548268 | RG:1592447:Order7TM11:H06 |
| 2005 | 33618 | AA702766 | RG:447683:12039906:B12 |
| 2006 | 33621 | 518.F24.laf3_548450 | RG:1239284:Order7TM11:C12 |
| 2007 | 33623 | AA838525 | RG:1418951:Order7TM11:D12 |
| 2008 | 33629 | 518.N24.laf3_548458 | RG:1486533:Order7TM11:G12 |
| 2009 | 33634 | 519.C12.laf3_548639 | RG:201628:Order7TM20:B06 |
| 2010 | 33636 | R98050 | RG:206795:Order7TM20:C06 |
| 2011 | 33664 | 520.A12.laf3_559153 | RG:343572:Order7TM24:A06 |
| 2012 | 33672 | W95805 | RG:358318:Order7TM24:E06 |
| 2013 | 33680 | 520.A24.laf3_559345 | RG:344338:Order7TM24:A12 |
| 2014 | 33682 | 520.C24.laf3_559347 | RG:345553:Order7TM24:B12 |
| 2015 | 33690 | AA016156 | RG:360639:Order7TM24:F12 |
| 2016 | 33693 | R34661 | RG:36928:Order7TM01:G12 |
| 2017 | 33703 | 521.H12.laf3_559544 | RG:144675:Order7TM17:D06 |
| 2018 | 33704 | H22158 | RG:160545:Order7TM18:E06 |
| 2019 | 33716 | R73930 | RG:156777:Order7TM18:C12 |
| 2020 | 33727 | R48093 | RG:153417:Order7TM17:H12 |
| 2021 | 33729 | AA278452 | RG:703940:Order7TM30:A06 |
| 2022 | 33740 | AA701039 | RG:397599:Order7TM25:G06 |
| 2023 | 33742 | 522.O12.laf3_559935 | RG:399390:Order7TM25:H06 |
| 2024 | 33748 | AA778077 | RG:379708:Order7TM25:C12 |
| 2025 | 33755 | 522.L24.laf3_560124 | RG:713954:Order7TM30:F12 |
| 2026 | 33800 | AA843787 | RG:1405420:Order7TM36:E06 |
| 2027 | 33802 | 524.K12.laf3_560699 | RG:1409375:Order7TM36:F06 |
| 2028 | 33819 | 524.L24.laf3_560892 | RG:1559941:Order7TM38:F12 |
| 2029 | 33823 | 524.P24.laf3_560896 | RG:1571250:Order7TM38:H12 |
| 2030 | 33842 | AI264420 | RG:1872799:Order7TM40:B12 |
| 2031 | 33851 | 525.L24.laf3_561276 | RG:2408975:Order7TM42:F12 |
| 2032 | 33892 | 529.D01.beta5_565388 | M00074843D:D02 |
| 2033 | 33902 | 529.N01.beta5_565398 | M00074844D:F09 |
| 2034 | 33919 | 529.O13.beta5_565591 | M00073985B:C09 |
| 2035 | 33923 | 527.C01.beta5_564619 | M00073796C:C06 |
| 2036 | 33925 | 2540.F24.GZ43_372151 | M00073796D:B08 |
| 2037 | 33930 | 527.J01.beta5_564626 | M00072996B:A10 |
| 2038 | 33938 | 527.B13.beta5_564810 | M00074343B:B03 |
| 2039 | 33940 | 2472.E21.GZ43_360966 | M00074343B:B09 |
| 2040 | 33950 | 2472.G02.GZ43_360995 | M00074346D:A10 |
| 2041 | 33951 | 527.O13.beta5_564823 | M00073812A:E09 |
| 2042 | 33965 | 536.N02.beta5_568934 | M00073442B:D12 |
| 2043 | 33973 | 536.F14.beta5_569118 | M00073469B:A09 |
| 2044 | 33979 | 2367.I16.GZ43_346202 | M00073469D:C06 |
| 2045 | 33983 | 536.P14.beta5_569128 | M00073469D:H04 |
| 2046 | 34000 | 535.P01.beta5_568536 | M00073824A:C04 |
| 2047 | 34002 | 535.B13.beta5_568714 | M00073839A:D05 |
| 2048 | 34003 | 535.C13.beta5_568715 | M00075619B:A04 |
| 2049 | 34005 | 2499.F08.GZ43_365363 | M00075621A:F06 |
| 2050 | 34012 | 535.L13.beta5_568724 | M00073843A:C10 |
| 2051 | 34033 | 532.A13.beta5_566793 | M00075166A:A12 |
| 2052 | 34034 | 532.B13.beta5_566794 | M00074666D:B04 |
| 2053 | 34041 | 2491.A18.GZ43_363614 | M00075167A:E12 |
| 2054 | 34058 | 2472.N19.GZ43_361180 | M00074374D:A08 |
| 2055 | 34062 | 531.N01.beta5_566230 | M00074377C:G04 |
| 2056 | 34066 | 531.B13.beta5_566410 | M00074402C:C03 |
| 2057 | 34072 | 531.H13.beta5_566416 | M00074423A:B06 |
| 2058 | 34075 | 2474.J01.GZ43_361834 | M00074481A:G09 |
| 2059 | 34120 | 534.H01.beta5_567760 | M00073715A:F05 |
| 2060 | 34124 | 534.L01.beta5_567764 | M00073715B:B06 |
| 2061 | 34131 | 534.C13.beta5_567947 | M00073885B:E06 |
| 2062 | 34134 | 534.F13.beta5_567950 | M00073738C:F01 |
| 2063 | 34139 | 534.K13.beta5_567955 | M00073885D:G11 |
| 2064 | 34142 | 534.N13.beta5_567958 | M00073741A:G07 |
| 2065 | 34167 | 530.G13.beta5_565967 | M00073001A:F07 |
| 2066 | 34168 | 530.H13.beta5_565968 | M00074235A:F11 |
| 2067 | 34184 | 2506.D23.GZ43_366652 | M00073853B:C04 |
| 2068 | 34188 | 2506.E17.GZ43_366670 | M00073854B:G11 |
| 2069 | 34195 | 2467.D11.GZ43_360548 | M00074962C:C08 |
| 2070 | 34202 | 533.J13.beta5_567186 | M00073863C:F12 |
| 2071 | 34203 | 2467.D20.GZ43_360557 | M00074966D:E08 |
| 2072 | 34228 | 537.D13.beta5_569868 | M00074277C:C10 |
| 2073 | 34238 | 2459.C06.GZ43_357046 | M00074278B:F02 |
| 2074 | 34252 | 2561.C08.GZ43_376287 | M00074111A:E09 |
| 2075 | 34260 | 529.D14.beta5_565596 | M00074135D:E06 |
| 2076 | 34270 | 529.N14.beta5_565606 | M00074138D:A08 |
| 2077 | 34271 | 529.O14.beta5_565607 | M00074019C:H06 |
| 2078 | 34272 | 529.P14.beta5_565608 | M00074138D:E07 |
| 2079 | 34274 | 2560.C15.GZ43_375142 | M00074079A:E07 |
| 2080 | 34278 | 527.F02.beta5_564638 | M00074079C:H03 |
| 2081 | 34283 | 527.K02.beta5_564643 | M00074198C:A10 |
| 2082 | 34287 | 527.O02.beta5_564647 | M00074198D:D10 |
| 2083 | 34289 | 527.A14.beta5_564825 | M00074208B:G09 |
| 2084 | 34290 | 527.B14.beta5_564826 | M00074091D:F06 |
| 2085 | 34294 | 527.F14.beta5_564830 | M00074093B:G07 |
| 2086 | 34300 | 527.L14.beta5_564836 | M00074094B:F10 |
| 2087 | 34302 | 527.N14.beta5_564838 | M00074095C:E06 |
| 2088 | 34310 | 536.E01.beta5_568909 | M00074159A:C10 |
| 2089 | 34322 | 536.A13.beta5_569097 | M00074175D:D08 |
| 2090 | 34330 | 536.I13.beta5_569105 | M00074177A:G11 |
| 2091 | 34345 | 2475.O20.GZ43_362357 | M00074567C:E04 |
| 2092 | 34359 | 535.G14.beta5_568735 | M00074602A:F03 |
| 2093 | 34365 | 535.M14.beta5_568741 | M00074604C:G09 |
| 2094 | 34366 | 535.N14.beta5_568742 | M00073517C:B05 |
| 2095 | 34370 | 532.B02.beta5_566618 | M00073897B:D12 |
| 2096 | 34375 | 532.G02.beta5_566623 | M00074872B:A12 |
| 2097 | 34376 | 2542.N11.GZ43_373098 | M00073898B:B05 |
| 2098 | 34392 | 2555.D22.GZ43_373253 | M00073916A:B07 |
| 2099 | 34402 | 531.B02.beta5_566234 | M00074296B:B03 |
| 2100 | 34412 | 531.L02.beta5_566244 | M00074298B:E09 |
| 2101 | 34432 | 531.P14.beta5_566440 | M00074320C:A06 |
| 2102 | 34498 | 2562.P24.GZ43_375847 | M00075409D:H01 |
| 2103 | 34514 | 530.B14.beta5_565978 | M00075412A:G03 |
| 2104 | 34518 | 530.F14.beta5_565982 | M00075431D:F08 |
| 2105 | 34542 | 2491.K18.GZ43_363854 | M00075216B:A03 |
| 2106 | 34544 | 2491.K21.GZ43_363857 | M00075217A:B04 |
| 2107 | 34548 | 2496.B16.GZ43_364123 | M00075241A:F08 |
| 2108 | 34560 | 2496.D03.GZ43_364158 | M00075245A:A06 |
| 2109 | 34563 | 537.C02.beta5_569691 | M00074909B:C10 |
| 2110 | 34565 | 537.E02.beta5_569693 | M00074909D:F05 |
| 2111 | 34569 | 537.I02.beta5_569697 | M00074910B:C09 |
| 2112 | 34574 | 537.N02.beta5_569702 | M00074738C:G02 |
| 2113 | 34575 | 2465.P03.GZ43_358427 | M00074911B:F05 |
| 2114 | 34588 | 2483.G10.GZ43_359809 | M00074757A:F04 |
| 2115 | 34607 | 529.O03.beta5_565431 | M00073969A:A02 |
| 2116 | 34610 | 529.B15.beta5_565610 | M00074857C:F04 |
| 2117 | 34615 | 529.G15.beta5_565615 | M00073986C:B02 |
| 2118 | 34616 | 529.H15.beta5_565616 | M00074858C:E07 |
| 2119 | 34659 | 2367.D02.GZ43_346068 | M00073445C:C02 |
| 2120 | 34661 | 2367.D05.GZ43_346071 | M00073445D:H03 |
| 2121 | 34671 | 536.P04.beta5_568968 | M00073447D:F01 |
| 2122 | 34683 | 536.L16.beta5_569156 | M00073471C:F03 |
| 2123 | 34691 | 535.C03.beta5_568555 | M00075560B:E01 |
| 2124 | 34713 | 2499.G09.GZ43_365388 | M00075626A:F03 |
| 2125 | 34714 | 535.J15.beta5_568754 | M00073844D:F01 |
| 2126 | 34719 | 535.O15.beta5_568759 | M00075626D:H03 |
| 2127 | 34729 | 2490.I24.GZ43_363428 | M00075088A:H02 |
| 2128 | 34734 | 2481.E13.GZ43_358996 | M00074641D:A12 |
| 2129 | 34741 | 532.E15.beta5_566829 | M00075172D:H03 |
| 2130 | 34766 | 531.N03.beta5_566262 | M00074409D:A04 |
| 2131 | 34783 | 531.O15.beta5_566455 | M00074493C:D09 |
| 2132 | 34784 | 2473.J12.GZ43_361461 | M00074413A:G11 |
| 2133 | 34818 | 2554.D24.GZ43_375943 | M00073716A:D06 |
| 2134 | 34825 | 2506.P15.GZ43_366932 | M00073873A:A10 |
| 2135 | 34838 | 534.F15.beta5_567982 | M00073744B:D02 |
| 2136 | 34839 | 534.G15.beta5_567983 | M00073888A:C05 |
| 2137 | 34845 | 534.M15.beta5_567989 | M00073888B:E05 |
| 2138 | 34848 | 2554.O09.GZ43_376192 | M00073745C:F11 |
| 2139 | 34849 | 530.A03.beta5_565801 | M00072973B:F11 |
| 2140 | 34851 | 530.C03.beta5_565803 | M00072973C:C03 |
| 2141 | 34856 | 530.H03.beta5_565808 | M00074225C:B10 |
| 2142 | 34858 | 530.J03.beta5_565810 | M00074225C:G04 |
| 2143 | 34865 | 2505.C14.GZ43_366235 | M00073002C:G11 |
| 2144 | 34868 | 2458.E05.GZ43_356709 | M00074239C:A09 |
| 2145 | 34870 | 530.F15.beta5_565998 | M00074240D:H06 |
| 2146 | 34877 | 530.M15.beta5_566005 | M00073003D:A10 |
| 2147 | 34890 | 533.J03.beta5_567026 | M00073855D:H02 |
| 2148 | 34898 | 533.B15.beta5_567210 | M00073864B:B04 |
| 2149 | 34899 | 533.C15.beta5_567211 | M00074968B:A10 |
| 2150 | 34901 | 2467.E15.GZ43_360576 | M00074968B:G06 |
| 2151 | 34903 | 533.G15.beta5_567215 | M00074969B:B06 |
| 2152 | 34912 | 533.P15.beta5_567224 | M00073866C:B06 |
| 2153 | 34921 | 2535.I23.GZ43_370302 | M00073586B:D12 |
| 2154 | 34927 | 2535.J12.GZ43_370315 | M00073587C:B03 |
| 2155 | 34938 | 2459.D06.GZ43_357070 | M00074280D:E06 |
| 2156 | 34940 | 537.L15.beta5_569908 | M00074280D:H03 |
| 2157 | 34945 | 529.A04.beta5_565433 | M00074005A:F07 |
| 2158 | 34956 | 529.L04.beta5_565444 | M00074115C:A05 |
| 2159 | 34971 | 529.K16.beta5_565635 | M00074021B:C04 |
| 2160 | 34983 | 2457.B22.GZ43_356258 | M00074200A:B03 |
| 2161 | 34985 | 527.I04.beta5_564673 | M00074200A:E09 |
| 2162 | 34992 | 527.P04.beta5_564680 | M00074084D:B04 |
| 2163 | 35002 | 527.J16.beta5_564866 | M00074096D:G12 |
| 2164 | 35030 | 536.E15.beta5_569133 | M00074177C:H08 |
| 2165 | 35033 | 536.J15.beta5_569138 | M00074552A:B02 |
| 2166 | 35046 | 2367.O10.GZ43_346340 | M00073493B:A02 |
| 2167 | 35060 | 535.D16.beta5_568764 | M00073518A:F06 |
| 2168 | 35063 | 2480.L16.GZ43_358783 | M00074610B:C08 |
| 2169 | 35080 | 532.H04.beta5_566656 | M00073899D:F10 |
| 2170 | 35088 | 2542.P02.GZ43_373137 | M00073905B:A03 |
| 2171 | 35107 | 531.C04.beta5_566267 | M00074694B:H04 |
| 2172 | 35113 | 531.I04.beta5_566273 | M00074696D:E01 |
| 2173 | 35120 | 531.P04.beta5_566280 | M00074303B:D06 |
| 2174 | 35121 | 531.A16.beta5_566457 | M00074719C:A10 |
| 2175 | 35126 | 531.F16.beta5_566462 | M00074831D:E12 |
| 2176 | 35127 | 531.G16.beta5_566463 | M00074720B:A07 |
| 2177 | 35131 | 531.K16.beta5_566467 | M00074721B:H07 |
| 2178 | 35132 | 2464.C10.GZ43_357738 | M00074832C:F06 |
| 2179 | 35215 | 530.O04.beta5_565831 | M00073762C:D01 |
| 2180 | 35242 | 533.J04.beta5_567042 | M00075219D:H04 |
| 2181 | 35248 | 533.P04.beta5_567048 | M00075221B:F03 |
| 2182 | 35256 | 533.H16.beta5_567232 | M00075247A:C11 |
| 2183 | 35260 | 2496.E04.GZ43_364183 | M00075248B:E06 |
| 2184 | 35267 | 537.C04.beta5_569723 | M00074912B:A10 |
| 2185 | 35285 | 537.E16.beta5_569917 | M00074924B:H01 |
| 2186 | 35287 | 537.G16.beta5_569919 | M00074924D:C03 |
| 2187 | 35320 | 529.H17.beta5_565648 | M00074859D:H07 |
| 2188 | 35321 | 529.I17.beta5_565649 | M00073988D:F09 |
| 2189 | 35330 | 527.B05.beta5_564682 | M00073000C:A09 |
| 2190 | 35342 | 2472.B03.GZ43_360876 | M00074327C:C03 |
| 2191 | 35344 | 527.P05.beta5_564696 | M00074328A:B01 |
| 2192 | 35347 | 2540.P01.GZ43_372368 | M00073813D:A12 |
| 2193 | 35349 | 527.E17.beta5_564877 | M00073813D:B06 |
| 2194 | 35355 | 527.K17.beta5_564883 | M00073814A:C01 |
| 2195 | 35357 | 527.M17.beta5_564885 | M00073814C:B04 |
| 2196 | 35360 | 2472.J07.GZ43_361072 | M00074358B:H11 |
| 2197 | 35396 | 535.D05.beta5_568588 | M00073830A:C02 |
| 2198 | 35403 | 535.K05.beta5_568595 | M00075559B:F11 |
| 2199 | 35405 | 535.M05.beta5_568597 | M00075584C:F03 |
| 2200 | 35434 | 532.J05.beta5_566674 | M00074645A:D05 |
| 2201 | 35438 | 2481.G06.GZ43_359037 | M00074646B:E09 |
| 2202 | 35455 | 532.O17.beta5_566871 | M00075187A:D04 |
| 2203 | 35460 | 531.D05.beta5_566284 | M00074437B:F04 |
| 2204 | 35462 | 531.F05.beta5_566286 | M00074390A:A07 |
| 2205 | 35468 | 531.L05.beta5_566292 | M00074406C:D02 |
| 2206 | 35469 | 531.M05.beta5_566293 | M00074460B:G08 |
| 2207 | 35474 | 531.B17.beta5_566474 | M00074416A:B04 |
| 2208 | 35483 | 531.K17.beta5_566483 | M00074500D:D01 |
| 2209 | 35485 | 531.M17.beta5_566485 | M00074501A:G07 |
| 2210 | 35486 | 531.N17.beta5_566486 | M00074443D:D10 |
| 2211 | 35524 | 534.D05.beta5_567820 | M00073720B:B08 |
| 2212 | 35532 | 534.L05.beta5_567828 | M00073722D:G11 |
| 2213 | 35569 | 530.A17.beta5_566025 | M00073003D:F02 |
| 2214 | 35579 | 2505.E11.GZ43_366280 | M00073006B:D05 |
| 2215 | 35608 | 533.H17.beta5_567248 | M00073866D:G02 |
| 2216 | 35612 | 533.L17.beta5_567252 | M00073867A:F07 |
| 2217 | 35622 | 537.F05.beta5_569742 | M00073048C:G12 |
| 2218 | 35624 | 537.H05.beta5_569744 | M00073049A:H04 |
| 2219 | 35626 | 2510.N13.GZ43_369350 | M00073049B:B03 |
| 2220 | 35632 | 537.P05.beta5_569752 | M00073049C:F01 |
| 2221 | 35633 | 2536.A09.GZ43_370480 | M00073603C:C02 |
| 2222 | 35640 | 537.H17.beta5_569936 | M00074284B:B03 |
| 2223 | 35656 | 529.H06.beta5_565472 | M00074120A:D10 |
| 2224 | 35668 | 529.D18.beta5_565660 | M00074145B:C04 |
| 2225 | 35670 | 529.F18.beta5_565662 | M00074146C:D12 |
| 2226 | 35676 | 2561.O08.GZ43_376575 | M00074148A:C01 |
| 2227 | 35678 | 2561.O09.GZ43_376576 | M00074148A:G12 |
| 2228 | 35682 | 527.B06.beta5_564698 | M00074084D:F11 |
| 2229 | 35688 | 527.H06.beta5_564704 | M00074085B:E06 |
| 2230 | 35689 | 2457.C17.GZ43_356277 | M00074201A:D12 |
| 2231 | 35694 | 527.N06.beta5_564710 | M00074086A:G02 |
| 2232 | 35702 | 527.F18.beta5_564894 | M00074098C:B09 |
| 2233 | 35703 | 527.G18.beta5_564895 | M00074215D:E01 |
| 2234 | 35730 | 2456.K07.GZ43_356075 | M00074179C:B01 |
| 2235 | 35733 | 2475.L12.GZ43_352277 | M00074556C:F07 |
| 2236 | 35735 | 536.H17.beta5_569168 | M00074556D:F07 |
| 2237 | 35743 | 536.P17.beta5_569176 | M00074557C:C12 |
| 2238 | 35780 | 2542.P15.GZ43_373150 | M00073907A:D03 |
| 2239 | 35790 | 532.N06.beta5_566694 | M00073908C:C08 |
| 2240 | 35792 | 532.P06.beta5_566696 | M00073908C:D09 |
| 2241 | 35798 | 2555.G05.GZ43_373308 | M00073919B:D07 |
| 2242 | 35803 | 532.K18.beta5_566883 | M00074904A:H09 |
| 2243 | 35812 | 2459.L07.GZ43_357263 | M00074304B:C09 |
| 2244 | 35813 | 531.E06.beta5_566301 | M00074698D:D01 |
| 2245 | 35818 | 531.J06.beta5_566306 | M00074304D:D07 |
| 2246 | 35820 | 531.L06.beta5_566308 | M00074304D:G12 |
| 2247 | 35825 | 2482.K23.GZ43_359534 | M00074722C:A04 |
| 2248 | 35907 | 530.C06.beta5_565851 | M00073763C:D03 |
| 2249 | 35912 | 2498.G11.GZ43_365006 | M00075439B:B12 |
| 2250 | 35914 | 530.J06.beta5_565858 | M00075441D:E10 |
| 2251 | 35934 | 530.N18.beta5_566054 | M00075494A:E02 |
| 2252 | 35968 | 2496.G14.GZ43_364241 | M00075255A:F10 |
| 2253 | 35985 | 2466.F18.GZ43_360219 | M00074927B:E02 |
| 2254 | 35987 | 2466.F22.GZ43_360223 | M00074927C:C07 |
| 2255 | 36016 | 529.P07.beta5_565496 | M00074852B:E04 |
| 2256 | 36025 | 529.I19.beta5_565681 | M00073994B:D01 |
| 2257 | 36026 | 529.J19.beta5_565682 | M00074863C:F07 |
| 2258 | 36043 | 527.K07.beta5_564723 | M00073804A:C10 |
| 2259 | 36045 | 2540.J12.GZ43_372235 | M00073804B:E02 |
| 2260 | 36055 | 527.G19.beta5_564911 | M00073816B:E11 |
| 2261 | 36057 | 527.I19.beta5_564913 | M00073816C:G07 |
| 2262 | 36058 | 527.J19.beta5_564914 | M00074359D:B10 |
| 2263 | 36065 | 2367.F17.GZ43_346131 | M00073457C:B05 |
| 2264 | 36075 | 536.L08.beta5_569028 | M00073462D:D11 |
| 2265 | 36085 | 2367.K13.GZ43_346247 | M00073474C:F08 |
| 2266 | 36089 | 536.J20.beta5_569218 | M00073475B:E12 |
| 2267 | 36099 | 2511.I14.GZ43_369615 | M00075567B:A03 |
| 2268 | 36102 | 2541.I21.GZ43_372604 | M00073832A:F12 |
| 2269 | 36103 | 2511.J11.GZ43_369636 | M00075559D:F05 |
| 2270 | 36114 | 535.B19.beta5_568810 | M00073846B:B01 |
| 2271 | 36125 | 535.M19.beta5_568821 | M00075640C:C05 |
| 2272 | 36131 | 532.C07.beta5_566699 | M00075137C:H04 |
| 2273 | 36143 | 532.O07.beta5_566711 | M00075161D:D08 |
| 2274 | 36157 | 532.M19.beta5_566901 | M00075191D:G11 |
| 2275 | 36162 | 531.B07.beta5_566314 | M00074415C:G02 |
| 2276 | 36165 | 2474.E09.GZ43_361722 | M00074461D:E04 |
| 2277 | 36174 | 2473.C15.GZ43_361296 | M00074420B:H05 |
| 2278 | 36175 | 2474.F14.GZ43_361751 | M00074465B:E06 |
| 2279 | 36180 | 531.D19.beta5_566508 | M00074395A:C03 |
| 2280 | 36236 | 534.L07.beta5_567860 | M00073730B:A06 |
| 2281 | 36255 | 2542.K06.GZ43_373021 | M00073892A:G06 |
| 2282 | 36262 | 530.F07.beta5_565870 | M00074228D:H10 |
| 2283 | 36268 | 530.L07.beta5_565876 | M00074230A:D01 |
| 2284 | 36273 | 530.A19.beta5_566057 | M00073006D:E04 |
| 2285 | 36276 | 2458.H07.GZ43_356783 | M00074248C:E12 |
| 2286 | 36285 | 2505.G06.GZ43_366323 | M00073009B:C08 |
| 2287 | 36312 | 533.H19.beta5_567280 | M00073867D:F10 |
| 2288 | 36313 | 2467.H15.GZ43_360648 | M00074980D:C01 |
| 2289 | 36314 | 533.J19.beta5_567282 | M00073868A:D02 |
| 2290 | 36320 | 533.P19.beta5_567288 | M00073868B:H11 |
| 2291 | 36321 | 2535.L05.GZ43_370356 | M00073590D:C01 |
| 2292 | 36346 | 537.J19.beta5_569970 | M00074287D:G09 |
| 2293 | 36352 | 537.P19.beta5_569976 | M00074288A:F11 |
| 2294 | 36360 | 529.H08.beta5_565504 | M00074122D:H01 |
| 2295 | 36377 | 529.I20.beta5_565697 | M00074025A:F06 |
| 2296 | 36380 | 529.L20.beta5_565700 | M00074151C:C06 |
| 2297 | 36387 | 2457.D13.GZ43_356297 | M00074202B:F08 |
| 2298 | 36392 | 527.H08.beta5_564736 | M00074087B:C09 |
| 2299 | 36398 | 2560.G18.GZ43_375241 | M00074087C:G05 |
| 2300 | 36410 | 527.J20.beta5_564930 | M00074102A:G02 |
| 2301 | 36414 | 2560.O16.GZ43_375431 | M00074102B:D02 |
| 2302 | 36428 | 536.K07.beta5_569011 | M00074170D:D12 |
| 2303 | 36438 | 2456.M06.GZ43_356122 | M00074184D:B01 |
| 2304 | 36446 | 536.M19.beta5_569205 | M00074187C:G10 |
| 2305 | 36449 | 535.A08.beta5_568633 | M00074582D:B09 |
| 2306 | 36454 | 535.F08.beta5_568638 | M00073505A:G06 |
| 2307 | 36467 | 535.C20.beta5_568827 | M00074619D:F03 |
| 2308 | 36469 | 535.E20.beta5_568829 | M00074620A:F03 |
| 2309 | 36481 | 532.A08.beta5_566713 | M00074886B:G06 |
| 2310 | 36483 | 2465.F22.GZ43_358206 | M00074886B:H08 |
| 2311 | 36484 | 532.D08.beta5_566716 | M00073909C:B03 |
| 2312 | 36490 | 532.J08.beta5_566722 | M00073911B:G10 |
| 2313 | 36497 | 532.A20.beta5_566905 | M00074904C:G12 |
| 2314 | 36505 | 2465.L22.GZ43_358350 | M00074905D:A01 |
| 2315 | 36506 | 2555.H13.GZ43_373340 | M00073921A:B03 |
| 2316 | 36508 | 532.L20.beta5_566916 | M00073921B:F09 |
| 2317 | 36510 | 532.N20.beta5_566918 | M00073922B:B12 |
| 2318 | 36520 | 531.H08.beta5_566336 | M00074308B:D08 |
| 2319 | 36535 | 2482.M06.GZ43_359565 | M00074726C:G03 |
| 2320 | 36537 | 531.I20.beta5_566529 | M00074727B:D05 |
| 2321 | 36635 | 530.K20.beta5_566083 | M00073790A:A12 |
| 2322 | 36638 | 530.N20.beta5_566086 | M00075489C:D01 |
| 2323 | 36648 | 533.H08.beta5_567104 | M00075229D:H01 |
| 2324 | 36662 | 2496.G19.GZ43_364246 | M00075255D:F11 |
| 2325 | 36681 | 537.I08.beta5_569793 | M00074914D:G01 |
| 2326 | 36689 | 2466.G14.GZ43_360239 | M00074928D:C11 |
| 2327 | 36696 | 537.H20.beta5_569984 | M00074773B:B08 |
| 2328 | 36701 | 2466.H09.GZ43_360258 | M00074929D:F03 |
| 2329 | 36704 | 537.P20.beta5_569992 | M00074773C:G04 |
| 2330 | 36707 | 529.C09.beta5_565515 | M00073979B:B05 |
| 2331 | 36713 | 529.I09.beta5_565521 | M00073979C:G07 |
| 2332 | 36714 | 529.J09.beta5_565522 | M00074853A:B10 |
| 2333 | 36715 | 529.K09.beta5_565523 | M00073980A:E06 |
| 2334 | 36717 | 2557.H23.GZ43_374118 | M00073980B:H11 |
| 2335 | 36718 | 2464.L10.GZ43_357954 | M00074853C:C08 |
| 2336 | 36726 | 529.F21.beta5_565710 | M00074865A:F05 |
| 2337 | 36730 | 529.J21.beta5_565714 | M00074866A:G12 |
| 2338 | 36741 | 2540.K07.GZ43_372254 | M00073806B:H03 |
| 2339 | 36756 | 2472.K12.GZ43_361101 | M00074361B:G05 |
| 2340 | 36768 | 2472.L16.GZ43_361129 | M00074366A:H07 |
| 2341 | 36781 | 2367.H05.GZ43_346167 | M00073465D:E09 |
| 2342 | 36783 | 2367.H06.GZ43_346168 | M00073465D:G02 |
| 2343 | 36785 | 536.B22.beta5_569242 | M00073480A:D03 |
| 2344 | 36795 | 2367.M04.GZ43_346286 | M00073482B:H04 |
| 2345 | 36799 | 2367.M14.GZ43_346296 | M00073484B:A05 |
| 2346 | 36804 | 535.D09.beta5_568652 | M00073834D.H06 |
| 2347 | 36805 | 535.E09.beta5_568653 | M00075586A:G06 |
| 2348 | 36808 | 535.H09.beta5_568656 | M00073836D:E05 |
| 2349 | 36813 | 535.M09.beta5_568661 | M00075601A:E09 |
| 2350 | 36822 | 535.F21.beta5_568846 | M00073849A:H07 |
| 2351 | 36826 | 535.J21.beta5_568850 | M00073849C:D11 |
| 2352 | 36833 | 532.A09.beta5_566729 | M00075097C:C10 |
| 2353 | 36859 | 532.K21.beta5_566931 | M00075199D:D11 |
| 2354 | 36860 | 2482.A10.GZ43_359281 | M00074682A:D04 |
| 2355 | 36865 | 531.A09.beta5_566345 | M00074465B:H12 |
| 2356 | 36867 | 531.C09.beta5_566347 | M00074465C:E10 |
| 2357 | 36875 | 531.K09.beta5_566355 | M00074468C:A04 |
| 2358 | 36883 | 2474.O20.GZ43_361973 | M00074510B:A11 |
| 2359 | 36895 | 531.O21.beta5_566551 | M00074513A:F05 |
| 2360 | 36934 | 2554.I07.GZ43_376046 | M00073732A:G02 |
| 2361 | 36937 | 2542.D20.GZ43_372867 | M00073880B:G01 |
| 2362 | 36939 | 534.K09.beta5_567891 | M00073881C:A01 |
| 2363 | 36942 | 2554.I17.GZ43_376056 | M00073733A:C03 |
| 2364 | 36944 | 2554.J10.GZ43_376073 | M00073735B:B11 |
| 2365 | 36956 | 534.L21.beta5_568084 | M00073753C:A02 |
| 2366 | 36960 | 534.P21.beta5_568088 | M00073754B:D03 |
| 2367 | 36963 | 2504.P01.GZ43_366150 | M00072977D:F11 |
| 2368 | 36966 | 530.F09.beta5_565902 | M00074230C:F02 |
| 2369 | 36967 | 2504.P17.GZ43_366166 | M00072978B:C07 |
| 2370 | 36976 | 2458.A21.GZ43_356629 | M00074231C:G02 |
| 2371 | 36989 | 2505.H18.GZ43_366359 | M00073012C:C08 |
| 2372 | 36990 | 530.N21.beta5_566102 | M00074256A:D06 |
| 2373 | 36999 | 533.G09.beta5_567119 | M00074958A:E09 |
| 2374 | 37011 | 533.C21.beta5_567307 | M00072951D:B02 |
| 2375 | 37017 | 533.I21.beta5_567313 | M00072953C:G08 |
| 2376 | 37018 | 2506.N09.GZ43_366878 | M00073869C:A02 |
| 2377 | 37023 | 2467.I24.GZ43_360681 | M00072981D:F06 |
| 2378 | 37027 | 537.C09.beta5_569803 | M00073594A:C01 |
| 2379 | 37035 | 537.K09.beta5_569811 | M00073595A:A10 |
| 2380 | 37046 | 537.F21.beta5_569998 | M00074290C:B05 |
| 2381 | 37049 | 2536.E11.GZ43_370578 | M00073616A:F06 |
| 2382 | 37053 | 2536.E23.GZ43_370590 | M00073617B:F03 |
| 2383 | 37054 | 2459.H03.GZ43_357163 | M00074293B:H08 |
| 2384 | 37056 | 537.P21.beta5_570008 | M00074293C:G09 |
| 2385 | 37062 | 529.F10.beta5_565534 | M00074131A:H09 |
| 2386 | 37065 | 529.I10.beta5_565537 | M00074014B:C11 |
| 2387 | 37072 | 529.P10.beta5_565544 | M00074132C:F10 |
| 2388 | 37073 | 529.A22.beta5_565721 | M00074026C:C06 |
| 2389 | 37085 | 2558.M22.GZ43_374621 | M00074027D:G03 |
| 2390 | 37087 | 529.O22.beta5_565735 | M00074028C:C04 |
| 2391 | 37088 | 529.P22.beta5_565736 | M00074156B:E07 |
| 2392 | 37103 | 2457.E24.GZ43_356332 | M00074206A:H12 |
| 2393 | 37108 | 2560.O19.GZ43_375434 | M00074102C:E01 |
| 2394 | 37109 | 527.E22.beta5_564957 | M00074218C:B12 |
| 2395 | 37125 | 536.F09.beta5_569038 | M00074535D:H03 |
| 2396 | 37130 | 2456.G16.GZ43_355988 | M00074172C:D05 |
| 2397 | 37136 | 536.O09.beta5_569047 | M00074174A:C02 |
| 2398 | 37144 | 536.G21.beta5_569231 | M00074191B:B05 |
| 2399 | 37146 | 2456.O10.GZ43_356174 | M00074191C:D08 |
| 2400 | 37149 | 536.N21.beta5_569238 | M00074561D:D12 |
| 2401 | 37152 | 536.O21.beta5_569239 | M00074192C:C10 |
| 2402 | 37162 | 2368.C09.GZ43_346435 | M00073512B:E12 |
| 2403 | 37172 | 535.D22.beta5_568860 | M00073530B:A02 |
| 2404 | 37176 | 535.H22.beta5_568864 | M00073531B:H02 |
| 2405 | 37215 | 532.O22.beta5_566951 | M00074906C:H07 |
| 2406 | 37218 | 531.B10.beta5_566362 | M00074310D:B04 |
| 2407 | 37220 | 531.D10.beta5_566364 | M00074310D:D02 |
| 2408 | 37243 | 2482.N14.GZ43_359597 | M00074730D:F06 |
| 2409 | 37248 | 2464.F24.GZ43_357824 | M00074839D:A04 |
| 2410 | 37315 | 530.C10.beta5_565915 | M00073768B:D10 |
| 2411 | 37322 | 530.J10.beta5_565922 | M00075425C:G02 |
| 2412 | 37324 | 2498.K17.GZ43_365108 | M00075454D:A11 |
| 2413 | 37330 | 530.B22.beta5_566106 | M00075498C:B11 |
| 2414 | 37336 | 2507.L15.GZ43_367220 | M00075501A:F10 |
| 2415 | 37346 | 2491.O22.GZ43_363954 | M00075231D:D09 |
| 2416 | 37379 | 537.C10.beta5_569819 | M00074916C:H10 |
| 2417 | 37381 | 537.E10.beta5_569821 | M00074916D:B12 |
| 2418 | 37397 | 537.E22.beta5_570013 | M00074930B:D04 |
| 2419 | 37398 | 537.F22.beta5_570014 | M00074774A:D03 |
| 2420 | 37401 | 2466.H22.GZ43_360271 | M00074932A:F01 |
| 2421 | 37431 | 529.G23.beta5_565743 | M00074001D:G02 |
| 2422 | 37433 | 529.I23.beta5_565745 | M00074002A:D11 |
| 2423 | 37434 | 529.J23.beta5_565746 | M00074869D:D08 |
| 2424 | 37437 | 529.M23.beta5_565749 | M00074002B:E10 |
| 2425 | 37438 | 529.N23.beta5_565750 | M00074870B:C05 |
| 2426 | 37447 | 527.G11.beta5_564783 | M00073808C:H06 |
| 2427 | 37457 | 527.A23.beta5_564969 | M00073819A:A12 |
| 2428 | 37467 | 527.K23.beta5_564979 | M00073819C:F05 |
| 2429 | 37469 | 527.M23.beta5_564981 | M00073819D:A05 |
| 2430 | 37479 | 2367.H19.GZ43_346181 | M00073468A:G03 |
| 2431 | 37510 | 2541.L10.GZ43_372665 | M00073838C:F02 |
| 2432 | 37522 | 2506.C08.GZ43_366613 | M00073850A:H09 |
| 2433 | 37528 | 2506.C14.GZ43_366619 | M00073850D:A03 |
| 2434 | 37532 | 535.L23.beta5_568884 | M00073851A:C04 |
| 2435 | 37551 | 532.O11.beta5_566775 | M00075165D:B06 |
| 2436 | 37561 | 2491.I06.GZ43_363794 | M00075203A:G06 |
| 2437 | 37575 | 531.G11.beta5_566383 | M00074473B:A09 |
| 2438 | 37579 | 531.K11.beta5_566387 | M00074474D:F08 |
| 2439 | 37581 | 531.M11.beta5_566389 | M00074476A:A06 |
| 2440 | 37584 | 531.P11.beta5_566392 | M00074441B:A02 |
| 2441 | 37591 | 2474.P14.GZ43_361991 | M00074514A:E08 |
| 2442 | 37592 | 531.H23.beta5_566576 | M00074425C:E05 |
| 2443 | 37595 | 531.K23.beta5_566579 | M00074515A:E02 |
| 2444 | 37597 | 531.M23.beta5_566581 | M00074515A:G08 |
| 2445 | 37637 | 534.E11.beta5_567917 | M00073884A:D12 |
| 2446 | 37638 | 534.F11.beta5_567918 | M00073735C:E04 |
| 2447 | 37660 | 534.L23.beta5_568116 | M00073757A:G10 |
| 2448 | 37662 | 534.N23.beta5_568118 | M00073757C:B09 |
| 2449 | 37667 | 2505.A09.GZ43_366182 | M00072979C:F02 |
| 2450 | 37677 | 530.M11.beta5_565941 | M00072980B:C06 |
| 2451 | 37680 | 2458.C03.GZ43_356659 | M00074234B:B05 |
| 2452 | 37682 | 2458.L01.GZ43_356873 | M00074256D:D03 |
| 2453 | 37688 | 2458.L05.GZ43_356877 | M00074258A:G05 |
| 2454 | 37692 | 530.L23.beta5_566132 | M00074258B:F07 |
| 2455 | 37702 | 2506.I05.GZ43_366754 | M00073861B:C11 |
| 2456 | 37707 | 533.K11.beta5_567155 | M00074960C:H09 |
| 2457 | 37715 | 2467.J18.GZ43_360699 | M00072983C:F04 |
| 2458 | 37724 | 533.L23.beta5_567348 | M00073870A:E04 |
| 2459 | 37729 | 537.A11.beta5_569833 | M00073595D:H05 |
| 2460 | 37731 | 2535.N11.GZ43_370410 | M00073596B:B12 |
| 2461 | 37734 | 2459.A22.GZ43_357014 | M00074274D:F10 |
| 2462 | 37735 | 537.G11.beta5_569839 | M00073597A:A03 |
| 2463 | 37743 | 2535.O02.GZ43_370425 | M00073597D:H01 |
| 2464 | 37748 | 537.D23.beta5_570028 | M00074293D:H07 |
| 2465 | 37760 | 537.P23.beta5_570040 | M00074296B:B11 |
| 2466 | 37764 | 529.D12.beta5_565564 | M00074134A:E08 |
| 2467 | 37768 | 2561.K01.GZ43_376472 | M00074135A:F02 |
| 2468 | 37794 | 527.B12.beta5_564794 | M00074089D:E03 |
| 2469 | 37805 | 527.M12.beta5_564805 | M00074208B:F09 |
| 2470 | 37826 | 2456.H06.GZ43_356002 | M00074174B:H08 |
| 2471 | 37827 | 2475.H07.GZ43_362176 | M00074540C:E02 |
| 2472 | 37831 | 536.H11.beta5_569072 | M00074541C:E08 |
| 2473 | 37834 | 536.I11.beta5_569073 | M00074175A:D08 |
| 2474 | 37859 | 535.C12.beta5_568699 | M00074594B:A07 |
| 2475 | 37861 | 535.E12.beta5_568701 | M00074594B:E10 |
| 2476 | 37865 | 2480.I08.GZ43_358703 | M00074596D:B12 |
| 2477 | 37868 | 535.L12.beta5_568708 | M00073514A:G01 |
| 2478 | 37874 | 2368.H23.GZ43_346569 | M00073532C:H12 |
| 2479 | 37877 | 2481.B11.GZ43_358922 | M00074633B:H01 |
| 2480 | 37882 | 535.J24.beta5_568898 | M00073537D:C03 |
| 2481 | 37887 | 2481.C09.GZ43_358944 | M00074635B:C07 |
| 2482 | 37895 | 2465.H15.GZ43_358247 | M00074890B:C01 |
| 2483 | 37897 | 2465.H17.GZ43_358249 | M00074890B:D05 |
| 2484 | 37914 | 532.J24.beta5_566978 | M00073925B:A01 |
| 2485 | 37926 | 531.F12.beta5_566398 | M00074315C:F09 |
| 2486 | 37929 | 531.I12.beta5_566401 | M00074713B:F02 |
| 2487 | 37947 | 531.K24.beta5_566595 | M00074735C:A11 |
| 2488 | 37951 | 531.O24.beta5_566599 | M00074735D:G06 |
| 2489 | 38020 | 2498.M13.GZ43_365152 | M00075444D:F05 |
| 2490 | 38022 | 2498.M15.GZ43_365154 | M00075448D:A02 |
| 2491 | 38026 | 530.J12.beta5_565954 | M00075414D:G01 |
| 2492 | 38029 | 2565.N09.GZ43_398087 | M00073773D:B10 |
| 2493 | 38048 | 530.P24.beta5_566152 | M00075474C:G02 |
| 2494 | 38050 | 2496.A04.GZ43_364087 | M00075235C:E03 |
| 2495 | 38068 | 533.D24.beta5_567356 | M00075283A:F04 |
| 2496 | 38074 | 533.J24.beta5_567362 | M00075285D:A02 |
| 2497 | 38083 | 2466.C04.GZ43_360133 | M00074918B:F03 |
| 2498 | 38089 | 2466.C16.GZ43_360145 | M00074919C:D12 |
| 2499 | 38091 | 2466.C22.GZ43_360151 | M00074919D:H09 |
| 2500 | 38096 | 537.P12.beta5_569864 | M00074754C:G02 |
| 2501 | 38101 | 537.E24.beta5_570045 | M00074935A:D06 |
| 2502 | 38103 | 537.G24.beta5_570047 | M00074935B:C06 |
| 2503 | 38107 | 537.K24.beta5_570051 | M00074935C:E08 |
| 2504 | 38110 | 537.N24.beta5_570054 | M00074782B:F01 |
| 2505 | 38112 | 537.P24.beta5_570056 | M00074783B:B11 |

[0449] Table 15 (on a CD ROM filed herewith) provides the results for gene products expressed by at least 2-fold or greater in the prostate tumor samples relative to normal tissue samples in at least 20% of the patients tested. Table 15 includes: 1) the spot identification number (“Spot ID”); 2) the GenBank Accession Number of the publicly available sequence corresponding to the polynucleotide (“GenBankHit”); 3) a description of the GenBank sequence (“GenBankDesc”); 4) the score of the similarity of the polynucleotide sequence and the GenBank sequence (“GenBankScore”); 5) the number of patients analyzed; 6) the percentage of patients tested in which expression levels (e.g., as message level) of the gene was at least 2-fold greater in cancerous tissue than in matched normal tissue (“>=2×”); 7) the percentage of patients tested in which expression levels (e.g., as message level) of the gene was at least 5-fold greater in cancerous tissue than in matched normal tissue (“>=5×”); and 8) the percentage of patients tested in which expression levels (e.g., as message level) of the gene was less than or equal to ½ of the expression level in matched normal cells (“<=half×”).

[0450] Table 16 (on a CD ROM filed herewith) provides the results for gene products in which expression levels of the gene in prostate tumor cells was less than or equal to ½ of the expression level in normal tissue samples in at least 20% of the patients tested. Table 16 includes: 1) the spot identification number (“Spot ID”); 2) the GenBank Accession Number of the publicly available sequence corresponding to the polynucleotide (“GenBankHit”); 3) a description of the GenBank sequence (“GenBankDesc”); 4) the score of the similarity of the polynucleotide sequence and the GenBank sequence (“GenBankScore”); 5) the number of patients analyzed; 6) the percentage of patients tested in which expression levels (e.g., as message level) of the gene was at least 2-fold greater in cancerous tissue than in matched normal tissue (“>=2×”); 7) the percentage of patients tested in which expression levels (e.g., as message level) of the gene was at least 5-fold greater in cancerous tissue than in matched normal tissue (“>=5×”); and 8) the percentage of patients tested in which expression levels (e.g., as message level) of the gene was less than or equal to ½ of the expression level in matched normal cells (“<=half×”).

[0451] Tables 15 and 16 also include the results from each patient, identified by the patient ID number (e.g., 93). This data represents the ratio of differential expression for the samples tested from that particular patient's tissues (e.g., “93” is the ratio from the tissue samples of patient ID no. 93). The ratios of differential expression are expressed as a normalized hybridization signal associated with the tumor probe divided by the normalized hybridization signal with the normal probe. Thus, a ratio greater than 1 indicates that the gene product is increased in expression in cancerous cells relative to normal cells, while a ratio of less than 1 indicates the opposite.

[0452] These data provide evidence that the genes represented by the polynucleotides having the indicated sequences are differentially expressed in prostate cancer as compared to normal non-cancerous prostate tissue.

### Example 21

### Antisense Regulation of Gene Expression

[0453] The expression of the differentially expressed genes represented by the polynucleotides in the cancerous cells can be analyzed using antisense knockout technology to confirm the role and function of the gene product in tumorigenesis, e.g., in promoting a metastatic phenotype.

[0454] A number of different oligonucleotides complementary to the mRNA generated by the differentially expressed genes identified herein can be designed as potential antisense oligonucleotides, and tested for their ability to suppress expression of the genes. Sets of antisense oligomers specific to each candidate target are designed using the sequences of the polynucleotides corresponding to a differentially expressed gene and the software program HYBsimulator Version 4 (available for Windows 95/Windows NT or for Power Macintosh, RNAture, Inc. 1003 Health Sciences Road, West, Irvine, Calif. 92612 USA). Factors that are considered when designing antisense oligonucleotides include: 1) the secondary structure of oligonucleotides; 2) the secondary structure of the target gene; 3) the specificity with no or minimum cross-hybridization to other expressed genes; 4) stability; 5) length and 6) terminal GC content. The antisense oligonucleotide is designed so that it will hybridize to its target sequence under conditions of high stringency at physiological temperatures (e.g., an optimal temperature for the cells in culture to provide for hybridization in the cell, e.g., about 37° C.), but with minimal formation of homodimers.

[0455] Using the sets of oligomers and the HYBsimulator program, three to ten antisense oligonucleotides and their reverse controls are designed and synthesized for each candidate mRNA transcript, which transcript is obtained from the gene corresponding to the target polynucleotide sequence of interest. Once synthesized and quantitated, the oligomers are screened for efficiency of a transcript knock-out in a panel of cancer cell lines. The efficiency of the knock-out is determined by analyzing mRNA levels using lightcycler quantification. The oligomers that resulted in the highest level of transcript knock-out, wherein the level was at least about 50%, preferably about 80-90%, up to 95% or more up to undetectable message, are selected for use in a cell-based proliferation assay, an anchorage independent growth assay, and an apoptosis assay.

[0456] The ability of each designed antisense oligonucleotide to inhibit gene expression is tested through transfection into LNCaP, PC3, 22Rv1, MDA-PCA-2b, or DU145 prostate carcinoma cells. For each transfection mixture, a carrier molecule (such as a lipid, lipid derivative, lipid-like molecule, cholesterol, cholesterol derivative, or cholesterol-like molecule) is prepared to a working concentration of 0.5 mM in water, sonicated to yield a uniform solution, and filtered through a 0.45 μm PVDF membrane. The antisense or control oligonucleotide is then prepared to a working concentration of 100 μM in sterile Millipore water. The oligonucleotide is further diluted in OptiMEM™ (Gibco/BRL), in a microfuge tube, to 2 μM, or approximately 20 μg oligo/mil of OptiMEM™. In a separate microfuge tube, the carrier molecule, typically in the amount of about 1.5-2 nmol carrier/μg antisense oligonucleotide, is diluted into the same volume of OptiMEM™ used to dilute the oligonucleotide. The diluted antisense oligonucleotide is immediately added to the diluted carrier and mixed by pipetting up and down. Oligonucleotide is added to the cells to a final concentration of 30 nM.

[0457] The level of target mRNA that corresponds to a target gene of interest in the transfected cells is quantitated in the cancer cell lines using the Roche LightCycler™ real-time PCR machine. Values for the target mRNA are normalized versus an internal control (e.g., beta-actin). For each 20 μl reaction, extracted RNA (generally 0.2-1 μg total) is placed into a sterile 0.5 or 1.5 ml microcentrifuge tube, and water is added to a total volume of 12.5 μl. To each tube is added 7.5 μl of a buffer/enzyme mixture, prepared by mixing (in the order listed) 2.5 μl H₂O, 2.0 μl 10× reaction buffer, 10 μl oligo dT (20 pmol), 1.0 μl dNTP mix (10 mM each), 0.5 μl RNAsin® (20 u) (Ambion, Inc., Hialeah, Fla.), and 0.5 μl MMLV reverse transcriptase (50 u) (Ambion, Inc.). The contents are mixed by pipetting up and down, and the reaction mixture is incubated at 42° C. for 1 hour. The contents of each tube are centrifuged prior to amplification.

[0458] An amplification mixture is prepared by mixing in the following order: 1× PCR buffer II, 3 mM MgCl₂, 140 μM each dNTP, 0.175 pmol each oligo, 1:50,000 dil of SYBR® Green, 0.25 mg/ml BSA, 1 unit Taq polymerase, and H₂O to 20 μl. (PCR buffer II is available in 10× concentration from Perkin-Elmer, Norwalk, Conn.). In 1× concentration it contains 10 mM Tris pH 8.3 and 50 mM KCl. SYBR® Green (Molecular Probes, Eugene, Oreg.) is a dye which fluoresces when bound to double stranded DNA. As double stranded PCR product is produced during amplification, the fluorescence from SYBR® Green increases. To each 20 μl aliquot of amplification mixture, 2 μl of template RT is added, and amplification is carried out according to standard protocols. The results are expressed as the percent decrease in expression of the corresponding gene product relative to non-transfected cells, vehicle-only transfected (mock-transfected) cells, or cells transfected with reverse control oligonucleotides.

### Example 22

### Effect of Expression on Proliferation

[0459] The effect of gene expression on the inhibition of cell proliferation can be assessed in metastatic breast cancer cell lines (MDA-MB-231 (“231”)); SW620 colon colorectal carcinoma cells; SKOV3 cells (a human ovarian carcinoma cell line); or LNCaP, PC3, 22Rv1, MDA-PCA-2b, or DU145 prostate cancer cells.

[0460] Cells are plated to approximately 60-80% confluency in 96-well dishes. Antisense or reverse control oligonucleotide is diluted to 2 μM in OptiMEM™. The oligonucleotide-OptiMEM™ can then be added to a delivery vehicle, which delivery vehicle can be selected so as to be optimized for the particular cell type to be used in the assay. The oligo/delivery vehicle mixture is then further diluted into medium with serum on the cells. The final concentration of oligonucleotide for all experiments can be about 300 nM.

[0461] Antisense oligonucleotides are prepared as described above (see Example 21). Cells are transfected overnight at 37° C. and the transfection mixture is replaced with fresh medium the next morning. Transfection is carried out as described above in Example 21.

[0462] Those antisense oligonucleotides that result in inhibition of proliferation of SW620 cells indicate that the corresponding gene plays a role in production or maintenance of the cancerous phenotype in cancerous colon cells. Those antisense oligonucleotides that inhibit proliferation in SKOV3 cells represent genes that play a role in production or maintenance of the cancerous phenotype in cancerous breast cells. Those antisense oligonucleotides that result in inhibition of proliferation of MDA-MB-231 cells indicate that the corresponding gene plays a role in production or maintenance of the cancerous phenotype in cancerous ovarian cells. Those antisense oligonucleotides that inhibit proliferation in LNCaP, PC3, 22Rv1, MDA-PCA-2b, or DU145 cells represent genes that play a role in production or maintenance of the cancerous phenotype in cancerous prostate cells.

### Example 23

### Effect of Gene Expression on Cell Migration

[0463] The effect of gene expression on the inhibition of cell migration can be assessed in LNCaP, PC3, 22Rv1, MDA-PCA-2b, or DU145 prostate cancer cells using static endothelial cell binding assays, non-static endothelial cell binding assays, and transmigration assays.

[0464] For the static endothelial cell binding assay, antisense oligonucleotides are prepared as described above (see Example 21). Two days prior to use, prostate cancer cells (CaP) are plated and transfected with antisense oligonucleotide as described above (see Examples 21 and 22). On the day before use, the medium is replaced with fresh medium, and on the day of use, the medium is replaced with fresh medium containing 2 μM CellTracker green CMFDA (Molecular Probes, Inc.) and cells are incubated for 30 min. Following incubation, CaP medium is replaced with fresh medium (no CMFDA) and cells are incubated for an additional 30-60 min. CaP cells are detached using CMF PBS/2.5 mM EDTA or trypsin, spun and resuspended in DMEM/1% BSA/10 mM HEPES pH 7.0. Finally, CaP cells are counted and resuspended at a concentration of 1×10⁶ cells/ml.

[0465] Endothelial cells (EC) are plated onto 96-well plates at 40-50% confluence 3 days prior to use. On the day of use, EC are washed 1× with PBS and 50λ DMDM/1%BSA/10 mM HEPES pH 7 is added to each well. To each well is then added 50K (50λ) CaP cells in DMEM/1% BSA/10 mM HEPES pH 7. The plates are incubated for an additional 30 min and washed 5× with PBS containing Ca⁺⁺ and Mg⁺⁺. After the final wash, 100 μL PBS is added to each well and fluorescence is read on a fluorescent plate reader (Ab492/Em 516 nm).

[0466] For the non-static endothelial cell binding assay, CaP are prepared as described above. EC are plated onto 24-well plates at 30-40% confluence 3 days prior to use. On the day of use, a subset of EC are treated with cytokine for 6 hours then washed 2× with PBS. To each well is then added 150-200K CaP cells in DMEM/1% BSA/10 mM HEPES pH 7. Plates are placed on a rotating shaker (70 RPM) for 30 min and then washed 3× with PBS containing Ca⁺⁺ and Mg⁺⁺. After the final wash, 500 μL PBS is added to each well and fluorescence is read on a fluorescent plate reader (Ab492/Em 516 nm).

[0467] For the transmigration assay, CaP are prepared as described above with the following changes. On the day of use, CaP medium is replaced with fresh medium containing 5 μM CellTracker green CMFDA (Molecular Probes, Inc.) and cells are incubated for 30 min. Following incubation, CaP medium is replaced with fresh medium (no CMFDA) and cells are incubated for an additional 30-60 min. CaP cells are detached using CMF PBS/2.5 mM EDTA or trypsin, spun and resuspended in EGM-2-MV medium. Finally, CaP cells are counted and resuspended at a concentration of 1×10⁶ cells/ml.

[0468] EC are plated onto FluorBlok transwells (BD Biosciences) at 30-40% confluence 5-7 days before use. Medium is replaced with fresh medium 3 days before use and on the day of use. To each transwell is then added 50K labeled CaP. 30 min prior to the first fluorescence reading, 10 μg of FITC-dextran (10K MW) is added to the EC plated filter. Fluorescence is then read at multiple time points on a fluorescent plate reader (Ab492/Em 516 nm).

[0469] Those antisense oligonucleotides that result in inhibition of binding of LNCaP, PC3, 22Rv1, MDA-PCA-2b, or DU145 prostate cancer cells to endothelial cells indicate that the corresponding gene plays a role in the production or maintenance of the cancerous phenotype in cancerous prostate cells. Those antisense oligonucleotides that result in inhibition of endothelial cell transmigration by LNCaP, PC3, 22Rv1, MDA-PCA-2b, or DU145 prostate cancer cells indicate that the corresponding gene plays a role in the production or maintenance of the cancerous phenotype in cancerous prostate cells.

### Example 24

### Effect of Gene Expression on Colony Formation

[0470] The effect of gene expression upon colony formation of SW620 cells, SKOV3 cells, MD-MBA-231 cells, LNCaP cells, PC3 cells, 22Rv1 cells, MDA-PCA-2b cells, and DU145 cells can be tested in a soft agar assay. Soft agar assays are conducted by first establishing a bottom layer of 2 ml of 0.6% agar in media plated fresh within a few hours of layering on the cells. The cell layer is formed on the bottom layer by removing cells transfected as described above from plates using 0.05% trypsin and washing twice in media. The cells are counted in a Coulter counter, and resuspended to 10⁶ per ml in media. 10 μl aliquots are placed with media in 96-well plates (to check counting with WST1), or diluted further for the soft agar assay. 2000 cells are plated in 800 μl 0.4% agar in duplicate wells above 0.6% agar bottom layer. After the cell layer agar solidifies, 2 ml of media is dribbled on top and antisense or reverse control oligo (produced as described above) is added without delivery vehicles. Fresh media and oligos are added every 3-4 days. Colonies form in 10 days to 3 weeks. Fields of colonies are counted by eye. Wst-1 metabolism values can be used to compensate for small differences in starting cell number. Larger fields can be scanned for visual record of differences.

[0471] Those antisense oligonucleotides that result in inhibition of colony formation of SW620 cells indicate that the corresponding gene plays a role in production or maintenance of the cancerous phenotype in cancerous colon cells. Those antisense oligonucleotides that inhibit colony formation in SKOV3 cells represent genes that play a role in production or maintenance of the cancerous phenotype in cancerous breast cells. Those antisense oligonucleotides that result in inhibition of colony formation of MDA-MB-231 cells indicate that the corresponding gene plays a role in production or maintenance of the cancerous phenotype in cancerous ovarian cells. Those antisense oligonucleotides that inhibit colony formation in LNCaP, PC3, 22Rv1, MDA-PCA-2b, or DU145 cells represent genes that play a role in production or maintenance of the cancerous phenotype in cancerous prostate cells.

### Example 25

### Induction of Cell Death Upon Depletion of Polypeptides by Depletion of mRNA (“Antisense Knockout”)

[0472] In order to assess the effect of depletion of a target message upon cell death, LNCaP, PC3, 22Rv1, MDA-PCA-2b, or DU145 cells, or other cells derived from a cancer of interest, can be transfected for proliferation assays. For cytotoxic effect in the presence of cisplatin (cis), the same protocol is followed but cells are left in the presence of 2 μM drug. Each day, cytotoxicity is monitored by measuring the amount of LDH enzyme released in the medium due to membrane damage. The activity of LDH is measured using the Cytotoxicity Detection Kit from Roche Molecular Biochemicals. The data is provided as a ratio of LDH released in the medium vs. the total LDH present in the well at the same time point and treatment (rLDH/tLDH). A positive control using antisense and reverse control oligonucleotides for BCL2 (a known anti-apoptotic gene) is included; loss of message for BCL2 leads to an increase in cell death compared with treatment with the control oligonucleotide (background cytotoxicity due to transfection).

### Example 26

### Functional Analysis of Gene Products Differentially Expressed in Prostate Cancer in Patients

[0473] The gene products of sequences of a gene differentially expressed in cancerous cells can be further analyzed to confirm the role and function of the gene product in tumorigenesis, e.g., in promoting or inhibiting development of a metastatic phenotype. For example, the function of gene products corresponding to genes identified herein can be assessed by blocking function of the gene products in the cell. For example, where the gene product is secreted or associated with a cell surface membrane, blocking antibodies can be generated and added to cells to examine the effect upon the cell phenotype in the context of, for example, the transformation of the cell to a cancerous, particularly a metastatic, phenotype. In order to generate antibodies, a clone corresponding to a selected gene product is selected, and a sequence that represents a partial or complete coding sequence is obtained. The resulting clone is expressed, the polypeptide produced isolated, and antibodies generated. The antibodies are then combined with cells and the effect upon tumorigenesis assessed.

[0474] Where the gene product of the differentially expressed genes identified herein exhibits sequence homology to a protein of known function (e.g., to a specific kinase or protease) and/or to a protein family of known function (e.g., contains a domain or other consensus sequence present in a protease family or in a kinase family), then the role of the gene product in tumorigenesis, as well as the activity of the gene product, can be examined using small molecules that inhibit or enhance function of the corresponding protein or protein family.

[0475] Additional functional assays include, but are not necessarily limited to, those that analyze the effect of expression of the corresponding gene upon cell cycle and cell migration. Methods for performing such assays are well known in the art.

### Example 27

### Contig Assembly and Additional Gene Characterization

[0476] The sequences of the polynucleotides provided in the present invention can be used to extend the sequence information of the gene to which the polynucleotides correspond (e.g., a gene, or mRNA encoded by the gene, having a sequence of the polynucleotide described herein). This expanded sequence information can in turn be used to further characterize the corresponding gene, which in turn provides additional information about the nature of the gene product (e.g., the normal function of the gene product). The additional information can serve to provide additional evidence of the gene product's use as a therapeutic target, and provide further guidance as to the types of agents that can modulate its activity.

[0477] In one example, a contig is assembled using a sequence of a polynucleotide of the present invention, which is present in a clone. A “contig” is a contiguous sequence of nucleotides that is assembled from nucleic acid sequences having overlapping (e.g., shared or substantially similar) sequence information. The sequences of publicly-available ESTs (Expressed Sequence Tags) and the sequences of various clones from several cDNA libraries synthesized at Chiron can be used in the contig assembly.

[0478] The contig is assembled using the software program Sequencher, version 4.05, according to the manufacturer's instructions and an overview alignment of the contiged sequences is produced. The sequence information obtained in the contig assembly can then be used to obtain a consensus sequence derived from the contig using the Sequencher program. The consensus sequence is used as a query sequence in a TeraBLASTN search of the DGTI DoubleTwist Gene Index (DoubleTwist, Inc., Oakland, Calif.), which contains all the EST and non-redundant sequence in public databases.

[0479] Through contig assembly and the use of homology searching software programs, the sequence information provided herein can be readily extended to confirm, or confirm a predicted, gene having the sequence of the polynucleotides described in the present invention. Further the information obtained can be used to identify the function of the gene product of the gene corresponding to the polynucleotides described herein. While not necessary to the practice of the invention, identification of the function of the corresponding gene, can provide guidance in the design of therapeutics that target the gene to modulate its activity and modulate the cancerous phenotype (e.g., inhibit metastasis, proliferation, and the like).

### Example 28

### Expression of chondroitin 4-O sulfotransferase 2 (C4S-2)

[0480] Laser Capture Microdissection (LCM) was used to dissect cancerous cells, as well as peri-tumoral normal cells from patients with prostate cancer (various grades), colon cancer, breast cancer and stomach cancer. Total RNA was prepared from these samples by standard methods. cDNA probes were made from this RNA and fluorescently labeled. The labeled cDNAs were used to probe a microarray chip containing sequences of multiple genes. As shown in Table. 15, Spot ID 25837, which corresponds to chondroitin 4-O sulfotransferase 2 (C4S-2) and SEQ ID 847 (see Table 14), revealed a differential expression between normal and cancerous cells. The data displayed in FIG. 22 show an up-regulation of C4S-2 mRNA in prostate, colon and stomach cancer. The table headings are as follows: “# Patients” indicates the number of patients whose RNA was analyzed for each cancer type, and the percentages of each of the patient groups is expressed in the table; “>2×” indicates a greater than two-fold up-regulation (cancer over normal) at the mRNA level; “>5×” indicates a greater than 5-fold up-regulation at the mRNA level; “<0.5×” indicates a greater than 2-fold down-regulation at the mRNA level. Further experimental details of this example may be found in Example 20 of this disclosure.

[0481] Trending analysis revealed that several genes trend in patient expression with C4S-2 (FIG. 34). These genes may have significance in pathways, both upstream and downstream of C4S-2.

### Example 29

### C4S-2 mRNA Expression in Laser Capture Microdissected Tissues

[0482] Quantitative PCR of a number of normal tissues and tumor cell lines, particularly colorectal and prostate carcinoma cell lines was used to analyze expression of C4S2. Quantitative real-time PCR was performed by first isolating RNA from cells using a Roche RNA Isolation kit according to manufacturer's directions. One microgram of RNA was used to synthesize a first-strand cDNA using MMLV reverse transcriptase (Ambion) using the manufacturers buffer and recommended concentrations of oligo dT, nucleotides, and Rnasin.

[0483] First, primers were designed. The primers were blasted against known genes and sequences to confirm the specificity of the primers to the target. The sequences of the primers are, for set 1: Forward: ATCTCCGCCTTCCGCAGCAA and reverse: TCGTTGAAGGGCGCCAGCTT, and set 2: Forward: CCATCTACTGCTACGTG and reverse: ACTTCTTGAGCTTGACC. These primers were used in a test qPCR using the primers against normal RTd tissue, as well as a mock RT to pick up levels of possible genomic contamination.

[0484] Quantitative PCR of a panel of normal tissue, total cancer tissue, LCM tissue, and cancer cell lines were used to determine the expression levels of C4S2. qPCR was performed by first isolating the RNA from the above mentioned tissue/cells using a Qiagen RNeasy mini prep kit. In the case of the LCM tissue, RNA was amplified via PCR to increase concentration after initial RNA isolation. 0.5 micrograms of RNA was used to generate a first strand cDNA using Stratagene MuLV Reverse Transcriptase, using recommended concentrations of buffer, enzyme, and Rnasin. Concentrations and volumes of dNTP, and oligo dT, or random hexamers were lower than recommended to reduce the level of background primer dimerization in the qPCR.

[0485] The cDNA is then used for qPCR to determine the levels of expression of C4S2 using the GeneAmp 7000 by ABI as recommended by the manufacturer. Primers for housekeeping were also run in order to normalized the values, and eliminate possible variations in cDNA template concentrations, pipetting error, etc. Three housekeepers were run depending on the type of tissue, beta-actin for cell lines, GusB for LCM tissue, HPRT for whole tissue.

[0486] A subset of patient RNA used to probe the microarray chip was analyzed by semi-quantitative RT-PCR to confirm the microarray results. Pools of 7 or 8 patient RNA samples were analyzed using primers that specifically recognize C4S-2. The data is expressed as mRNA expression level relative to a housekeeping gene (GUSB). Consistent with the microarray data, the data, displayed in FIG. 23, show an up-regulation of C4S-2 mRNA in prostate and colon cancer and a down-regulation in breast cancer. Furthermore, the data reveal that peri-tumoral normal cells in high grade prostate cancer display an elevated expression relative to peri-tumoral normal cells in low grade prostate cancer, suggesting a global up-regulation of C4S-2 mRNA with progression in grade. “(2×)” indicates RNA was amplified two times; “N” indicates peri-tumoral normal epithelial cells; “C” indicates cancerous epithelial cells; “LG” indicates low grade; “HG” indicates high grade.

### Example 30

### C4S-2 mRNA Expression in Tissue Samples

[0487] Using the RT-PCR methods described above, C4S-2 specific primers were used to assess the expression of C4S-2 mRNA obtained from normal tissues (from commercial sources), as well as RNA expression whole tumor tissue (pools of 7 or 8 patients). This tissue contains cell types other than epithelium. The data is expressed as mRNA expression level relative to a housekeeping gene (HPRT). The data, shown in FIG. 24, reveal that C4S-2 mRNA is ubiquitously expressed, throughout the body, with highest expression in normal adrenal, lung and breast tissue. The data further reveal significant expression in colon and prostate cancer (marked with a “C”) and down-regulation in breast cancer, relative to normal breast tissue.

### Example 31

### C4S-2 mRNA Expression in Prostate Cell Lines

[0488] Using the RT-PCR methods described above, C4S-2 specific primers were used to assess the expression of C4S-2 mRNA obtained from various prostate cell lines. The data is expressed as mRNA expression level relative to a housekeeping gene (actin). The data, displayed in FIG. 25, show that C4S-2 mRNA is expressed at higher levels in cell lines derived from prostate cancer tumors than in cell lines derived from normal prostate epithelium.

### Example 32

### Antisense Regulation of C4S-2 Expression

[0489] Additional functional information on C4S-2 was generated using antisense knockout technology. A number of different oligonucleotides complementary to C4S-2 mRNA were designed (FIG. 26) as potential antisense oligonucleotides, and tested for their ability to suppress expression of C4S-2. For each transfection mixture, a carrier molecule, preferably a lipitoid or cholesteroid, was prepared to a working concentration of 0.5 mM in water, sonicated to yield a uniform solution, and filtered through a 0.45 μm PVDF membrane. The antisense or control oligonucleotide was then prepared to a working concentration of 100 μM in sterile Millipore water. The oligonucleotide was further diluted in OptiMEM™ (Gibco/BRL), in a microfuge tube, to 2 μM, or approximately 20 μg oligo/ml of OptiMEM™. In a separate microfuge tube, lipitoid or cholesteroid, typically in the amount of about 1.5-2 nmol lipitoid/gg antisense oligonucleotide, was diluted into the same volume of OptiMEM™ used to dilute the oligonucleotide. The diluted antisense oligonucleotide was immediately added to the diluted lipitoid and mixed by pipetting up and down. Oligonucleotide was added to the cells to a final concentration of 30 nM.

[0490] The level of target mRNA (C4S-2) in the transfected cells was quantitated in the cancer cell lines using the methods described above. Values for the target mRNA were normalized versus an internal control (e.g., beta-actin). For each 20 μl reaction, extracted RNA (generally 0.2-1 μg total) was placed into a sterile 0.5 or 1.5 ml microcentrifuge tube, and water was added to a total volume of 12.5 μl. To each tube was added 7.5 μl of a buffer/enzyme mixture, prepared by mixing (in the order listed) 2.5 μl H₂O, 2.0 μl 10× reaction buffer, 10 μl oligo dT (20 pmol), 1.0 μl dNTP mix (10 mM each), 0.5 μl RNAsin® (20u) (Ambion, Inc., Hialeah, Fla.), and 0.5 μl MMLV reverse transcriptase (50 u) (Ambion, Inc.). The contents were mixed by pipetting up and down, and the reaction mixture was incubated at 42° C. for 1 hour. The contents of each tube were centrifuged prior to amplification.

[0491] An amplification mixture was prepared by mixing in the following order: 1×PCR buffer II, 3 mM MgCl₂, 140 μM each dNTP, 0.175 pmol each oligo, 1:50,000 dil of SYBR® Green, 0.25 mg/ml BSA, 1 unit Taq polymerase, and H₂O to 20 μl. (PCR buffer II is available in 10× concentration from Perkin-Elmer, Norwalk, Conn.). In 1× concentration it contains 10 mM Tris pH 8.3 and 50 mM KCl. SYBR® Green (Molecular Probes, Eugene, Oreg.) is a dye which fluoresces when bound to double stranded DNA. As double stranded PCR product is produced during amplification, the fluorescence from SYBR® Green increases. To each 20 μl aliquot of amplification mixture, 2 μl of template RT was added, and amplification was carried out according to standard protocols.

[0492] FIG. 26 shows examples of anti-sense oligonucleotide sequences that inhibit C4S-2 mRNA expression when transfected into cells. Functional data described in the following examples was obtained using C210-3,4 & 6. C4S-2 mRNA reduction ranged from about 60 to about 90%, as compared to cells transfected with reverse (i.e. sense) control oligonucleotides.

[0493] In separate experiments, inhibitory RNA molecules are used to inhibit C4S-2 mRNA expression in cells. FIG. 27 lists inhibitory RNA oligonucleotides that may be used in these experiments.

### Example 33

### Effects of C4S-2 Antisense Molecules on Cellular Proliferation

[0494] PC3 cells were plated at 5000 cells/well in 96-well plate and grown overnight. Reverse control or antisense oligonucleotide was diluted to 2 μM in OptiMEM™ and mixed with 30 μM Lipitoid1, a delivery vehicle, also diluted in OptiMEM™. This mixture of oligonucleotide and lipitoid in OptiMEM™ was then mixed with serum containing medium and then overlayed onto the cells overnight. The next day the transfection mix was removed and replaced with fresh media. Final concentration of oligonucleotide for these experiments was 300 nM and the ratio of oligonucleotide to Lipitoid 1 was 1.5 nmol lipoid per μg oligonucleotide. Cell proliferation was quantified using CyQUANT® Cell Proliferation Assay Kit (Molecular Probes #C-7026).

[0495] MDAPca2b cells were plated to 50% confluency and similarly transfected with 300 nM reverse control or antisense oligonucleotide with 30 μM Lipitoid1 overnight. After transfection, the cells were detached with trypsin, washed twice with medium, counted and plated at 5000 cells/well in 96-well plates. Cell proliferation was quantified using CellTiter-Glo™ Luminescent Cell Viability Assay (Promega #G7573).

[0496] Using these methods, anti-sense oligonucleotides described in FIG. 26 were transfected into PC3 cells. This usually resulted in a 60-90% knockdown of C4S-2 mRNA compared to controls. As controls, cells were left either untreated or were transfected with reverse control oligonucleotides. The cells were assessed for their ability to grow on tissue culture plastic in a time course that spanned 7 days. The number of cells on any given day was assessed using either the CyQuant assay or the luciferase assay. As shown in the two repeats of the same experiment described in FIG. 28, the ability of PC3 cells to grow in vitro is inhibited by anti-sense oligonucleotides that inhibit C4S-2 expression.

[0497] Anti-sense oligonucleotides described in FIG. 26 were transfected into MDA Pca 2b cells. This resulted in a 60-90% knockdown of C4S-2 mRNA. As controls, cells were left either untreated or were transfected with reverse control oligonucleotides. The cells were assessed for their ability to grow on tissue culture plastic in a time course that spanned 7 days. The number of cells on any given day was assessed using either the CyQuant assay or the luciferase assay (depending on the experiment). As shown in FIG. 29, the ability of MDA Pca 2b cells to grow in vitro is inhibited by anti-sense oligonucleotides that inhibit C4S-2 expression (“RC” is a control oligonucleotide; measurements 1, 2 and 3 were taken on three days).

### Example 34

### Effects of C4S-2 Antisense Molecules on Colony Formations

[0498] The effect of C4S-2 expression upon colony formation was tested in a soft agar assay. Soft agar assays were conducted by first establishing a bottom layer of 2 ml of 0.6% agar in media plated fresh within a few hours of layering on the cells. The cell layer was formed on the bottom layer by removing cells transfected as described above from plates using 0.05% trypsin and washing twice in media. The cells were counted in a Coulter counter, and resuspended to 10⁶ per ml in media. 10 μl aliquots are placed with media in 96-well plates (to check counting with WST1), or diluted further for soft agar assay. 2000 cells are plated in 800 μl 0.4% agar in duplicate wells above 0.6% agar bottom layer. After the cell layer agar solidifies, 2 ml of media is dribbled on top and antisense or reverse control oligo is added-without delivery vehicles. Fresh media and oligos are added every 3-4 days. Colonies are formed in 10 days to 3 weeks. Fields of colonies were counted by eye.

[0499] PC3 cells were transfected as described above. Transfected cells were then assessed for their ability to grow in soft-agar to determine the effect of inhibiting C4S-2 on anchorage-independent growth. PC3 cells were plated at either 400, 600 or 1000 (“1 k”)cells per well. Multiple transfection conditions were used (L1 or L1/C1). As shown in FIG. 30, PC3 cells transfected with C4S-2 anti-sense oligos consistently yielded fewer colonies than those transfected with reverse control oligos. “UT” denotes untransfected cells; “RC” denotes transfected with reverse control oligos; “AS” denotes transfected with anti-sense oligos;

[0500] MDA Pca 2b cells were transfected as described above and also assessed for their ability to grow in soft-agar to determine the effect of inhibiting C4S-2 on anchorage-independent growth. MDA Pca 2b cells were plated at either 400, 600 or 1000 cells per well. As shown in FIG. 31, MDA Pca 2b cells transfected with C4S-2 anti-sense oligos consistently yielded fewer colonies than those transfected with reverse control oligos.

### Example 34

### Effects of C4S-2 Antisense Molecules on Spheroids

[0501] Spheroids were assayed as follows: briefly, 96-well plates were coated with poly(2-hydroxyethyl methacrylate or poly-HEMA at 12 ug/ml in 95% ethanol. Poly-HEMA was slowly evaporated at room temperature until plates were dry. Prior to adding cells plates were rinsed twice with 1× PBS. Approximately 10 000 cells/well were then added and transfected with either anti-sense or reverse control oligonucleotide, directly in suspension with similar conditions as described elsewhere. The cells were allowed to grow in suspension for 5 days. The effects of inhibiting C4S-2 mRNA expression were assessed both visually and using the LDH assay to assess degree of cytotoxicity.

[0502] Lactate dehydrogenase (LDH) activity is measured, using the Cytotoxicity Detection Kit (Roche Catalog number: 1 644 793) by collecting culture supernatant and adding 100 ul ALPHA MEM medium w/o FBS in V-bottom 96 well plate, transferring all the culture supernatant (100 ul) to the V-bottom plate, mixing, spinning the plate at 2000 rpm for 10 mins, and removing 100 μl for an LDH assay. Alternatively, culture supernatant was removed, and 200 ul ALPHA MEM medium w/o FBS and containing 2% Triton-X 100 was added to the plate, incubated for 1 minute to all for lysis, spun at 2000 rpm for 10 min and 100 μl removed for LDH detection.

[0503] LDH was measured using a 1:45 mixture of catalyst, diaphoreses/NAD⁺ mixture, lyophilizate resuspended H₂O and dye solution containing sodium lactate, respectively. 100 ul of this mix is added to each well, and the sample incubated at room temperature for 20 mins. Plates can be reat in a microtiter plate reader with 490 nm filter.

[0504] rLDH/tLDH ratio is calculated as follows: the total amount of LDH (tLDH) is calculated by adding released LDH (rLDH, from culture supernatant) to the intracellular LDH (iLDH, from cell lysate): tLDH=rLDH+iLDH. In order to compare the amount of cytotoxicity between AS and RC treated samples, the ratio between rLDH and tLDH is used.

[0505] MDA Pca 2b were plated under non-adherent conditions and transfected in suspension with either anti-sense or reverse control oligonucleotides. The cells were allowed to grow in suspension for 5 days. The effects of inhibiting C4S-2 mRNA expression were assessed both visually (FIG. 32A-C) and using the LDH assay to assess degree of cytotoxicity (FIG. 32D). Inhibiting C4S-2 mRNA expression inhibited the ability of MDA Pca 2b to grow in suspension and furthermore, induced cytotoxicity.

### Example 35

### Effects of C4S-2 Antisense Molecules on Cytoxicity

[0506] Cells were transfected, and the activity of LDH was measured using the Cytotoxicity Detection Kit from Roche Molecular Biochemicals, as described above. The data is provided as a ratio of LDH released in the medium vs. the total LDH present in the well at the same time point and treatment (rLDH/tLDH). MRC9 cells were transfected with multiple pairs of C4S-2 anti-sense and reverse control oligonucleotides and allowed to grow for 3 days. The C4S-2 anti-sense oligonucleotides did not induce cytoxicity (above reverse control) in this “normal” (i.e. non-cancerous) fibroblast cell line (FIG. 33A). Controls antisense molecules, such as those for Bcl2, induced cytotoxicity. mRNA levels were also measured (FIG. 33B), showing that C4S-2 mRNA expression is lower in these cells than in other cells, and that no morphological differences in the antisensed cells as compared to control cells were observed (FIG. 33C).

[0507] 184B5 cells were also transfected with multiple pairs of C4S-2 anti-sense and reverse control oligonucleotides and allowed to grow for 3 days. The C4S-2 anti-sense oligonucleotides did not induce cytoxicity (above reverse control) in this “normal” (i.e. non-cancerous) breast epithelial cell line (FIG. 34).

### Example 36

### Effects of C4S-2 Antisense Molecules on Poliferation of Normal Cells

[0508] MRC9 and 184B5 cells were transfected with multiple pairs of C4S-2 anti-sense and reverse control oligonucleotides and allowed to grow for 4 days. The C4S-2 anti-sense oligonucleotides did not inhibit proliferation (above reverse control) in these non-cancerous cell lines (FIG. 35).

### Example 37

### Screening Assays

[0509] Screening assays are performed according to Burkart & Wong Anal Biochem 274:131-137 (1999), with modifications.

[0510] Using primers flanking the open reading frame, C4S-2 is cloned into a shuttle vector, from which it can be shuttled into multiple expression vectors. Protein expression is assessed using a polyclonal antibody. Activity is assessed using standard assays, i.e. those designed to assay sulfate transfer to chondroitin, chondroitin sulfate or dermatan sulfate. βAST-IV is also cloned and expressed as described in the above report Burkart et al, supra.

[0511] C4S-2-modulatory agents are counter-screened to ensure specificity. Included in the counterscreen are C4S-1, C4S-3 and HNK1ST (closest relatives to C4S-2 with approximately 30-42% homology). Additionally, representatives from other classes of sulfotransferases (heparin sulfotransferase, estrogen sulfotransferase, phenol sulfotransferase, tyrosine sulfotransferase) with low homology are also screened. Additionally, representatives from classes of kinases will be used in the counter-screen.

[0512] C4S-2 will transfer a sulfonyl group from PAPS to chondroitin sulfate, thus generating PAP. βAST-IV will regenerate PAPS, using p-nitrophenyl sulfate as the sulfate donor. One of the resulting products from the latter reaction—p-nitrophenol can be monitored colorimetrically.

[0513] Inhibitors are assessed for their ability to inhibit C4S-2, as determined by an inhibition of p-nitrophenol generation. Control screens include regeneration of PAPS from PAP by βAST-IV, in the absence of C4S-2, to ensure that inhibitors of βAST-IV are not selected. Compounds that inhibit C4S-2 activity are counterscreened against relevant enzymes listed above.

[0514] Inhibitors passing the above screens are tested in cell-based functional assays (Proliferation, LDH, spheroid and soft-agar assays). The tested cell lines include PC3, MDA Pca 2b, DU145, Colo320, KM12C, A431, MDA435, MDA469, etc. Additionally, cell lines stably transfected to over-express C4S-2 are assessed compared to parental and control transfected lines.

[0515] Inhibitors that show efficacy in the cell line functional assays are tested in xenograft mouse models. A subset of the lines, including PC3, DU145 and MDA435, etc. is in these animal models.

### Example 38

### Source of Biological Materials

[0516] The cells used for detecting differential expression of breast cancer related genes were those previously described for the HMT-3522 tumor reversion model, disclosed in U.S. Pat. Nos. 5,846,536 and 6,123,941, herein incorporated by reference. The model utilizes both non-tumorigenic (HMT-3522 S1) and tumorigenic (HMT-3522 T4-2) cells derived by serial passaging from a single reduction mammoplasty. In two dimensional (2D) monolayers on plastic, both S1 and T4-2 cells display similar morphology. But in three dimensional (3D) matrigel cultures, S1 form phenotypically normal mammary tissue structures while T4-2 cells fail to organize into these structures and instead disseminate into the matrix. This assay was designated as a tumor reversion model, in that the T4-2 cells can be induced to form S1-like structures in 3D by treatment with beta-1 integrin or EGFR blocking antibodies, or by treating with a chemical inhibitor of the EGFR signaling pathway (tyrophostin AG 1478). These treated T4-2 cells, called T4R cells, are non-tumorigenic.

### Example 39

### Cell Growth and RNA Isolation

[0517] Growth of Cells 2D and 3D for Microarray Experiments: HMT3522 S1 and T4-2 cells were grown 2D and 3D and T4-2 cells reverted with anti-EGFR, anti-beta 1 integrin, or tyrophostin AG 1478 as previously described (Weaver et al J Cell Biol. 137:231-45, 1997; and Wang et al PNAS 95:14821-14826, 1998). Anti-EGFR (mAb 225) was purchased from Oncogene and introduced into the matrigel at the time of gelation at a concentration of 4 ug/ml purified mouse IgG1. Anti-beta 1 integrin (mAb AIIB2) was a gift from C. Damsky at the University of California at San Francisco and was also introduced into the matrigel at the time of gelation at a concentration of 100 ug/ml ascites protein (which corresponds to 4-10 ug/ml purified rat IgG1). Tyrophostin AG 1478 was purchased from Calbiochem and used at a concentration of 100 nM.

[0518] Isolation of RNA for Microarray Experiments: RNA was prepared from: S1 passage 60 2D cultures; T4-2 passage 41 2D cultures; S1 passage 59 3D cultures; and T4-2 and T4-2 revertant (with anti-EGFR, anti-beta 1 integrin, and tyrophostin) passage 35 3D cultures.

[0519] All RNA for microarray experiments was isolated using the commercially available RNeasy Mini Kit from Qiagen. Isolation of total RNA from cells grown 2D was performed as instructed in the kit handbook. Briefly, media was aspirated from the cells and kit Buffer RLT was added directly to the flask. The cell lysate was collected with a rubber cell scraper, and the lysate passed 5 times through a 20-G needle fitted to a syringe. One volume of 70% ethanol was added to the homogenized lysate and mixed well by pipetting. Up to 700 ul of sample was applied to an RNeasy mini spin column sitting in a 2-ml collection tube and centrifuged for 15 seconds at >8000×g. 700 ul Buffer RW1 was added to the column and centrifuged for 15 seconds at >8000×g to wash. The column was transferred to a new collection tube. 500 ul Buffer RPE was added to the column and centrifuged for 15 seconds at >8000×g to wash. Another 500 ul Buffer RPE was added to the column for additional washing, and the column centrifuged for 2 minutes at maximum speed to dry. The column was transferred to a new collection tube and RNA eluted from the column with 30 ul RNase-free water by centrifuging for 1 minute at >8000×g.

[0520] Isolation of total RNA from cells grown 3D was performed as described above, except cells were isolated from matrigel prior to RNA isolation. The cells were isolated as colonies from matrigel using ice-cold PBS/EDTA (0.01 M sodium phosphate pH 7.2 containing 138 mM sodium chloride and 5 mM EDTA). See Weaver et al, J Cell Biol 137:231-245, 1997; and Wang et al. PNAS 95:14821-14826, 1998.

### Example 40

### Detection and Identification of Genes Exhibiting Differential Expression

[0521] The relative expression levels of a selected sequence (which in turn is representative of a single transcript) were examined in the tumorigenic versus non-tumorigenic cell lines described above, following culturing of the cells (S1, T4-2 and T4R) in either two-dimensional (2D) monolayers or three-dimensional (3D) matrigel cultures as described above. Differential expression for a selected sequence was assessed by hybridizing mRNA from S1 and T4-2 2D cultures, and S1, T4-2 and T4R 3D cultures to microarray chips as described below, as follows: Exp1=T4-2 2D/S1 2D; Exp2=T4-2 3D/S1 3D; Exp3=S1 3D/S1 2D; Exp4=T4-2 3D/T4-2 2D; Exp5=T4-2 3D/T4R (anti-EGFR) 3D; Exp6=T4-2 3D/T4R (anti-betal integrin) 3D; and Exp7=T4-2 3D/T4R (tyrophostin AG 1478) 3D.

[0522] Each array used had an identical spatial layout and control spot set. Each microarray was divided into two areas, each area having an array with, on each half, twelve groupings of 32×12 spots for a total of about 9,216 spots on each array. The two areas are spotted identically which provide for at least two duplicates of each clone per array. Spotting was accomplished using PCR amplified products from 0.5 kb to 2.0 kb and spotted using a Molecular Dynamics Gen III spotter according to the manufacturer's recommendations. The first row of each of the 24 regions on the array had about 32 control spots, including 4 negative control spots and 8 test polynucleotides.

[0523] The test polynucleotides were spiked into each sample before the labeling reaction with a range of concentrations from 2-600 pg/slide and ratios of 1:1. For each array design, two slides were hybridized with the test samples reverse-labeled in the labeling reaction. This provided for about 4 duplicate measurements for each clone, two of one color and two of the other, for each sample.

[0524] Identification Of Differentially Expressed Genes: “Differentially expressed” in the context of the present example meant that there was a difference in expression of a particular gene between tumorigenic vs. non-tumorigenic cells, or cells grown in three-dimensional culture vs. cells grown in two-dimensional culture. To identify differentially expressed genes, total RNA was first reverse transcribed into cDNA using a primer containing a T7 RNA polymerase promoter, followed by second strand DNA synthesis. cDNA was then transcribed in vitro to produce antisense RNA using the T7 promoter-mediated expression (see, e.g., Luo et al. (1999) Nature Med 5:117-122), and the antisense RNA was then converted into cDNA. The second set of cDNAs were again transcribed in vitro, using the T7 promoter, to provide antisense RNA. Optionally, the RNA was again converted into cDNA, allowing for up to a third round of T7-mediated amplification to produce more antisense RNA. Thus the procedure provided for two or three rounds of in vitro transcription to produce the final RNA used for fluorescent labeling.

[0525] Fluorescent probes were generated by first adding control RNA to the antisense RNA mix, and producing fluorescently labeled cDNA from the RNA starting material. Fluorescently labeled cDNAs prepared from tumorigenic RNA sample were compared to fluorescently labeled cDNAs prepared from non-tumorigenic cell RNA sample. For example, the cDNA probes from the non-tumorigenic cells were labeled with Cy3 fluorescent dye (green) and the cDNA probes prepared from the tumorigenic cells were labeled with Cy5 fluorescent dye (red).

[0526] The differential expression assay was performed by mixing equal amounts of probes from tumorigenic cells and non-tumorigenic cells, and/or cells grown in 3D vs. those grown in 2D. The arrays were prehybridized by incubation for about 2 hrs at 60° C. in 5×SSC/0.2% SDS/1 mM EDTA, and then washed three times in water and twice in isopropanol. Following prehybridization of the array, the probe mixture was then hybridized to the array under conditions of high stringency (overnight at 42° C. in 50% formamide, 5×SSC, and 0.2% SDS). After hybridization, the array was washed at 55° C. three times as follows: 1) first wash in 1×SSC/0.2% SDS; 2) second wash in 0.1×SSC/0.2% SDS; and 3) third wash in 0.1×SSC.

[0527] The arrays were then scanned for green and red fluorescence using a Molecular Dynamics Generation III dual color laser-scanner/detector. The images were processed using BioDiscovery Autogene software, and the data from each scan set normalized to provide for a ratio of expression relative to non-tumorigenic or tumorigenic cells grown two-dimensionally or three-dimensionally. Data from the microarray experiments was analyzed according to the algorithms described in U.S. application Ser. No. 60/252,358, filed Nov. 20, 2000, by E. J. Moler, M. A. Boyle, and F. M. Randazzo, and entitled “Precision and accuracy in cDNA microarray data,” which application is specifically incorporated herein by reference.

[0528] The experiment was repeated, this time labeling the two probes with the opposite color in order to perform the assay in both “color directions.” Each experiment was sometimes repeated with two more slides (one in each color direction). The level fluorescence for each sequence on the array expressed as a ratio of the geometric mean of 8 replicate spots/genes from the four arrays or 4 replicate spots/gene from 2 arrays or some other permutation. The data were normalized using the spiked positive controls present in each duplicated area, and the precision of this normalization was included in the final determination of the significance of each differential. The fluorescence intensity of each spot was also compared to the negative controls in each duplicated area to determine which spots have detected significant expression levels in each sample.

[0529] A statistical analysis of the fluorescent intensities was applied to each set of duplicate spots to assess the precision and significance of each differential measurement, resulting in a p-value testing the null hypothesis that there is no differential in the expression level between the tumorigenic and non-tumorigenic cells or cells grown two-dimensionally versus three-dimensionally. During initial analysis of the microarrays, the hypothesis was accepted if p>10⁻³, and the differential ratio was set to 1.000 for those spots. All other spots have a significant difference in expression between the two samples compared. For example, if the tumorigenic sample has detectable expression and the non-tumorigenic does not, the ratio is truncated at 1000 since the value for expression in the non-tumorigenic sample would be zero, and the ratio would not be a mathematically useful value (e.g., infinity). If the non-tumorigenic sample has detectable expression and the tumorigenic does not, the ratio is truncated to 0.001, since the value for expression in the tumor sample would be zero and the ratio would not be a mathematically useful value. These latter two situations are referred to herein as “on/off.” Database tables were populated using a 95% confidence level (p>0.05).

[0530] In general, a polynucleotide is said to represent a significantly differentially expressed gene between two samples when there is detectable levels of expression in at least one sample and the ratio value is greater than at least about 1.2 fold, at least about 1.5 fold, or at least about 2 fold, where the ratio value is calculated using the method described above.

[0531] A differential expression ratio of 1 indicates that the expression level of the gene in tumorigenic cells was not statistically different from expression of that gene in the specific non-tumorigenic cells compared. A differential expression ratio significantly greater than 1 in tumorigenic breast cells relative to non-tumorigenic breast cells indicates that the gene is increased in expression in tumorigenic cells relative to non-tumorigenic cells, suggesting that the gene plays a role in the development of the tumorigenic phenotype, and may be involved in promoting metastasis of the cell. Detection of gene products from such genes can provide an indicator that the cell is cancerous, and may provide a therapeutic and/or diagnostic target. Likewise, a differential expression ratio significantly less than 1 in tumorigenic breast cells relative to non-tumorigenic breast cells indicates that, for example, the gene is involved in suppression of the tumorigenic phenotype. Increasing activity of the gene product encoded by such a gene, or replacing such activity, can provide the basis for chemotherapy. Such gene can also serve as markers of cancerous cells, e.g., the absence or decreased presence of the gene product in a breast cell relative to a non-tumorigenic breast cell indicates that the cell is cancerous.

[0532] Using the above methodology, three hundred and sixty-seven (367) genes or products thereof were identified from 20,000 chip clones analyzed as being overexpressed 2-fold or more in one or more of these experiments, with a p-value of 0.001 or less. These identified genes or products thereof are listed in Table 17, according to the Spot ID of the spotted polynucleotide, the Sample ID, the corresponding GenBank Accession Number (No.), the GenBank description (if available) for the corresponding Genbank Accession Number, and the GenBank score (p-value; the probability that the association between the SEQ ID NO. and the gene or product thereof occurred by chance). The polynucleotide and polypeptide sequences, as provided by any disclosed Genbank entries are herein incorporated by reference to the corresponding Genbank accession number. The differential hybridization results from the seven differential expression microarray experiments listed above are provided in Table 18, where sequences have a measurement corresponding to its ratio of expression in the 7 experiments, e.g. spot ID 10594 is 2.2-fold overexpressed in 3D T4-2 cells as compared to 3D S1 cells. SEQ ID NOS:1-3004, representing the sequences corresponding to the spot Ids listed in Tables 17 and 18 are provided in the sequence listing. Table 27 is a lookup table showing the relationship between the spot Ids (i.e. the nucleic acids spotted on the microarray) and the sequences provided in the sequence listing.

TABLE 17

| | | GENBANK | | GENBANK |
|---|---|---|---|---|
| SPOTID | SAMPLE ID | NO | GENBANK DESCRIPTION | SCORE |
| 10594 | I:1871362:05B01:A04 | M62994 | Homo sapiens thyroid autoantigen | 8.6E−36 |
| | | | (truncated actin-binding protein) | |
| | | | mRNA, complete cds | |
| 21851 | M00055153A:A12 | | | |
| 20990 | I:1986550:13B02:G12 | XM_005667 | Homo sapiens lipocalin 2 | 0 |
| | | | (oncogene 24p3) (LCN2), mRNA | |
| 18641 | I:3473302:09A01:A09 | AB046098 | Macaca fascicularis brain cDNA, | 5.8E−57 |
| | | | clone: QccE-15843 | |
| 17229 | I:1506962:09A01:G01 | AL365454 | Homo sapiens mRNA full length | 2.6E−110 |
| | | | insert cDNA clone EUROIMAGE | |
| | | | 926491 | |
| 25930 | 035JN020.F01 | AJ010446 | Homo sapiens mRNA for | 0 |
| | | | immunoglobulin kappa light | |
| | | | chain, anti-RhD, therad 24 | |
| 20701 | RG:730349:10010:G12 | U28387 | Human hexokinase II pseudogene, | 0 |
| | | | complete cds | |
| 20346 | RG:1839794:10015:E11 | U28387 | Human hexokinase II pseudogene, | 0 |
| | | | complete cds | |
| 21247 | M00054680C:A06 | U28387 | Human hexokinase II pseudogene, | 9.9E−80 |
| | | | complete cds | |
| 23062 | M00056353C:E10 | XM_011013 | Homo sapiens filamin B, beta | 0 |
| | | | (actin-binding protein-278) (FLNB), | |
| | | | mRNA | |
| 25666 | 035Jn031.B01 | AF191633 | Homo sapiens filamin (FLNB) | 0 |
| | | | gene, exon 48 and complete cds | |
| 19001 | I:2171401:09A02:E09 | AF123887 | Homo sapiens ERO1L (ERO1L) | 3.3E−104 |
| | | | mRNA, partial cds | |
| 10897 | I:1852047:02A01:A10 | U22384 | Human lysyl oxidase gene, partial | 0 |
| | | | cds | |
| 1960 | M00023297B:A10 | M33376 | Human pseudo-chlordecone | 0 |
| | | | reductase mRNA, complete cds | |
| 26381 | 035JN029.H02 | AB037838 | Homo sapiens mRNA for | 0 |
| | | | KIAA1417 protein, partial cds | |
| 26719 | 035JN030.A02 | X68277 | H. sapiens CL 100 mRNA for | 0 |
| | | | protein tyrosine phosphatase | |
| 27152 | 037XN007.A09 | XM_048479 | Homo sapiens hypothetical protein | 7.3E−58 |
| | | | FLJ14642 (FLJ14642), mRNA | |
| 10926 | I:2047770:08B02:G04 | AK000969 | Homo sapiens cDNA FLJ10107 fis, | 3.8E−94 |
| | | | clone HEMBA1002583 | |
| 28980 | 035JN003.C12 | XM_027456 | Homo sapiens hypothetical gene | 0 |
| | | | supported by AK000584 | |
| | | | (LOC89942), mRNA | |
| 1236 | M00022024A:F02 | | | |
| 29350 | 035JN008.D06 | XM_043864 | Homo sapiens phosphoinositide-3- | 0 |
| | | | kinase, regulatory subunit, | |
| | | | polypeptide 1 (p85 alpha) | |
| | | | (PIK3R1), mRNA | |
| 26242 | 035JN015.B02 | AL137717 | Homo sapiens mRNA; cDNA | 2.6E−70 |
| | | | DKFZp434J1630 (from clone | |
| | | | DKFZp434J1630) | |
| 4098 | M00001439D:C09 | BC002446 | Homo sapiens, MRJ gene for a | 0 |
| | | | member of the DNAJ protein | |
| | | | family, clone MGC: 1152 | |
| | | | IMAGE: 3346070, mRNA, complete | |
| | | | cds | |
| 17432 | I:1965049:16B02:D07 | XM_051165 | Homo sapiens DKFZP586A0522 | 0 |
| | | | protein (DKFZP586A0522), mRNA | |
| 1785 | SL198 | XM_051165 | Homo sapiens DKFZP586A0522 | 0 |
| | | | protein (DKFZP586A0522), mRNA | |
| 28856 | 035JN032.E11 | X62996 | H. sapiens mitochondrial genome | 0 |
| | | | (consensus sequence) | |
| 18791 | RG:229957:10007:D03 | D42042 | Human mRNA for KIAA0085 gene, | 0 |
| | | | partial cds | |
| 22950 | M00056922C:C09 | | | |
| 1882 | M00022196B:D09 | Z29083 | H. sapiens 5T4 gene for 5T4 | 0 |
| | | | Oncofetal antigen | |
| 23886 | M00055408A:F10 | | | |
| 24995 | M00055215C:E11 | XM_012880 | Homo sapiens hypothetical protein | 0 |
| | | | MGC1936 (MGC1936), mRNA | |
| 24477 | M00055510B:F08 | AF240697 | Homo sapiens retinol | 0 |
| | | | dehydrogenase homolog isoform-2 | |
| | | | (RDH) mRNA, complete cds | |
| 21681 | M00056771C:A12 | X02152 | Human mRNA for lactate | 0 |
| | | | dehydrogenase-A (LDH-A, EC | |
| | | | 1.1.1.27) | |
| 9557 | I:1335140:05A02:C08 | X02152 | Human mRNA for lactate | 0 |
| | | | dehydrogenase-A (LDH-A, EC | |
| | | | 1.1.1.27) | |
| 22033 | M00056574B:A07 | | | |
| 873 | M00007979C:C05 | X00663 | Human mRNA fragment for | 0 |
| | | | epidermal growth factor (EGF) | |
| | | | receptor | |
| 17144 | RG:25254:10004:D07 | M97675 | Human transmembrane receptor | 0 |
| | | | (ror1) mRNA, complete cds | |
| 26970 | 035JN015.F09 | AF097514 | Homo sapiens stearoyl-CoA | 0 |
| | | | desaturase (SCD) mRNA, | |
| | | | complete cds | |
| 21402 | M00054507C:D07 | | | |
| 27074 | 035Jn031.B03 | AF061741 | Homo sapiens retinal short-chain | 0 |
| | | | dehydrogenase/reductase retSDR1 | |
| | | | mRNA, complete cds | |
| 10963 | I:1258790:05A02:B10 | AF072752 | Homo sapiens ten integrin EGF- | 0 |
| | | | like repeat domains protein | |
| | | | precursor (ITGBL1) mRNA, | |
| | | | complete cds | |
| 29525 | 035JN026.D12 | | | |
| 25514 | 035JN011.F01 | U62961 | Human succinyl CoA: 3-oxoacid | 0 |
| | | | CoA transferase precursor (OXCT) | |
| | | | mRNA, complete cds | |
| 26612 | 035JN016.C08 | NM_000240 | Homo sapiens monoamine oxidase | 0 |
| | | | A (MAOA), nuclear gene encoding | |
| | | | mitochondrial protein, mRNA | |
| 24600 | M00055490C:G11 | U57059 | Homo sapiens Apo-2 ligand | 0 |
| | | | mRNA, complete cds | |
| 9741 | I:3126828:12A02:G02 | U37518 | Human TNF-related apoptosis | 0 |
| | | | inducing ligand TRAIL mRNA, | |
| | | | complete cds | |
| 23689 | M00054752A:E11 | XM_001468 | Homo sapiens S100 calcium- | 0 |
| | | | binding protein A10 (annexin II | |
| | | | ligand, calpactin I, light polypeptide | |
| | | | (p11)) (S100A10), mRNA | |
| 22352 | M00042842B:E02 | XM_001468 | Homo sapiens S100 calcium- | 0 |
| | | | binding protein A10 (annexin II | |
| | | | ligand, calpactin I, light polypeptide | |
| | | | (p11)) (S100A10), mRNA | |
| 23806 | RG:2007319:20003:G10 | | | |
| 12285 | I:1404669:04A01:G12 | BC002517 | Homo sapiens, Pirin, clone | 0 |
| | | | MGC: 2083 IMAGE: 3140037, | |
| | | | mRNA, complete cds | |
| 27638 | 035JN011.D10 | AK002155 | Homo sapiens cDNA FLJ11293 fis, | 0 |
| | | | clone PLACE1009670, highly | |
| | | | similar to Homo sapiens | |
| | | | genethonin 1 mRNA | |
| 9663 | I:2488567:11A02:H08 | XM_006027 | Homo sapiens brain-derived | 0 |
| | | | neurotrophic factor (BDNF), mRNA | |
| 26850 | 035JN003.B03 | XM_031551 | Homo sapiens similar to | 0 |
| | | | carbohydrate (N- | |
| | | | acetylglucosamine-6-O) | |
| | | | sulfotransferase 2 (H. sapiens) | |
| | | | (LOC90414), mRNA | |
| 10204 | I:1491445:02B01:F09 | AF131765 | Homo sapiens clone 24833 | 0 |
| | | | nonsyndromic hearing impairment | |
| | | | protein mRNA sequence, complete | |
| | | | cds | |
| 1318 | 2192-6 | | | |
| 25922 | 035JN020.B01 | AB020673 | Homo sapiens mRNA for | 0 |
| | | | KIAA0866 protein, complete cds | |
| 26347 | 035JN025.G02 | | | |
| 20361 | I:395116:17A02:E05 | | | |
| 28672 | 035JN012.A05 | AF126181 | Homo sapiens breast cancer- | 0 |
| | | | associated gene 1 protein (BCG1) | |
| | | | mRNA, complete cds | |
| 25520 | 035JN011.A07 | D86956 | Human mRNA for KIAA0201 gene, | 0 |
| | | | complete cds | |
| 1723 | M00005694A:A09 | BC001980 | Homo sapiens, clone | 0 |
| | | | IMAGE: 3462291, mRNA | |
| 28863 | 037XN002.A05 | | | |
| 25526 | 035JN011.D07 | AF086281 | Homo sapiens full length insert | 0 |
| | | | cDNA clone ZD45G11 | |
| | | | cDNA clone ZD45G11 | |
| 27936 | 035JN008.A04 | X59445 | H. sapiens mRNA for colon | 0 |
| | | | carcinoma Manganese Superoxide | |
| | | | Dismutase | |
| 26851 | 035JN001.C03 | XM_033944 | Homo sapiens superoxide | 0 |
| | | | dismutase 2, mitochondrial | |
| | | | (SOD2), mRNA | |
| 25107 | M00054825A:E04 | AF075061 | Homo sapiens full length insert | 0 |
| | | | cDNA YP07G10 | |
| 24912 | M00054505D:D06 | AF075061 | Homo sapiens full length insert | 0 |
| | | | cDNA YP07G10 | |
| 25169 | M00055510D:D04 | M11167 | Human 28S ribosomal RNA gene | 1.2E−76 |
| 25600 | 035JN023.A01 | BC003107 | Homo sapiens, inhibitor of DNA | 0 |
| | | | binding 3, dominant negative helix- | |
| | | | loop-helix protein, clone MGC: 1988 | |
| | | | IMAGE: 3543936, mRNA, complete | |
| 28706 | 035JN016.B05 | X55181 | Human ETS2 gene, 3′end | 0 |
| 26377 | 035JN029.F02 | Y14436 | Homo sapiens mRNA for | 0 |
| | | | phosphatidic acid phosphatase | |
| | | | type 2 | |
| 19460 | I:438655:14B02:B04 | AF007133 | Homo sapiens clone 23764 mRNA | 4.5E−113 |
| | | | sequence | |
| 25243 | RG:1667183:10014: | BC000013 | Homo sapiens, insulin-like growth | 0 |
| | F12 | | factor binding protein 3, clone | |
| | | | MGC: 2305 IMAGE: 3506666, | |
| | | | mRNA, complete cds | |
| 20018 | I:1213574:17B01:A11 | AB037925 | Homo sapiens MAIL mRNA, | 3.7E−106 |
| | | | complete cds | |
| 918 | M00026895D:H03 | BC006433 | Homo sapiens, Ras-related GTP- | 0 |
| | | | binding protein, clone MGC: 13077 | |
| | | | IMAGE: 3835186, mRNA, complete | |
| | | | cds | |
| 25027 | RG:1983823:20002:B06 | | | |
| 29089 | 035JN017.B06 | XM_037534 | Homo sapiens phosphodiesterase | 0 |
| | | | 7A (PDE7A), mRNA | |
| 9141 | I:1347384:02A02:C07 | U78579 | Human type I phosphatidylinositol- | 0 |
| | | | 4-phosphate 5-kinase beta (STM7) | |
| | | | mRNA, partial cds | |
| 12005 | I:1259230:05A01:C06 | D87075 | Human mRNA for KIAA0238 gene, | 0 |
| | | | partial cds | |
| 12148 | I:3360476:03B01:B12 | XM_040922 | Homo sapiens interleukin 13 | 0 |
| | | | receptor, alpha 2 (IL13RA2), | |
| | | | mRNA | |
| 17394 | RG:1943755:10016:A07 | AF346607 | Homo sapiens interleukin-1 | 0 |
| | | | receptor associated kinase 1b | |
| | | | (IRAK) mRNA, complete cds, | |
| | | | alternatively spliced | |
| 27017 | 035JN021.F03 | XM_051742 | Homo sapiens spermine synthase | 0 |
| | | | (SMS), mRNA | |
| 25809 | 035JN002.B07 | XM_009699 | Homo sapiens nuclear receptor | 0 |
| | | | interacting protein 1 (NRIP1), | |
| | | | mRNA | |
| 8719 | I:2600080:10A01:H01 | XM_009665 | Homo sapiens Kreisler (mouse) | 0 |
| | | | maf-related leucine zipper homolog | |
| | | | (KRML), mRNA | |
| 21030 | RG:1714832:10015:C06 | XM_029957 | Homo sapiens Rab acceptor 1 | 0 |
| | | | (prenylated) (RABAC1), mRNA | |
| 11436 | I:1470085:03B01:F05 | XM_038976 | Homo sapiens N-ethylmaleimide- | 0 |
| | | | sensitive factor attachment protein, | |
| | | | alpha (NAPA), mRNA | |
| 10374 | I:1513989:03B02:C03 | XM_009010 | Homo sapiens complement | 1.4E−96 |
| | | | component 3 (C3), mRNA | |
| 19037 | I:417827:15A01:G10 | X79538 | H. sapiens nuk_34 mRNA for | 1.9E−28 |
| | | | translation initiation factor | |
| 398 | M00027016A:C05 | XM_031470 | Homo sapiens aldolase C, | 4E−62 |
| | | | fructose-bisphosphate (ALDOC), | |
| | | | mRNA | |
| 18773 | I:1211682:14A02:C09 | XM_008477 | Homo sapiens aldolase C, | 0 |
| | | | fructose-bisphosphate (ALDOC), | |
| | | | mRNA | |
| 3583 | M00023407B:C10 | | | |
| 3418 | M00001470A:C03 | XM_043951 | Homo sapiens CDP-diacylglycerol-- | 0 |
| | | | inositol 3-phosphatidyltransferase | |
| | | | (phosphatidylinositol syntase) | |
| | | | (CDIPT), mRNA | |
| 18985 | I:1402615:09A02:E03 | AF191148 | Homo sapiens type I | 7.9E−64 |
| | | | transmembrane protein Fn14 | |
| | | | mRNA, complete cds | |
| 25861 | 035JN010.D01 | XM_047975 | Homo sapiens hydroxyacyl | 0 |
| | | | glutathione hydrolase (HAGH), | |
| | | | mRNA | |
| 3317 | M00003974D:E04 | AF136185 | Homo sapiens collagen type XVII | 0 |
| | | | (COL17A1) gene; 3′ UTR, long | |
| | | | form | |
| 8743 | I:1858905:04A01:D01 | U36775 | Human ribonuclease 4 gene, | 2.1E−57 |
| | | | partial cds | |
| 26240 | 035JN015.A02 | XM_007493 | Homo sapiens ribonuclease, | 0 |
| | | | RNase A family, 4 (RNASE4), | |
| | | | mRNA | |
| 28562 | 037XN007.B11 | X00947 | Human alpha 1-antichymotrypsin | 0 |
| | | | gene fragment | |
| 16877 | I:2362945:15A01:C07 | XM_029378 | Homo sapiens checkpoint | 1.9E−91 |
| | | | suppressor 1 (CHES1), mRNA | |
| 25955 | 035JN022.C01 | AF035620 | Homo sapiens BRCA1-associated | 0 |
| | | | protein 2 (BRAP2) mRNA, | |
| | | | complete cds | |
| 26308 | 035JN023.C02 | XM_041470 | Homo sapiens zinc finger protein | 0 |
| | | | 145 (Kruppel-like, expressed in | |
| | | | promyelocytic leukemia) (ZNF145), | |
| | | | mRNA | |
| 4140 | 2239-4 | X03083 | Human lactate dehydrogenase-A | 0 |
| | | | gene exon 7 and 3′ flanking region | |
| 3436 | 2239-1 | X03083 | Human lactate dehydrogenase-A | 0 |
| | | | gene exon 7 and 3′ flanking region | |
| 25612 | 035JN023.G01 | M94856 | Human fatty acid binding protein | 0 |
| | | | homologue (PA-FABP) mRNA, | |
| | | | complete cds | |
| 12257 | I:1448135:04A01:A06 | X15535 | H. sapiens lysosomal acid | 0 |
| | | | phosphatase gene (EC 3.1.3.2) | |
| | | | Exon 11 | |
| 9111 | I:1958902:04A02:D07 | D87258 | Homo sapiens mRNA for serin | 0 |
| | | | protease with IGF-binding motif, | |
| | | | complete cds | |
| 17620 | I:875567:15B01:B08 | XM_045326 | Homo sapiens MAX-interacting | 0 |
| | | | protein 1 (MXI1), mRNA | |
| 26025 | 035JN030.F01 | XM_032511 | Homo sapiens procollagen-proline, | 0 |
| | | | 2-oxoglutarate 4-dioxygenase | |
| | | | (proline 4-hydroxylase), alpha | |
| | | | polypeptide I (P4HA1), mRNA | |
| 19271 | RG:686684:10010:D04 | AF005216 | Homo sapiens receptor-associated | 0 |
| | | | tyrosine kinase (JAK2) mRNA, | |
| | | | complete cds | |
| 4151 | 2035-1 | D87953 | Human mRNA for RTP, complete | 0 |
| | | | cds | |
| 26569 | 035JN010.F02 | AB004788 | Homo sapiens mRNA for BNIP3L, | 0 |
| | | | complete cds | |
| 10344 | I:2859338:11B02:D03 | XM_005052 | Homo sapiens angiopoietin 1 | 1.3E−97 |
| | | | (ANGPT1), mRNA | |
| 832 | M00021649B:D05 | XM_004628 | Homo sapiens hypoxia-inducible | 0 |
| | | | protein 2 (HIG2), mRNA | |
| 12071 | I:1798283:06A01:D06 | S72481 | pantophysin [human, keratinocyte | 0 |
| | | | line HaCaT, mRNA, 2106 nt] | |
| 12271 | I:1445767:04A01:H06 | X12701 | H. sapiens mRNA for endothelial | 1.8E−130 |
| | | | plasminogen activator inhibitor PAI | |
| 433 | I:1526282:03A01:E05 | XM_033627 | Homo sapiens glycoprotein | 3.7E−117 |
| | | | (transmembrane) nmb (GPNMB), | |
| | | | mRNA | |
| 20917 | RG:222350:10007:C12 | X00663 | Human mRNA fragment for | 1.7E−122 |
| | | | epidermal growth factor (EGF) | |
| | | | receptor | |
| 25810 | 035JN004.B07 | X00588 | Human mRNA for precursor of | 0 |
| | | | epidermal growth factor receptor | |
| 12039 | I:3506985:07A01:D06 | M24795 | Human CD36 antigen mRNA, | 0 |
| | | | complete cds | |
| 25499 | 035JN005.G07 | XM_028224 | Homo sapiens N- | 0 |
| | | | acetylglucosamine-phosphate | |
| | | | mutase (AGM1), mRNA | |
| 25557 | 035JN013.D07 | BC010135 | Homo sapiens, cyclin C, clone | 0 |
| | | | IMAGE: 4106819, mRNA | |
| 9917 | I:1283532:05A01:G09 | XM_004148 | Homo sapiens 5T4 oncofetal | 2.4E−70 |
| | | | trophoblast glycoprotein (5T4), | |
| | | | mRNA | |
| 19505 | RG:204653:10007:A10 | XM_003789 | Homo sapiens colony stimulating | 0 |
| | | | factor 1 receptor, formerly | |
| | | | McDonough feline sarcoma viral (v- | |
| | | | fms) oncogene homolog (CSF1R), | |
| | | | mRNA | |
| 17491 | RG:277866:10008:B07 | XM_003789 | Homo sapiens colony stimulating | 0 |
| | | | factor 1 receptor, formerly | |
| | | | McDonough feline sarcoma viral (v- | |
| | | | fms) oncogene homolog (CSF1R), | |
| | | | mRNA | |
| 10683 | I:1686726:06A01:F10 | XM_003789 | Homo sapiens colony stimulating | 0 |
| | | | factor 1 receptor, formerly | |
| | | | McDonough feline sarcoma viral (v- | |
| | | | fms) oncogene homolog (CSF1R), | |
| | | | mRNA | |
| 1936 | M00008020C:H09 | X68277 | H. sapiens CL 100 mRNA for | 0 |
| | | | protein tyrosine phosphatase | |
| 828 | M00021638B:F03 | X68277 | H. sapiens CL 100 mRNA for | 0 |
| | | | protein tyrosine phosphatase | |
| 9558 | I:1824443:05B02:C08 | XM_003708 | Homo sapiens gamma- | 0 |
| | | | aminobutyric acid (GABA) A | |
| | | | receptor, pi (GABRP), mRNA | |
| 20164 | I:1997963:14B02:B05 | XM_003631 | Homo sapiens solute carrier family | 0 |
| | | | 25 (mitochondrial carrier; adenine | |
| | | | nucleotide translocator), member 4 | |
| | | | (SLC25A4), mRNA | |
| 969 | NIH50_40026 | BC008664 | Homo sapiens, clone MGC: 9281 | 0 |
| | | | IMAGE: 3871960, mRNA, complete | |
| | | | cds | |
| 9910 | I:1805840:05B01:C09 | XM_003399 | Homo sapiens mannosidase, beta | 0 |
| | | | A, lysosomal (MANBA), mRNA | |
| 2427 | M00005767D:B03 | XM_047441 | Homo sapiens RAP1, GTP-GDP | 0 |
| | | | dissociation stimulator 1 | |
| | | | (RAP1GDS1), mRNA | |
| 19990 | RG:1056692:10012:C11 | XM_003450 | Homo sapiens cyclin G associated | 0 |
| | | | kinase (GAK), mRNA | |
| 20605 | I:690313:16A01:G12 | XM_011152 | Homo sapiens insulin-like growth | 0 |
| | | | factor binding protein 7 (IGFBP7), | |
| | | | mRNA | |
| 10650 | I:2456393:07B01:E10 | AK001580 | Homo sapiens cDNA FLJ10718 fis, | 0 |
| | | | clone NT2RP3001096, weakly | |
| | | | similar to Rattus norvegicus | |
| | | | leprecan mRNA | |
| 25963 | 035JN022.G01 | X53002 | Human mRNA for integrin beta-5 | 0 |
| | | | subunit | |
| 25562 | 035JN015.F07 | X53002 | Human mRNA for integrin beta-5 | 0 |
| | | | subunit | |
| 9377 | I:2782593:12A01:A02 | X60656 | H. sapiens mRNA for elongation | 1.4E−46 |
| | | | factor 1-beta | |
| 17618 | I:707667:15B01:A08 | XM_002273 | Homo sapiens inhibitor of DNA | 3.5E−117 |
| | | | binding 2, dominant negative helix- | |
| | | | loop-helix protein (ID2), mRNA | |
| 12136 | I:3208994:03B01:D06 | U16267 | Human AMP deaminase isoform L, | 0 |
| | | | alternatively spliced (AMPD2) | |
| | | | mRNA, exons 1A, 2 and 3, partial | |
| | | | cds | |
| 17373 | I:1538189:14A02:G07 | XM_046818 | Homo sapiens similar to receptor | 8.3E−123 |
| | | | tyrosine kinase-like orphan | |
| | | | receptor 1 (H. sapiens) | |
| | | | (LOC92711), mRNA | |
| 18577 | RG:503209:10010:A09 | XM_049305 | Homo sapiens Lysosomal- | 0 |
| | | | associated multispanning | |
| | | | membrane protein-5 (LAPTM5), | |
| | | | mRNA | |
| 3143 | M00001605D:C02 | BC003107 | Homo sapiens, inhibitor of DNA | 1.7E−88 |
| | | | binding 3, dominant negative helix- | |
| | | | loop-helix protein, clone MGC: 1988 | |
| | | | IMAGE: 3543936, mRNA, complete | |
| 17737 | RG:155066:10006:E02 | AL050147 | Homo sapiens mRNA; cDNA | 0 |
| | | | DKFZp586E0820 (from clone | |
| | | | DKFZp586E0820); partial cds | |
| 20029 | I:1923613:17A01:G11 | AF113123 | Homo sapiens carbonyl reductase | 0 |
| | | | mRNA, complete cds | |
| 18537 | NIH50_40304 | BC001380 | Homo sapiens, succinate | 0 |
| | | | dehydrogenase complex, subunit | |
| | | | A, flavoprotein (Fp), clone | |
| | | | MGC: 1484 IMAGE: 3051442, | |
| | | | mRNA, complete cds | |
| 10090 | NIH50_40304 | | | |
| 12102 | I:2832414:11B01:C06 | XM_048045 | Homo sapiens katanin p80 (WD40- | 0 |
| | | | containing) subunit B1 (KATNB1), | |
| | | | mRNA | |
| 8487 | I:1375115:05A01:D01 | BC001174 | Homo sapiens, exostoses | 0 |
| | | | (multiple) 1, clone MGC: 2129 | |
| | | | IMAGE: 3502232, mRNA, complete | |
| | | | cds | |
| 9252 | I:1673876:06B01:B02 | BC000917 | Homo sapiens, clone MGC: 5184 | 0 |
| | | | IMAGE: 3048750, mRNA, complete | |
| | | | cds | |
| 25605 | 035JN021.D01 | BC000671 | Homo sapiens, claudin 4, clone | 0 |
| | | | MGC: 1778 IMAGE: 3349211, | |
| | | | mRNA, complete cds | |
| 29652 | M00001610C:D05 | BC000588 | Homo sapiens, HIRA-interacting | 0 |
| | | | protein 3, clone MGC: 1814 | |
| | | | IMAGE: 3345739, mRNA, complete | |
| | | | cds | |
| 10858 | I:2458933:04B01:E04 | X97544 | H. sapiens mRNA for TIM17 | 8.7E−62 |
| | | | preprotein translocase | |
| 1261 | M00023419C:B06 | U89606 | Human pyridoxal kinase mRNA, | 0 |
| | | | complete cds | |
| 4156 | 2243-4 | X93334 | Homo sapiens mitochondrial DNA, | 0 |
| | | | complete genome | |
| 3452 | 2243-1 | X93334 | Homo sapiens mitochondrial DNA, | 0 |
| | | | complete genome | |
| 2748 | 2242-6 | X93334 | Homo sapiens mitochondrial DNA, | 0 |
| | | | complete genome | |
| 2046 | 2248-3 | X93334 | Homo sapiens mitochondrial DNA, | 0 |
| | | | complete genome | |
| 2044 | 2242-4 | X93334 | Homo sapiens mitochondrial DNA, | 0 |
| | | | complete genome | |
| 1342 | 2248-2 | X93334 | Homo sapiens mitochondrial DNA, | 0 |
| | | | complete genome | |
| 1326 | 2244-3 | X93334 | Homo sapiens mitochondrial DNA, | 0 |
| | | | complete genome | |
| 9981 | I:1720149:06A01:G09 | AF069604 | Homo sapiens myosin light chain | 0 |
| | | | kinase isoform 4 (MLCK) mRNA, | |
| | | | partial cds | |
| 27917 | 035JN002.H04 | XM_015978 | Homo sapiens hypothetical protein | 1.8E−92 |
| | | | FLJ22969 (FLJ22969), mRNA | |
| 8488 | I:1808529:05B01:D01 | AJ293647 | Homo sapiens partial IL4RA gene | 1.1E−125 |
| | | | for interleukin-4 receptor alfa chain, | |
| | | | exon 11, ECSSQV allele | |
| 22793 | M00057283C:D06 | AF161410 | Homo sapiens HSPC292 mRNA, | 0 |
| | | | partial cds | |
| 26883 | 035JN005.C03 | AF161410 | Homo sapiens HSPC292 mRNA, | 0 |
| | | | partial cds | |
| 11540 | I:1909488:10B01:B11 | XM_027739 | Homo sapiens duodenal | 0 |
| | | | cytochrome b (FLJ23462), mRNA | |
| 17707 | I:489882:14A01:F02 | X99474 | H. sapiens mRNA for chloride | 0 |
| | | | channel, CIC-6c | |
| 20649 | NIH50_41452 | Z14136 | H. sapiens gene for | 0 |
| | | | spermidine/spermine N1- | |
| | | | acetyltransferase | |
| 24004 | M00056163C:H09 | AF107495 | Homo sapiens FWP001 and | 0 |
| | | | putative FWP002 mRNA, complete | |
| | | | cds | |
| 11836 | I:1806769:01B02:F11 | X93036 | H. sapiens mRNA for MAT8 protein | 0 |
| 24932 | M00054963C:C09 | M26152 | Homo sapiens serum amyloid A | 0 |
| | | | (SAA) mRNA, complete cds | |
| 19143 | RG:149960:10006:D04 | AK003448 | Mus musculus 18 days embryo | 8.9E−21 |
| | | | cDNA, RIKEN full-length enriched | |
| | | | library, clone: 1110004P15, full | |
| | | | insert sequence | |
| 26257 | 035JN013.B08 | J04056 | Human carbonyl reductase mRNA, | 0 |
| | | | complete cds | |
| 21239 | M00054679B:B03 | J02619 | Human Z type alpha-1-antitrypsin | 0 |
| | | | gene, complete cds (exons 2-5) | |
| 16959 | I:1426031:14B01:B07 | AY035783 | Homo sapiens laminin 5 beta 3 | 3.8E−121 |
| | | | subunit (LAMB3) mRNA, complete | |
| | | | cds | |
| 2568 | M00022158D:C11 | XM_036609 | Homo sapiens laminin, beta 3 | 0 |
| | | | (nicein (125 kD), kalinin (140 kD), | |
| | | | BM600 (125 kD)) (LAMB3), mRNA | |
| 25936 | 035JN020.A07 | XM_036608 | Homo sapiens laminin, beta 3 | 0 |
| | | | (nicein (125 kD), kalinin (140 kD), | |
| | | | BM600 (125 kD)) (LAMB3), mRNA | |
| 23041 | M00054797C:G10 | XM_046649 | Homo sapiens nuclear factor of | 0 |
| | | | kappa light polypeptide gene | |
| | | | enhancer in B-cells inhibitor, alpha | |
| | | | (NFKBIA), mRNA | |
| 9206 | I:1822716:05B01:C08 | BC008059 | Homo sapiens, clone | 0 |
| | | | IMAGE: 2967491, mRNA | |
| 25105 | M00054824C:H04 | BC009110 | Homo sapiens, clone MGC: 17355 | 0 |
| | | | IMAGE: 3453825, mRNA, complete | |
| | | | cds | |
| 24779 | M00057061D:G07 | | | |
| 22451 | M00043372B:B06 | X00947 | Human alpha 1-antichymotrypsin | 0 |
| | | | gene fragment | |
| 22291 | M00054785D:G05 | X00947 | Human alpha 1-antichymotrypsin | 0 |
| | | | gene fragment | |
| 21143 | M00055146A:D11 | | | |
| 24751 | M00054676B:D07 | X03083 | Human lactate dehydrogenase-A | 0 |
| | | | gene exon 7 and 3′ flanking region | |
| 24294 | M00056163D:E01 | X03083 | Human lactate dehydrogenase-A | 9.4E−110 |
| | | | gene exon 7 and 3′ flanking region | |
| 24006 | M00056163D:E01 | X03083 | Human lactate dehydrogenase-A | 0 |
| | | | gene exon 7 and 3′ flanking region | |
| 25678 | 035Jn031.H01 | AK001670 | Homo sapiens cDNA FLJ10808 fis, | 4.9E−53 |
| | | | clone NT2RP4000879, weakly | |
| | | | similar to UBIQUITIN-ACTIVATING | |
| | | | ENZYME E1 | |
| 22027 | M00056534C:E08 | XM_003512 | Homo sapiens amphiregulin | 0 |
| | | | (schwannoma-derived growth | |
| | | | factor) (AREG), mRNA | |
| 29495 | 035JN022.E12 | D83761 | Homo sapiens mRNA for mother | 0 |
| | | | against dpp (Mad) related protein, | |
| | | | complete cds | |
| 24577 | M00056654B:G02 | XM_038306 | Homo sapiens dual specificity | 0 |
| | | | phosphatase 6 (DUSP6), mRNA | |
| 23527 | M00055865C:D04 | | | |
| 17090 | I:341491:13B01:A01 | BC004490 | Homo sapiens, v-fos FBJ murine | 3.8E−98 |
| | | | osteosarcoma viral oncogene | |
| | | | homolog, clone MGC: 11074 | |
| | | | IMAGE: 3688670, mRNA, complete | |
| | | | cds | |
| 25137 | M00057167A:C07 | | | |
| 23772 | M00056360A:E07 | BC004490 | Homo sapiens, v-fos FBJ murine | 0 |
| | | | osteosarcoma viral oncogene | |
| | | | homolog, clone MGC: 11074 | |
| | | | IMAGE: 3688670, mRNA, complete | |
| | | | cds | |
| 1659 | M00001350B:D10 | BC004490 | Homo sapiens, v-fos FBJ murine | 0 |
| | | | osteosarcoma viral oncogene | |
| | | | homolog, clone MGC: 11074 | |
| | | | IMAGE: 3688670, mRNA, complete | |
| | | | cds | |
| 8497 | I:2170638:05A01:A07 | BC006169 | Homo sapiens, Similar to SH3- | 5.2E−125 |
| | | | domain binding protein 5 (BTK- | |
| | | | associated), clone MGC: 13234 | |
| | | | IMAGE: 4025362, mRNA, complete | |
| | | | cds | |
| 25272 | M00054621A:D09 | AF161435 | Homo sapiens HSPC317 mRNA, | 0 |
| | | | partial cds | |
| 21216 | M00056194B:G06 | XM_002844 | Homo sapiens procollagen-lysine, | 0 |
| | | | 2-oxoglutarate 5-dioxygenase | |
| | | | (lysine hydroxylase) 2 (PLOD2), | |
| | | | mRNA | |
| 11939 | I:2938757:02A02:B05 | D43767 | Human mRNA for chemokine, | 0 |
| | | | complete cds | |
| 9191 | I:1421929:05A01:D02 | X63629 | H. sapiens mRNA for p cadherin | 2.4E−90 |
| 3429 | 2024-3 | AF002697 | Homo sapiens E1B 19K/Bcl-2- | 0 |
| | | | binding protein Nip3 mRNA, | |
| | | | nuclear gene encoding | |
| | | | mitochondrial protein, complete cds | |
| 2725 | 2024-1 | AF002697 | Homo sapiens E1B 19K/Bcl-2- | 0 |
| | | | binding protein Nip3 mRNA, | |
| | | | nuclear gene encoding | |
| | | | mitochondrial protein, complete cds | |
| 19923 | I:1001356:13A01:B11 | BC006318 | Homo sapiens, erythrocyte | 1.7E−103 |
| | | | membrane protein band 4.9 | |
| | | | (dematin), clone MGC: 12740 | |
| | | | IMAGE: 4125804, mRNA, complete | |
| | | | cds | |
| 20457 | I:1923289:19A01:E06 | XM_035603 | Homo sapiens gap junction protein, | 0 |
| | | | beta 5 (connexin 31.1) (GJB5), | |
| | | | mRNA | |
| 24773 | M00057055D:B11 | | | |
| 24119 | M00042886D:H10 | BC006260 | Homo sapiens, Similar to N-myc | 4.4E−114 |
| | | | downstream regulated, clone | |
| | | | MGC: 11293 IMAGE: 3946764, | |
| | | | mRNA, complete cds | |
| 3908 | M00027080A:E06 | M60756 | Human histone H2B.1 mRNA, 3′ | 0 |
| | | | end | |
| 8560 | I:2346704:06B01:H01 | AJ000334 | Homo sapiens mRNA for cytosolic | 0 |
| | | | asparaginyl-tRNA synthetase | |
| 24588 | M00055411A:C10 | L19779 | Homo sapiens histone H2A.2 | 0 |
| | | | mRNA, complete cds | |
| 4047 | M00007997C:B08 | XM_009091 | Homo sapiens glycogen synthase | 0 |
| | | | 1 (muscle) (GYS1), mRNA | |
| 28344 | 035JN011.E11 | XM_050471 | Homo sapiens glycogen synthase | 0 |
| | | | 1 (muscle) (GYS1), mRNA | |
| 27561 | 035JN001.F04 | XM_001472 | Homo sapiens v-jun avian sarcoma | 0 |
| | | | virus 17 oncogene homolog (JUN), | |
| | | | mRNA | |
| 3272 | M00022165C:E12 | NM_001024 | Homo sapiens ribosomal protein | 0 |
| | | | S21 (RPS21), mRNA | |
| 26735 | 035JN030.A08 | XM_010408 | Homo sapiens RAB9-like protein | 0 |
| | | | (RAB9L), mRNA | |
| 24900 | M00054500D:C08 | BC004427 | Homo sapiens, proteasome | 0 |
| | | | (prosome, macropain) subunit, | |
| | | | alpha type, 7, clone MGC: 3755 | |
| | | | IMAGE: 2819923, mRNA, complete | |
| | | | cds | |
| 9472 | I:2510171:04B01:H08 | X04503 | Human SLPI mRNA fragment for | 0 |
| | | | secretory leucocyte protease | |
| | | | inhibitor | |
| 9979 | I:1623318:06A01:F09 | L31409 | Homo sapiens creatine transporter | 2.2E−45 |
| | | | mRNA, complete cds | |
| 21996 | M00042467B:B04 | L00160 | Human phosphoglycerate kinase | 0 |
| | | | (pgk) mRNA, exons 2 to last | |
| 22312 | M00055035D:F05 | | | |
| 11327 | I:3139773:05A01:H11 | L00160 | Human phosphoglycerate kinase | 2.6E−21 |
| | | | (pgk) mRNA, exons 2 to last | |
| 18240 | RG:1927470:10015:H08 | V00572 | Human mRNA encoding | 0 |
| | | | phosphoglycerate kinase | |
| 21922 | M00054848A:D12 | AF139065 | Homo sapiens desmoplakin I | 0 |
| | | | mRNA, partial cds | |
| 22290 | M00057002D:H01 | | | |
| 10390 | I:1405391:03B02:C09 | AF056979 | Homo sapiens clone YAN1 | 0 |
| | | | interferon-gamma receptor mRNA, | |
| | | | complete cds | |
| 2212 | M00008098B:F06 | U19247 | Homo sapiens interferon-gamma | 0 |
| | | | receptor alpha chain gene, exon 7 | |
| | | | and complete cds | |
| 20213 | RG:221172:10007:C11 | S74774 | p59fyn(T) = OKT3-induced calcium | 2.9E−103 |
| | | | influx regulator [human, Jurkat J6 T | |
| | | | cell line, mRNA Partial, 1605 nt] | |
| 24955 | M00055929D:D04 | | | |
| 19574 | I:635178:13B02:C10 | XM_033944 | Homo sapiens superoxide | 0 |
| | | | dismutase 2, mitochondrial | |
| | | | (SOD2), mRNA | |
| 19969 | RG:501476:10010:A05 | U14394 | Human tissue inhibitor of | 0 |
| | | | metalloproteinases-3 mRNA, | |
| | | | complete cds | |
| 8570 | I:1696224:06B01:E07 | X70684 | C. aethiops mRNA for heat shock | 5.6E−25 |
| | | | protein 70 | |
| 18519 | I:1997703:13A01:D09 | X52947 | Human mRNA for cardiac gap | 0 |
| | | | junction protein | |
| 9616 | I:3200341:06B02:H02 | Y00106 | Human gene for beta-adrenergic | 0 |
| | | | receptor (beta-2 subtype) | |
| 22334 | M00055067D:H12 | | | |
| 17459 | I:2056395:13A02:B07 | M77349 | Human transforming growth factor- | 2.5E−121 |
| | | | beta induced gene product | |
| | | | (BIGH3) mRNA, complete cds | |
| 25193 | M00056763B:A12 | X68277 | H. sapiens CL 100 mRNA for | 0 |
| | | | protein tyrosine phosphatase | |
| 25191 | M00056763B:A12 | X68277 | H. sapiens CL 100 mRNA for | 0 |
| | | | protein tyrosine phosphatase | |
| 9448 | I:2455617:04B01:D02 | XM_051799 | Homo sapiens guanosine | 0 |
| | | | monophosphate reductase | |
| | | | (GMPR), mRNA | |
| 25224 | RG:950682:10003:D06 | BC002536 | Homo sapiens, | 0 |
| | | | phosphofructokinase, platelet, | |
| | | | clone MGC: 2192 IMAGE: 3140233, | |
| | | | mRNA, complete cds | |
| 20218 | RG:2158297:10016:E11 | BC002536 | Homo sapiens, | 0 |
| | | | phosphofructokinase, platelet, | |
| | | | clone MGC: 2192 IMAGE: 3140233, | |
| | | | mRNA, complete cds | |
| 3089 | NIH50_26184 | D25328 | Human mRNA for platelet-type | 2E−108 |
| | | | phosphofructokinase, complete cds | |
| 23985 | NIH50_26184 | | | |
| 19953 | NIH50_26184 | D25328 | Human mRNA for platelet-type | 2E−108 |
| | | | phosphofructokinase, complete cds | |
| 11506 | NIH50_26184 | | | |
| 22362 | M00056349A:F08 | M10546 | Human mitochondrial DNA, | 1.2E−86 |
| | | | fragment M1, encoding transfer | |
| | | | RNAs, cytochrome oxidase I, and 2 | |
| | | | URFs | |
| 25516 | 035JN011.G01 | XM_011470 | Homo sapiens myristoylated | 0 |
| | | | alanine-rich protein kinase C | |
| | | | substrate (MARCKS, 80K-L) | |
| | | | (MACS), mRNA | |
| 25757 | 037XN005.H07 | AF017116 | Homo sapiens type-2 phosphatidic | 0 |
| | | | acid phosphohydrolase (PAP2) | |
| | | | mRNA, complete cds | |
| 24814 | M00042773B:E09 | M17733 | Human thymosin beta-4 mRNA, | 0 |
| | | | complete cds | |
| 21994 | M00042465B:E04 | M17733 | Human thymosin beta-4 mRNA, | 0 |
| | | | complete cds | |
| 27117 | 037XN001.H03 | BC001631 | Homo sapiens, prothymosin beta 4, | 0 |
| | | | clone MGC: 2219 IMAGE: 3536637, | |
| | | | mRNA, complete cds | |
| 24681 | NIH50_41452 | | | |
| 22745 | M00056592A:B08 | NM_003739 | Homo sapiens aldo-keto reductase | 0 |
| | | | family 1, member C3 (3-alpha | |
| | | | hydroxysteroid dehydrogenase, | |
| | | | type II) (AKR1C3), mRNA | |
| 24233 | M00055873C:B06 | | | |
| 2001 | M00001381A:F03 | XM_035387 | Homo sapiens ribosomal protein, | 0 |
| | | | large, P1 (RPLP1), mRNA | |
| 21179 | NIH50_43550 | | | |
| 17147 | NIH50_43550 | AK026515 | Homo sapiens cDNA: FLJ22862 | 0 |
| | | | fis, clone KAT01966, highly similar | |
| | | | to HSLDHAR Human mRNA for | |
| | | | lactate dehydrogenase-A | |
| 8700 | NIH50_43550 | | | |
| 21214 | M00056193B:D06 | BC006260 | Homo sapiens, Similar to N-myc | 0 |
| | | | downstream regulated, clone | |
| | | | MGC: 11293 IMAGE: 3946764, | |
| | | | mRNA, complete cds | |
| 26422 | 037XN003.D08 | BC006260 | Homo sapiens, Similar to N-myc | 0 |
| | | | downstream regulated, clone | |
| | | | MGC: 11293 IMAGE: 3946764, | |
| | | | mRNA, complete cds | |
| 22837 | M00055891C:B09 | | | |
| 21965 | M00057029A:G09 | | | |
| 25541 | 035JN013.D01 | AK026310 | Homo sapiens cDNA: FLJ22657 | 0 |
| | | | fis, clone HSI07791, highly similar | |
| | | | to HUMCYB5 Human cytochrome | |
| | | | b5 mRNA | |
| 18302 | I:1738248:09B02:G08 | XM_016114 | Homo sapiens hypothetical protein | 0 |
| | | | FLJ22501 (FLJ22501), mRNA | |
| 24049 | M00054706B:G04 | AF107495 | Homo sapiens FWP001 and | 0 |
| | | | putative FWP002 mRNA, complete | |
| | | | cds | |
| 26326 | 035JN023.D08 | AK025906 | Homo sapiens cDNA: FLJ22253 | 0 |
| | | | fis, clone HRC02763 | |
| 2254 | M00004085C:C02 | AK025703 | Homo sapiens cDNA: FLJ22050 | 0 |
| | | | fis, clone HEP09454 | |
| 10296 | I:2868216:07B02:D09 | AK025703 | Homo sapiens cDNA: FLJ22050 | 0 |
| | | | fis, clone HEP09454 | |
| 20044 | I:2547084:09B01:F05 | XM_016847 | Homo sapiens hypothetical protein | 0 |
| | | | FLJ22002 (FLJ22002), mRNA | |
| 28806 | 035JN028.D05 | AK025504 | Homo sapiens cDNA: FLJ21851 | 0 |
| | | | fis, clone HEP01962 | |
| 17566 | I:446969:17B02:G07 | AK023217 | Homo sapiens cDNA FLJ13155 fis, | 2E−115 |
| | | | clone NT2RP3003433 | |
| 19005 | I:2674167:09A02:G09 | AK022968 | Homo sapiens cDNA FLJ12906 fis, | 0 |
| | | | clone NT2RP2004373 | |
| 3567 | M00023369D:C05 | | | |
| 21983 | M00057081B:H03 | | | |
| 458 | M00022134B:E08 | XM_037412 | Homo sapiens hypothetical gene | 0 |
| | | | supported by BC008993 | |
| | | | (LOC91283), mRNA | |
| 22331 | M00057138A:E11 | | | |
| 21411 | M00055833D:B03 | | | |
| 22972 | M00056956D:B01 | | | |
| 24533 | RG:1643392:10014:C11 | | | |
| 24853 | M00056617D:F07 | AK020869 | Mus musculus adult retina cDNA, | 6.5E−59 |
| | | | RIKEN full-length enriched library, | |
| | | | clone: A930017A02, full insert | |
| | | | sequence | |
| 23753 | M00054915A:G02 | | | |
| 21502 | M00056193B:D06 | | | |
| 18180 | RG:39422:10005:B02 | | | |
| 23918 | M00056278C:E03 | | | |
| 24144 | RG:1982961:20001:H05 | | | |
| 19996 | RG:1283072:10012:F11 | BC009107 | Homo sapiens, clone MGC: 17352 | 0 |
| | | | IMAGE: 3449913, mRNA, complete | |
| | | | cds | |
| 11528 | I:1899534:10B01:D05 | | | |
| 20506 | I:1969044:18B01:E12 | AB048286 | Homo sapiens GS1999full mRNA, | 0 |
| | | | complete cds | |
| 23833 | RG:1656861:10014:E10 | | | |
| 20042 | I:1873176:09B01:E05 | BC001909 | Homo sapiens, clone | 0 |
| | | | IMAGE: 3537447, mRNA, partial | |
| | | | cds | |
| 24977 | M00055820D:F01 | | | |
| 11646 | I:1723142:08B02:G11 | AK014612 | Mus musculus 0 day neonate skin | 4.6E−45 |
| | | | cDNA, RIKEN full-length enriched | |
| | | | library, clone: 4633401I05, full | |
| | | | insert sequence | |
| 24872 | RG:773612:10011:D06 | | | |
| 10577 | I:2174196:08A01:A10 | | | |
| 21710 | RG:1091554:10003:G01 | | | |
| 18556 | RG:31082:10004:F09 | | | |
| 29433 | 035JN014.F12 | AK001805 | Homo sapiens cDNA FLJ10943 fis, | 0 |
| | | | clone OVARC1001360 | |
| 29273 | 037XN005.F12 | | | |
| 28763 | 035JN018.G11 | AJ310543 | Homo sapiens mRNA for EGLN1 | 1.9E−40 |
| | | | protein | |
| 27887 | RG:2364147:8119908:A10 | | | |
| 27450 | 035JN032.F09 | | | |
| 27255 | 035JN006.E09 | XM_027456 | Homo sapiens hypothetical gene | 1.2E−57 |
| | | | supported by AK000584 | |
| | | | (LOC89942), mRNA | |
| 27226 | 035JN004.F09 | | | |
| 26550 | 035JN008.D08 | | | |
| 26508 | 035JN004.G02 | | | |
| 26483 | RG:2377371:8119908:C08 | | | |
| 26334 | 035JN023.H08 | AF364547 | Homo sapiens methylmalonyl-CoA | 0 |
| | | | epimerase mRNA, complete cds; | |
| | | | nuclear gene for mitochondrial | |
| | | | product | |
| 26027 | 035JN030.G01 | | | |
| 25977 | 035JN022.F07 | | | |
| 25965 | 035JN022.H01 | | | |
| 25844 | 035JN008.C07 | | | |
| 25834 | 035JN008.F01 | AB048289 | Bos taurus lae mRNA for lipoate- | 3.1E−35 |
| | | | activating enzyme, complete cds | |
| 25816 | 035JN004.E07 | | | |
| 25746 | 037XN007.B07 | | | |
| 25742 | 037XN007.H01 | | | |
| 25741 | 037XN005.H01 | | | |
| 25712 | 037XN003.A07 | | | |
| 25642 | 035Jn027.F01 | | | |
| 25621 | 035JN021.D07 | AK027321 | Homo sapiens cDNA FLJ14415 fis, | 0 |
| | | | clone HEMBA1004889, weakly | |
| | | | similar to Human C3f mRNA | |
| 25614 | 035JN023.H01 | | | |
| 25603 | 035JN021.C01 | | | |
| 25556 | 035JN015.C07 | | | |
| 25555 | 035JN013.C07 | | | |
| 25540 | 035JN015.C01 | | | |
| 23576 | RG:1984769:20002:D10 | | | |
| 22566 | RG:1996656:20003:C03 | | | |
| 9036 | DD182 | | | |
| 4164 | M00007932B:E06 | | | |
| 4146 | 2179-5 | | | |
| 4091 | M00026845A:E01 | | | |
| 4072 | M00023398A:G12 | | | |
| 4022 | M00022127D:B06 | | | |
| 3965 | M00005406A:f04 | | | |
| 3954 | M00005400B:E1 | | | |
| 3872 | M00007974D:B04 | | | |
| 3869 | M00003868C:A03 | | | |
| 3838 | M00007052A:C09 | XM_048272 | Homo sapiens similar to Ras- | 0 |
| | | | related GTP-binding protein (H. sapiens) | |
| | | | (LOC92951), mRNA | |
| 3806 | 2168-2 | | | |
| 3798 | 2138-4 | | | |
| 3792 | 2171-5 | | | |
| 3788 | 2156-4 | | | |
| 3767 | M00001355D:H12 | | | |
| 3458 | M00007160D:E10 | | | |
| 3251 | M00005471A:a04 | | | |
| 3194 | DF821 | | | |
| 3102 | 2167-1 | | | |
| 3094 | 2138-3 | | | |
| 2671 | M00023431A:D02 | | | |
| 2634 | M00008025D:A04 | | | |
| 2567 | M00008061B:A12 | | | |
| 2317 | M00001502D:E09 | | | |
| 1958 | M00023296B:B09 | | | |
| 1680 | 2169-5 | | | |
| 1625 | M00001542C:G08 | | | |
| 1445 | M00023335C:C09 | | | |
| 1320 | 2207-5 | | | |
| 974 | 2161-1 | | | |
| 726 | DO15 | | | |
| 718 | ER418 | | | |
| 703 | M00004189D:A11 | | | |
| 652 | M00007070A:C08 | | | |
| 630 | 2203-2 | | | |
| 593 | M00001373A:A06 | X93036 | H. sapiens mRNA for MAT8 protein | 0 |
| 532 | M00022005A:H05 | | | |
| 272 | 2168-5 | | | |
| 256 | M00001406C:H12 | | | |
| 57 | M00023371B:H02 | | | |

[0533] TABLE 18

| | | | | | | | 3D T4-2/ | |
|---|---|---|---|---|---|---|---|---|
| SEQ ID | SPOT | 2D T4-2/ | 3D T4-2/ | 3D S1/ | 3D T4-2/ | 3D T4-2/ | B1 Integrin | 3D T4-2/ |
| NO. | ID | 2D S1 | 3D S1 | 2D S1 | 2D T4-2 | EGFR Ab | Ab | Tyr |
| 2506 | 10594 | 0.6 | 2.2 | 0.6 | 1.9 | 3.0 | 1.0 | 2.9 |
| 2507 | 21851 | 1.0 | 1.0 | 1.0 | 3.5 | 1.3 | 1.0 | 1.0 |
| 2508 | 20990 | 1.6 | 4.6 | 1.0 | 1.5 | 1.0 | 1.0 | 1.0 |
| 2509 | 18641 | 1.0 | 0.6 | 2.6 | 1.7 | 1.0 | 1.6 | 1.0 |
| 2510 | 17229 | 0.3 | 0.8 | 1.0 | 2.1 | 1.0 | 1.0 | 1.0 |
| 2511 | 25930 | 1.0 | 1.0 | 1.0 | 1.0 | 1.0 | 1.0 | 1.0 |
| 2512 | 20701 | 1.6 | 2.9 | 1.3 | 2.7 | 4.5 | 1.9 | 5.8 |
| 2513 | 20346 | 1.7 | 2.7 | 1.4 | 2.6 | 4.3 | 2.0 | 5.2 |
| 2514 | 21247 | 1.0 | 4.4 | 1.5 | 3.0 | 3.4 | 2.6 | 4.7 |
| 2515 | 23062 | 0.6 | 2.5 | 0.6 | 1.8 | 3.3 | 1.4 | 2.7 |
| 2516 | 25666 | 1.0 | 2.9 | 0.6 | 2.0 | 3.6 | 1.0 | 2.3 |
| 2517 | 19001 | 8.5 | 14.2 | 1.0 | 1.0 | 4.8 | 1.7 | 8.0 |
| 2518 | 10897 | 1.0 | 3.1 | 4.5 | 1000.0 | 13.3 | 4.6 | 18.4 |
| 2519 | 1960 | 0.3 | 1.5 | 3.0 | 13.7 | 3.9 | 2.4 | 4.9 |
| 2520 | 26381 | 1.0 | 1.0 | 1.0 | 0.9 | 1.0 | 1.0 | 1.0 |
| 2521 | 26719 | 0.4 | 1.0 | 0.6 | 2.8 | 1.2 | 1.7 | 1.0 |
| 2522 | 27152 | 4.2 | 3.0 | 2.2 | 1.5 | 1.3 | 1.0 | 1.3 |
| 2523 | 10926 | 0.7 | 1.9 | 0.9 | 2.1 | 3.7 | 1.5 | 3.3 |
| 2524 | 28980 | 0.6 | 1.4 | 1.0 | 2.4 | 1.0 | 1.0 | 1.0 |
| 2525 | 1236 | 1.0 | 2.8 | 0.8 | 2.1 | 2.2 | 1.8 | 3.2 |
| 2526 | 29350 | 0.5 | 0.6 | 1.2 | 2.1 | 1.4 | 1.0 | 1.0 |
| 2527 | 26242 | 1.0 | 1.0 | 0.6 | 2.2 | 1.0 | 1.0 | 2.0 |
| 2528 | 4098 | 1.4 | 3.9 | 0.6 | 2.1 | 2.7 | 1.3 | 3.1 |
| 2529 | 17432 | 0.4 | 0.3 | 2.4 | 2.1 | 0.3 | 0.9 | 0.3 |
| 2530 | 1785 | 0.5 | 0.4 | 2.4 | 2.0 | 0.3 | 1.0 | 0.3 |
| 2531 | 28856 | 8.5 | 0.9 | 2.5 | 0.3 | 0.6 | 1.0 | 0.5 |
| 2532 | 18791 | 1.0 | 0.2 | 0.3 | 4.1 | 1.0 | 1.0 | 1.3 |
| 2533 | 22950 | 3.9 | 4.1 | 1.2 | 1.0 | 2.1 | 1.0 | 2.4 |
| 2534 | 1882 | 2.4 | 4.1 | 0.9 | 1.8 | 3.2 | 1.5 | 4.7 |
| 2535 | 23886 | 1.0 | 1.0 | 1.2 | 2.1 | 1.0 | 1.0 | 1.0 |
| 2536 | 24995 | 2.0 | 1.6 | 2.1 | 1.0 | 1.0 | 1.0 | 1.0 |
| 2537 | 24477 | 1.0 | 1.9 | 1.0 | 4.2 | 2.7 | 1.3 | 1.8 |
| 2538 | 21681 | 1.7 | 7.1 | 0.6 | 2.0 | 2.8 | 1.0 | 3.6 |
| 2539 | 9557 | 1.6 | 7.5 | 0.8 | 1.0 | 3.0 | 1.0 | 2.5 |
| 2540 | 22033 | 2.8 | 3.7 | 1.0 | 0.9 | 2.2 | 1.0 | 2.7 |
| 2541 | 873 | 1.0 | 4.0 | 1.0 | 2.7 | 1.7 | 1.0 | 1.0 |
| 2542 | 17144 | 1.0 | 0.5 | 3.6 | 1.4 | 1.0 | 1.0 | 1.0 |
| 2543 | 26970 | 6.0 | 15.3 | 0.2 | 0.6 | 2.9 | 1.0 | 5.4 |
| 2544 | 21402 | 0.2 | 1.0 | 2.8 | 6.9 | 2.4 | 1.0 | 3.6 |
| 2545 | 27074 | 1.7 | 2.5 | 2.3 | 3.2 | 1.6 | 1.0 | 2.0 |
| 2546 | 10963 | 0.5 | 0.3 | 2.1 | 0.5 | 1.0 | 1.0 | 0.7 |
| 2547 | 29525 | 0.6 | 1.0 | 0.7 | 2.4 | 1.7 | 1.3 | 1.0 |
| 2548 | 25514 | 1000.0 | 1.0 | 1.0 | 1.0 | 0.5 | 1.0 | 1.0 |
| 2549 | 26612 | 0.4 | 0.5 | 1.6 | 2.8 | 0.8 | 1.0 | 0.8 |
| 2550 | 24600 | 1.6 | 2.7 | 1.0 | 2.0 | 1.0 | 1.2 | 1.4 |
| 2551 | 9741 | 2.3 | 5.0 | 1.0 | 2.2 | 1.7 | 1.0 | 1.0 |
| 2552 | 23689 | 1.0 | 2.6 | 0.8 | 1.8 | 2.3 | 1.0 | 2.7 |
| 2553 | 22352 | 1.0 | 2.9 | 0.7 | 1.6 | 2.4 | 1.0 | 2.4 |
| 2554 | 23806 | 1.0 | 0.4 | 1.3 | 2.3 | 1.0 | 1.4 | 1.4 |
| 2555 | 12285 | 1.0 | 1.0 | 1.0 | 1.0 | 0.8 | 1.0 | 0.5 |
| 2556 | 27638 | 0.6 | 1.0 | 0.8 | 2.2 | 2.1 | 1.0 | 1.0 |
| 2557 | 9663 | 1.0 | 1.0 | 1.0 | 1000.0 | 1.0 | 1.0 | 1.0 |
| 2558 | 26850 | 1.0 | 0.2 | 9.1 | 2.1 | 1.3 | 1.6 | 2.2 |
| 2559 | 10204 | 2.9 | 2.3 | 0.8 | 0.6 | 3.1 | 1.4 | 2.4 |
| 2560 | 1318 | 2.0 | 0.9 | 2.3 | 0.5 | 0.6 | 1.1 | 0.7 |
| 2561 | 25922 | 1.0 | 0.8 | 1.0 | 1.0 | 1.0 | 1.0 | 1.0 |
| 2562 | 26347 | 1.0 | 1.0 | 1.0 | 1.0 | 1.0 | 1.0 | 1.0 |
| 2563 | 20361 | 1.0 | 1.0 | 1.0 | 2.0 | 1.0 | 1.0 | 1.0 |
| 2564 | 28672 | 0.6 | 2.1 | 0.6 | 2.1 | 1.4 | 1.0 | 1.7 |
| 2565 | 25520 | 0.5 | 0.3 | 2.3 | 1.3 | 1.0 | 0.7 | 0.5 |
| 2566 | 1723 | 1.0 | 0.5 | 5.1 | 3.5 | 1.0 | 3.1 | 1.0 |
| 2567 | 28863 | 0.8 | 1.3 | 1.0 | 2.3 | 1.7 | 1.7 | 1.7 |
| 2568 | 25526 | 5.9 | 1.7 | 1.0 | 0.6 | 0.6 | 0.7 | 0.4 |
| 2569 | 27936 | 1.0 | 1.0 | 3.2 | 3.1 | 1.9 | 3.1 | 1.5 |
| 2570 | 26851 | 1.0 | 0.7 | 3.2 | 2.7 | 1.6 | 2.4 | 1.3 |
| 2571 | 25107 | 1.0 | 5.8 | 1.0 | 2.6 | 2.6 | 1.6 | 2.6 |
| 2572 | 24912 | 1.0 | 2.9 | 1.0 | 2.4 | 1.6 | 1.3 | 1.8 |
| 2573 | 25169 | 1.0 | 0.7 | 2.5 | 1.5 | 1.0 | 1.0 | 1.0 |
| 2574 | 25600 | 1.6 | 1.4 | 2.9 | 2.1 | 0.7 | 0.9 | 0.5 |
| 2575 | 28706 | 0.2 | 0.5 | 0.6 | 2.1 | 1.3 | 1.2 | 1.0 |
| 2576 | 26377 | 0.6 | 0.3 | 2.2 | 1.0 | 1.2 | 1.3 | 1.0 |
| 2577 | 19460 | 2.4 | 1.5 | 2.5 | 1.3 | 1.0 | 1.0 | 0.8 |
| 2578 | 25243 | 1.0 | 0.7 | 2.2 | 1.0 | 1.0 | 1.0 | 1.0 |
| 2579 | 20018 | 1.0 | 1.0 | 1.0 | 2.6 | 1.0 | 1.0 | 1.0 |
| 2580 | 918 | 1.0 | 1.7 | 1.3 | 2.1 | 2.0 | 1.6 | 2.4 |
| 2581 | 25027 | 1.0 | 1.0 | 1.0 | 1.0 | 1.0 | 1.0 | 1.0 |
| 2582 | 29089 | 0.6 | 0.5 | 0.8 | 2.1 | 1.0 | 1.0 | 1.0 |
| 2583 | 9141 | 1.0 | 1.0 | 1.0 | 1.0 | 1.0 | 1.0 | 1.0 |
| 2584 | 12005 | 1.0 | 1.0 | 2.2 | 1.0 | 1.0 | 1.0 | 1.0 |
| 2585 | 12148 | 1.0 | 1.0 | 1.0 | 1.0 | 1.0 | 1.0 | 1.0 |
| 2586 | 17394 | 0.4 | 0.6 | 2.1 | 2.0 | 1.0 | 1.0 | 1.0 |
| 2587 | 27017 | 2.8 | 3.3 | 0.8 | 1.0 | 2.4 | 1.8 | 2.8 |
| 2588 | 25809 | 1.0 | 1.0 | 1000.0 | 1.0 | 1.0 | 1.0 | 1.0 |
| 2589 | 8719 | 0.1 | 1.0 | 2.3 | 2.1 | 0.4 | 0.5 | 0.3 |
| 2590 | 21030 | 0.4 | 1.0 | 1.3 | 2.1 | 1.4 | 1.6 | 1.4 |
| 2591 | 11436 | 0.7 | 0.4 | 2.0 | 1.0 | 0.6 | 0.8 | 0.6 |
| 2592 | 10374 | 1.5 | 1.5 | 3.5 | 2.7 | 0.4 | 1.0 | 0.3 |
| 2593 | 19037 | 3.0 | 3.3 | 0.9 | 1.5 | 2.7 | 1.4 | 3.7 |
| 2594 | 398 | 1.6 | 6.9 | 1.1 | 3.3 | 2.4 | 1.0 | 4.5 |
| 2595 | 18773 | 1.9 | 5.1 | 1.0 | 3.9 | 3.8 | 2.0 | 6.1 |
| 2596 | 3583 | 0.5 | 0.7 | 1.0 | 2.0 | 2.5 | 1.0 | 1.5 |
| 2597 | 3418 | 1.8 | 3.2 | 1.2 | 2.4 | 1.6 | 1.0 | 1.2 |
| 2598 | 18985 | 9.2 | 3.1 | 1.0 | 0.6 | 2.3 | 1.1 | 2.5 |
| 2599 | 25861 | 3.4 | 1.5 | 2.0 | 0.8 | 0.8 | 0.9 | 0.6 |
| 2600 | 3317 | 0.9 | 2.3 | 1.0 | 3.4 | 1.9 | 1.0 | 1.0 |
| 2601 | 8743 | 0.2 | 0.7 | 1.0 | 4.3 | 1.8 | 1.0 | 1.7 |
| 2602 | 26240 | 0.2 | 1.0 | 1.0 | 5.3 | 1.9 | 1.9 | 1.1 |
| 2603 | 28562 | 0.3 | 0.2 | 2.0 | 1.0 | 0.5 | 0.5 | 0.6 |
| 2604 | 16877 | 1.0 | 2.6 | 1.1 | 2.6 | 1.7 | 1.5 | 1.3 |
| 2605 | 25955 | 1.0 | 1.0 | 1.0 | 1.0 | 1.0 | 1.0 | 1.0 |
| 2606 | 26308 | 0.2 | 0.4 | 1.0 | 2.2 | 0.7 | 0.8 | 0.6 |
| 2607 | 4140 | 1.9 | 6.7 | 0.7 | 2.1 | 3.0 | 1.0 | 3.5 |
| 2608 | 3436 | 1.8 | 6.3 | 0.6 | 2.2 | 3.1 | 1.3 | 3.3 |
| 2609 | 25612 | 1.0 | 12.5 | 1.0 | 1.0 | 2.1 | 1.0 | 2.9 |
| 2610 | 12257 | 1.0 | 1.0 | 2.0 | 1.0 | 0.8 | 0.9 | 0.8 |
| 2611 | 9111 | 0.5 | 0.5 | 2.2 | 1.3 | 1.5 | 1.0 | 0.7 |
| 2612 | 17620 | 0.3 | 0.8 | 1.0 | 3.2 | 2.7 | 2.1 | 1.0 |
| 2613 | 26025 | 1.0 | 2.9 | 1.1 | 2.2 | 2.3 | 1.0 | 2.6 |
| 2614 | 19271 | 0.5 | 1.3 | 0.7 | 2.2 | 1.6 | 1.2 | 1.5 |
| 2615 | 4151 | 0.4 | 4.2 | 1.2 | 11.1 | 4.2 | 1.0 | 2.9 |
| 2616 | 26569 | 0.7 | 2.2 | 0.8 | 2.9 | 2.3 | 1.7 | 2.6 |
| 2617 | 10344 | 1.0 | 1.0 | 1.0 | 1.0 | 1.0 | 1.0 | 1.0 |
| 2618 | 832 | 1.0 | 3.3 | 1.0 | 2.4 | 3.7 | 2.2 | 4.0 |
| 2619 | 12071 | 1.8 | 1.5 | 2.2 | 1.0 | 1.3 | 0.8 | 1.4 |
| 2620 | 12271 | 0.6 | 4.9 | 1.9 | 14.9 | 20.8 | 4.0 | 24.1 |
| 2621 | 11433 | 0.5 | 0.4 | 5.7 | 3.0 | 1.7 | 1.8 | 1.0 |
| 2622 | 20917 | 1.0 | 2.8 | 0.9 | 2.6 | 1.7 | 1.4 | 1.7 |
| 2623 | 25810 | 1.1 | 3.8 | 1.0 | 2.9 | 1.5 | 1.3 | 1.5 |
| 2624 | 12039 | 1.0 | 1.0 | 3.6 | 1.0 | 1.0 | 1.0 | 1.0 |
| 2625 | 25499 | 1.0 | 1.0 | 1.0 | 1.0 | 1.0 | 1.0 | 1.0 |
| 2626 | 25557 | 1.0 | 1.8 | 1.0 | 0.8 | 1.0 | 1.0 | 1.0 |
| 2627 | 9917 | 2.5 | 2.7 | 0.7 | 1.6 | 3.8 | 1.2 | 3.6 |
| 2628 | 19505 | 0.4 | 1.7 | 0.7 | 3.8 | 1.7 | 1.6 | 1.4 |
| 2629 | 17491 | 0.6 | 1.7 | 0.7 | 2.5 | 1.6 | 1.3 | 1.4 |
| 2630 | 10683 | 0.4 | 1.9 | 0.6 | 3.6 | 1.7 | 1.4 | 1.1 |
| 2631 | 1936 | 0.2 | 0.6 | 0.6 | 3.1 | 1.0 | 1.8 | 1.0 |
| 2632 | 828 | 0.1 | 1.0 | 0.5 | 3.0 | 1.0 | 1.7 | 1.2 |
| 2633 | 9558 | 1.0 | 1.0 | 1.0 | 1.0 | 1.0 | 1.0 | 1.0 |
| 2634 | 20164 | 2.0 | 1.1 | 2.5 | 1.7 | 1.0 | 1.0 | 0.8 |
| 2635 | 969 | 1.0 | 1.0 | 2.7 | 1.0 | 1.0 | 1.5 | 0.7 |
| 2636 | 9910 | 0.4 | 1.0 | 0.8 | 3.2 | 1.9 | 1.3 | 1.4 |
| 2637 | 2427 | 1.3 | 0.7 | 3.0 | 2.8 | 0.8 | 1.9 | 1.0 |
| 2638 | 19990 | 1.0 | 7.9 | 2.8 | 34.7 | 1.0 | 1.0 | 1.0 |
| 2639 | 20605 | 3.0 | 1.2 | 2.1 | 1.0 | 1.3 | 1.2 | 0.8 |
| 2640 | 10650 | 0.5 | 1.7 | 0.5 | 2.9 | 2.8 | 0.6 | 3.4 |
| 2641 | 25963 | 2.6 | 3.5 | 0.7 | 1.0 | 3.3 | 1.0 | 2.3 |
| 2642 | 25562 | 3.2 | 5.9 | 0.7 | 1.0 | 4.2 | 1.0 | 4.8 |
| 2643 | 9377 | 0.6 | 1.0 | 1.0 | 2.1 | 1.9 | 2.0 | 1.6 |
| 2644 | 17618 | 1.0 | 0.7 | 2.3 | 3.2 | 0.8 | 0.7 | 0.8 |
| 2645 | 12136 | 1.0 | 1.0 | 3.8 | 1.0 | 1.0 | 1.0 | 1.0 |
| 2646 | 17373 | 1.0 | 0.4 | 6.1 | 2.4 | 1.0 | 1.0 | 1.0 |
| 2647 | 18577 | 1.0 | 0.3 | 0.3 | 4.6 | 1.0 | 1.0 | 1.0 |
| 2648 | 3143 | 1.7 | 1.3 | 2.6 | 2.3 | 0.7 | 1.0 | 0.5 |
| 2649 | 17737 | 6.1 | 0.7 | 3.4 | 0.3 | 0.5 | 1.3 | 0.4 |
| 2650 | 20029 | 1.0 | 0.6 | 2.3 | 1.0 | 1.0 | 1.0 | 0.5 |
| 2651 | 18537 | 1.0 | 1.3 | 2.1 | 2.6 | 1.3 | 1.0 | 1.2 |
| 2652 | 10090 | 1.0 | 1.7 | 2.1 | 2.8 | 1.5 | 1.0 | 1.2 |
| 2653 | 12102 | 1.0 | 1.0 | 3.9 | 1.0 | 1.0 | 1.0 | 1.0 |
| 2654 | 8487 | 4.7 | 2.4 | 1.0 | 1.0 | 2.3 | 1.1 | 2.2 |
| 2655 | 9252 | 1.3 | 3.8 | 0.3 | 1.0 | 2.1 | 1.6 | 2.5 |
| 2656 | 25605 | 1.0 | 1.0 | 1.0 | 1.0 | 0.5 | 0.5 | 1.0 |
| 2657 | 29652 | 1.0 | 2.9 | 1.5 | 2.9 | 2.0 | 1.5 | 2.1 |
| 2658 | 10858 | 1.0 | 0.8 | 2.0 | 1.0 | 1.0 | 1.0 | 0.7 |
| 2659 | 1261 | 0.2 | 0.6 | 1.0 | 2.9 | 0.8 | 0.8 | 0.9 |
| 2660 | 4156 | 12.4 | 0.8 | 3.1 | 0.2 | 0.6 | 1.0 | 0.3 |
| 2661 | 3452 | 10.6 | 0.8 | 2.8 | 0.3 | 0.6 | 1.0 | 0.4 |
| 2662 | 2748 | 10.8 | 0.8 | 3.1 | 0.2 | 0.5 | 1.0 | 0.4 |
| 2663 | 2046 | 9.2 | 1.0 | 2.4 | 0.3 | 0.5 | 1.2 | 0.4 |
| 2664 | 2044 | 11.7 | 0.8 | 2.8 | 0.2 | 0.6 | 1.4 | 0.4 |
| 2665 | 1342 | 10.5 | 0.9 | 2.8 | 0.2 | 0.5 | 1.2 | 0.4 |
| 2666 | 1326 | 12.2 | 1.0 | 2.7 | 0.2 | 0.5 | 1.0 | 0.4 |
| 2667 | 9981 | 0.2 | 1.5 | 0.3 | 2.5 | 1.2 | 1.6 | 0.5 |
| 2668 | 27917 | 1.9 | 2.5 | 0.5 | 1.0 | 2.1 | 1.4 | 2.3 |
| 2669 | 8488 | 4.3 | 2.4 | 1.0 | 0.5 | 2.9 | 0.9 | 3.6 |
| 2670 | 22793 | 1.9 | 2.6 | 0.5 | 1.0 | 2.2 | 1.8 | 2.1 |
| 2671 | 26883 | 2.4 | 3.7 | 0.5 | 1.0 | 2.5 | 2.0 | 2.0 |
| 2672 | 11540 | 0.7 | 1.0 | 1.3 | 2.8 | 0.8 | 1.0 | 0.5 |
| 2673 | 17707 | 1.0 | 0.6 | 2.6 | 1.0 | 1.0 | 1.0 | 1.0 |
| 2674 | 20649 | 2.3 | 2.6 | 0.5 | 0.4 | 3.0 | 1.0 | 3.1 |
| 2675 | 24004 | 1.0 | 2.5 | 1.8 | 3.6 | 2.3 | 1.0 | 2.8 |
| 2676 | 11836 | 1.2 | 5.0 | 0.9 | 3.7 | 1.3 | 1.0 | 0.8 |
| 2677 | 24932 | 1.8 | 0.8 | 6.5 | 2.1 | 0.8 | 1.0 | 0.5 |
| 2678 | 19143 | 0.6 | 1.6 | 0.7 | 2.0 | 1.7 | 1.2 | 1.4 |
| 2679 | 26257 | 1.9 | 1.3 | 2.2 | 1.7 | 0.7 | 1.0 | 0.6 |
| 2680 | 21239 | 9.4 | 9.2 | 0.5 | 0.4 | 2.4 | 1.0 | 2.7 |
| 2681 | 16959 | 0.6 | 2.1 | 0.8 | 2.1 | 3.0 | 1.4 | 2.5 |
| 2682 | 2568 | 0.7 | 1.9 | 0.7 | 2.2 | 3.0 | 1.3 | 2.4 |
| 2683 | 25936 | 1.0 | 2.4 | 0.7 | 2.0 | 3.1 | 1.5 | 2.4 |
| 2684 | 23041 | 0.7 | 1.0 | 2.1 | 2.6 | 1.0 | 1.4 | 1.0 |
| 2685 | 9206 | 5.7 | 1.8 | 4.6 | 1.0 | 1.0 | 0.7 | 0.9 |
| 2686 | 25105 | 1.6 | 1.3 | 2.1 | 1.0 | 1.0 | 0.7 | 0.8 |
| 2687 | 24779 | 1.0 | 1.0 | 1.0 | 2.9 | 2.3 | 1.4 | 1.2 |
| 2688 | 22451 | 1.0 | 0.2 | 2.1 | 1.0 | 1.4 | 0.6 | 1.0 |
| 2689 | 22291 | 0.2 | 0.2 | 2.1 | 1.0 | 0.6 | 0.6 | 0.5 |
| 2690 | 21143 | 1.0 | 7.2 | 0.7 | 2.0 | 2.6 | 1.1 | 2.4 |
| 2691 | 24751 | 1.7 | 5.0 | 0.7 | 2.1 | 2.4 | 1.3 | 4.0 |
| 2692 | 24294 | 1.7 | 3.9 | 0.8 | 2.4 | 2.6 | 1.1 | 3.9 |
| 2693 | 24006 | 1.7 | 6.3 | 0.8 | 2.5 | 2.4 | 1.0 | 4.0 |
| 2694 | 25678 | 1.0 | 1.0 | 1.0 | 1.0 | 1.0 | 1.0 | 1.0 |
| 2695 | 22027 | 8.7 | 7.0 | 0.4 | 0.2 | 5.1 | 2.0 | 5.2 |
| 2696 | 29495 | 1.0 | 1.0 | 1.0 | 1.0 | 1.0 | 1.0 | 1.0 |
| 2697 | 24577 | 6.8 | 3.2 | 0.8 | 0.4 | 3.8 | 1.3 | 2.1 |
| 2698 | 23527 | 0.3 | 2.1 | 1.6 | 6.4 | 2.7 | 2.1 | 3.4 |
| 2699 | 17090 | 1.0 | 4.9 | 0.7 | 2.3 | 3.1 | 2.3 | 3.6 |
| 2700 | 25137 | 1.0 | 1.0 | 0.4 | 3.8 | 1.0 | 2.5 | 4.1 |
| 2701 | 23772 | 0.6 | 6.8 | 0.5 | 3.7 | 12.6 | 3.6 | 9.2 |
| 2702 | 1659 | 1.0 | 7.5 | 0.3 | 3.2 | 17.8 | 4.1 | 20.3 |
| 2703 | 8497 | 1.3 | 0.4 | 2.2 | 0.5 | 1.0 | 1.0 | 1.0 |
| 2704 | 25272 | 8.0 | 6.0 | 1.0 | 0.6 | 2.2 | 1.0 | 2.9 |
| 2705 | 21216 | 1.0 | 1.0 | 0.6 | 2.0 | 2.5 | 2.0 | 2.2 |
| 2706 | 11939 | 1.0 | 1.0 | 1.0 | 1.0 | 1.0 | 1.0 | 1.0 |
| 2707 | 9191 | 1.8 | 2.2 | 1.3 | 1.1 | 2.2 | 1.0 | 2.0 |
| 2708 | 3429 | 0.7 | 3.4 | 0.8 | 3.5 | 3.0 | 1.5 | 3.7 |
| 2709 | 2725 | 0.8 | 3.4 | 1.0 | 3.4 | 2.6 | 1.6 | 4.1 |
| 2710 | 19923 | 1.0 | 1.1 | 2.9 | 1.0 | 1.7 | 1.4 | 1.2 |
| 2711 | 20457 | 1.0 | 2.0 | 1.0 | 2.3 | 2.9 | 1.0 | 2.3 |
| 2712 | 24773 | 0.2 | 1.0 | 0.8 | 2.0 | 1.6 | 1.0 | 1.0 |
| 2713 | 24119 | 0.2 | 4.6 | 1.1 | 15.9 | 2.7 | 1.0 | 3.4 |
| 2714 | 3908 | 0.3 | 0.5 | 1.1 | 2.3 | 1.7 | 1.0 | 1.0 |
| 2715 | 8560 | 1.9 | 0.7 | 2.2 | 0.5 | 1.0 | 1.0 | 0.7 |
| 2716 | 24588 | 0.3 | 0.5 | 1.0 | 2.0 | 1.0 | 1.0 | 1.4 |
| 2717 | 4047 | 0.5 | 1.2 | 1.0 | 2.1 | 1.9 | 1.0 | 1.8 |
| 2718 | 28344 | 0.8 | 1.0 | 1.0 | 2.0 | 1.7 | 1.5 | 2.7 |
| 2719 | 27561 | 1.0 | 1.0 | 1.0 | 2.4 | 1.2 | 1.2 | 1.3 |
| 2720 | 3272 | 0.6 | 0.8 | 1.0 | 2.1 | 1.3 | 1.6 | 1.0 |
| 2721 | 26735 | 1.0 | 1.0 | 1.0 | 1.0 | 1.0 | 1.0 | 1.0 |
| 2722 | 24900 | 0.3 | 0.8 | 2.9 | 5.7 | 2.2 | 1.1 | 3.0 |
| 2723 | 9472 | 2.2 | 5.0 | 1.0 | 2.0 | 1.5 | 0.8 | 1.7 |
| 2724 | 9979 | 1.3 | 3.3 | 1.5 | 3.9 | 3.4 | 1.4 | 2.5 |
| 2725 | 21996 | 1.0 | 4.7 | 1.0 | 3.4 | 2.5 | 1.0 | 2.4 |
| 2726 | 22312 | 1.2 | 4.4 | 1.2 | 3.3 | 2.2 | 1.1 | 2.2 |
| 2727 | 11327 | 1.4 | 6.2 | 1.4 | 2.7 | 2.7 | 1.0 | 2.2 |
| 2728 | 18240 | 2.0 | 4.5 | 1.0 | 2.2 | 2.1 | 1.0 | 2.7 |
| 2729 | 21922 | 0.7 | 1.4 | 0.8 | 2.1 | 1.8 | 1.0 | 1.3 |
| 2730 | 22290 | 0.7 | 1.6 | 0.9 | 2.1 | 1.5 | 1.2 | 1.3 |
| 2731 | 10390 | 1.3 | 1.0 | 2.6 | 1.6 | 0.8 | 1.0 | 0.6 |
| 2732 | 2212 | 1.9 | 1.0 | 2.8 | 1.0 | 0.6 | 1.6 | 0.8 |
| 2733 | 20213 | 0.4 | 1.0 | 1.0 | 1.0 | 1.0 | 1.0 | 1.0 |
| 2734 | 24955 | 0.9 | 2.9 | 1.0 | 3.3 | 0.8 | 0.8 | 1.0 |
| 2735 | 19574 | 1.0 | 0.6 | 3.7 | 3.1 | 1.5 | 2.6 | 1.4 |
| 2736 | 19969 | 1.0 | 1.0 | 1.0 | 3.1 | 1.0 | 1.0 | 1.0 |
| 2737 | 8570 | 0.4 | 1.2 | 1.0 | 2.6 | 1.2 | 0.8 | 0.6 |
| 2738 | 18519 | 3.5 | 2.9 | 2.6 | 1.8 | 1.8 | 1.0 | 2.0 |
| 2739 | 9616 | 0.6 | 2.0 | 1.0 | 2.3 | 1.2 | 1.2 | 1.0 |
| 2740 | 22334 | 0.2 | 0.7 | 2.9 | 8.5 | 1.7 | 1.1 | 3.4 |
| 2741 | 17459 | 0.1 | 0.7 | 2.7 | 18.8 | 4.0 | 1.3 | 4.6 |
| 2742 | 25193 | 1.0 | 0.8 | 1.0 | 2.3 | 1.0 | 1.3 | 1.0 |
| 2743 | 25191 | 0.2 | 0.8 | 0.7 | 2.5 | 1.3 | 1.5 | 1.2 |
| 2744 | 9448 | 0.6 | 1.0 | 1.0 | 2.3 | 0.8 | 0.8 | 0.5 |
| 2745 | 25224 | 5.6 | 14.4 | 1.0 | 2.3 | 6.0 | 1.5 | 9.6 |
| 2746 | 20218 | 6.1 | 12.3 | 0.7 | 1.7 | 5.6 | 1.6 | 9.0 |
| 2747 | 3089 | 7.0 | 15.7 | 0.7 | 2.3 | 7.3 | 1.8 | 8.0 |
| 2748 | 23985 | 5.8 | 17.2 | 0.9 | 2.1 | 6.8 | 1.8 | 8.1 |
| 2749 | 19953 | 6.2 | 13.5 | 0.8 | 1.8 | 6.4 | 1.7 | 10.4 |
| 2750 | 11506 | 4.1 | 13.3 | 1.0 | 1.4 | 4.4 | 1.6 | 7.2 |
| 2751 | 22362 | 1.0 | 0.7 | 4.1 | 2.1 | 1.2 | 1.8 | 1.0 |
| 2752 | 25516 | 0.7 | 10.1 | 0.4 | 4.0 | 14.7 | 4.7 | 8.1 |
| 2753 | 25757 | 0.6 | 0.4 | 2.4 | 1.0 | 1.0 | 1.3 | 0.9 |
| 2754 | 24814 | 0.5 | 2.8 | 0.3 | 1.0 | 3.5 | 1.4 | 4.4 |
| 2755 | 21994 | 0.5 | 3.2 | 0.3 | 1.0 | 3.6 | 1.0 | 4.3 |
| 2756 | 27117 | 1.0 | 2.8 | 0.3 | 1.0 | 3.9 | 1.0 | 4.9 |
| 2757 | 24681 | 1.8 | 2.6 | 0.6 | 0.5 | 3.2 | 1.5 | 3.0 |
| 2758 | 22745 | 0.3 | 2.4 | 1.4 | 8.1 | 2.8 | 2.3 | 3.5 |
| 2759 | 24233 | 1.9 | 3.9 | 1.3 | 2.3 | 1.3 | 0.8 | 2.2 |
| 2760 | 2001 | 1.0 | 1.0 | 1.5 | 2.1 | 1.0 | 1.0 | 1.0 |
| 2761 | 21179 | 2.0 | 7.9 | 0.7 | 1.9 | 2.1 | 1.0 | 4.3 |
| 2762 | 17147 | 1.3 | 4.3 | 0.7 | 1.7 | 2.4 | 1.2 | 3.9 |
| 2763 | 8700 | 1.5 | 7.3 | 0.7 | 1.6 | 3.1 | 1.0 | 2.7 |
| 2764 | 21214 | 0.3 | 5.4 | 1.2 | 15.5 | 3.1 | 1.0 | 3.6 |
| 2765 | 26422 | 0.4 | 3.7 | 1.0 | 12.7 | 3.9 | 1.0 | 3.3 |
| 2766 | 22837 | 0.7 | 1.0 | 2.1 | 2.4 | 1.2 | 1.5 | 0.9 |
| 2767 | 21965 | 1.0 | 1.0 | 1.0 | 2.2 | 2.4 | 1.0 | 1.0 |
| 2768 | 25541 | 4.5 | 2.7 | 2.7 | 0.8 | 1.0 | 1.3 | 0.8 |
| 2769 | 18302 | 1.1 | 0.9 | 2.1 | 1.0 | 1.0 | 1.0 | 1.0 |
| 2770 | 24049 | 1.0 | 2.6 | 1.5 | 2.5 | 2.3 | 1.4 | 2.4 |
| 2771 | 26326 | 9.2 | 1.5 | 3.2 | 0.7 | 0.7 | 0.9 | 1.0 |
| 2772 | 2254 | 1.6 | 3.3 | 1.0 | 2.8 | 2.0 | 1.1 | 3.1 |
| 2773 | 10296 | 0.9 | 1.7 | 2.9 | 5.0 | 2.1 | 1.0 | 1.3 |
| 2774 | 20044 | 1.0 | 0.8 | 2.0 | 1.0 | 1.0 | 1.0 | 1.0 |
| 2775 | 28806 | 2.8 | 1.1 | 2.1 | 1.0 | 0.9 | 1.2 | 0.8 |
| 2776 | 17566 | 7.5 | 4.2 | 0.7 | 0.5 | 2.5 | 1.0 | 2.5 |
| 2777 | 19005 | 1.0 | 0.8 | 1.0 | 2.1 | 1.0 | 1.0 | 1.0 |
| 2778 | 3567 | 1.0 | 1.0 | 1.0 | 1.0 | 1.0 | 1.0 | 1.0 |
| 2779 | 21983 | 0.1 | 1.0 | 3.1 | 25.6 | 3.4 | 1.0 | 4.7 |
| 2780 | 458 | 1.0 | 2.1 | 0.6 | 1.0 | 1.6 | 2.1 | 2.3 |
| 2781 | 22331 | 0.6 | 2.1 | 0.4 | 1.0 | 2.2 | 1.0 | 2.8 |
| 2782 | 21411 | 0.7 | 1.5 | 1.0 | 2.5 | 1.0 | 1.0 | 1.0 |
| 2783 | 22972 | 1.0 | 2.2 | 0.5 | 1.0 | 2.2 | 1.4 | 2.4 |
| 2784 | 24533 | 1.0 | 2.5 | 1.0 | 2.0 | 2.0 | 2.7 | 3.2 |
| 2785 | 24853 | 1.0 | 2.6 | 2.1 | 2.1 | 2.4 | 1.3 | 2.1 |
| 2786 | 23753 | 0.7 | 1.5 | 1.3 | 2.1 | 2.0 | 1.7 | 2.3 |
| 2787 | 21502 | 0.3 | 4.8 | 1.0 | 10.8 | 2.6 | 1.0 | 2.9 |
| 2788 | 18180 | 0.3 | 0.8 | 0.8 | 2.4 | 0.9 | 1.4 | 0.7 |
| 2789 | 23918 | 0.7 | 2.3 | 0.4 | 1.0 | 2.4 | 1.2 | 3.5 |
| 2790 | 24144 | 1.0 | 1.0 | 1.0 | 1.0 | 1.0 | 1.6 | 1.0 |
| 2791 | 19996 | 1.5 | 2.5 | 0.7 | 1.2 | 2.1 | 0.9 | 2.5 |
| 2792 | 11528 | 1.0 | 1.0 | 1.0 | 2.1 | 1.0 | 1.0 | 1.0 |
| 2793 | 20506 | 2.2 | 0.9 | 3.2 | 0.8 | 1.3 | 1.6 | 1.0 |
| 2794 | 23833 | 1.0 | 0.5 | 2.1 | 1.0 | 1.0 | 1.0 | 0.7 |
| 2795 | 20042 | 3.8 | 1.6 | 2.3 | 0.8 | 1.0 | 1.0 | 1.0 |
| 2796 | 24977 | 1.0 | 1.0 | 2.1 | 1.0 | 2.3 | 1.4 | 1.4 |
| 2797 | 11646 | 1.0 | 1.0 | 0.8 | 1000.0 | 1.0 | 1.0 | 1.7 |
| 2798 | 24872 | 1.0 | 1.4 | 0.8 | 2.5 | 1.4 | 1.2 | 1.3 |
| 2799 | 10577 | 1.0 | 1.0 | 1.0 | 1.0 | 1.0 | 1.0 | 1.0 |
| 2800 | 21710 | 1.0 | 0.2 | 2.2 | 0.7 | 1.6 | 1.0 | 1.2 |
| 2801 | 18556 | 0.0 | 1.0 | 1.0 | 1.0 | 1.0 | 1.0 | 1.0 |
| 2802 | 29433 | 1.0 | 0.5 | 1.0 | 2.1 | 1.0 | 1.0 | 1.0 |
| 2803 | 29273 | 1.0 | 2.2 | 1.0 | 2.2 | 1.0 | 1.3 | 1.0 |
| 2804 | 28763 | 1.6 | 2.7 | 1.0 | 2.2 | 1.8 | 1.3 | 2.5 |
| 2805 | 27887 | 0.1 | 0.2 | 1.1 | 2.7 | 0.8 | 1.0 | 0.6 |
| 2806 | 27450 | 2.6 | 11.3 | 0.2 | 1.0 | 4.4 | 3.3 | 7.3 |
| 2807 | 27255 | 0.6 | 1.6 | 0.8 | 2.3 | 1.7 | 1.4 | 1.5 |
| 2808 | 27226 | 1.0 | 1.3 | 1.0 | 2.6 | 1.8 | 1.0 | 1.0 |
| 2809 | 26550 | 4.2 | 17.9 | 0.2 | 1.0 | 6.9 | 2.9 | 9.2 |
| 2810 | 26508 | 1.0 | 1.4 | 1.0 | 1.0 | 1.0 | 1.0 | 1.0 |
| 2811 | 26483 | 1.2 | 2.2 | 0.6 | 1.0 | 2.1 | 1.4 | 2.7 |
| 2812 | 26334 | 1.0 | 0.5 | 3.0 | 1.0 | 0.6 | 0.8 | 0.5 |
| 2813 | 26027 | 1.0 | 1.0 | 1.0 | 1.5 | 1.0 | 1.0 | 1.0 |
| 2814 | 25977 | 1.0 | 1.0 | 1.0 | 1.0 | 1.0 | 1.0 | 1.0 |
| 2815 | 25965 | 1.0 | 1.0 | 1.0 | 1.0 | 1.0 | 1.0 | 1.0 |
| 2816 | 25844 | 1.0 | 1.0 | 1.0 | 1.0 | 1.0 | 1.0 | 1.0 |
| 2817 | 25834 | 1000.0 | 1.0 | 1.0 | 1.0. | 0.4 | 1.0 | 1.0 |
| 2818 | 25816 | 1.0 | 1.0 | 1.0 | 1.0 | 1.0 | 1.0 | 1.0 |
| 2819 | 25746 | 1.0 | 1.0 | 1.0 | 1.0 | 1.0 | 1.0 | 1.0 |
| 2820 | 25742 | 1.0 | 1.0 | 1.0 | 1.0 | 0.5 | 1.0 | 1.0 |
| 2821 | 25741 | 1.0 | 1.0 | 1.0 | 1.0 | 1.0 | 1.0 | 1.0 |
| 2822 | 25712 | 1.0 | 1.0 | 1.0 | 1.0 | 1.0 | 1.0 | 1.0 |
| 2823 | 25642 | 1.0 | 1.0 | 1.0 | 1.0 | 1.0 | 1.0 | 1.0 |
| 2824 | 25621 | 0.6 | 0.8 | 2.1 | 2.0 | 1.3 | 1.2 | 1.0 |
| 2825 | 25614 | 1.0 | 1.0 | 1.0 | 1.0 | 1.0 | 1.0 | 1.0 |
| 2826 | 25603 | 1.0 | 1.0 | 1.0 | 1.0 | 1.0 | 1.0 | 1.0 |
| 2827 | 25556 | 1.8 | 0.7 | 1.0 | 0.8 | 1.0 | 1.0 | 1.0 |
| 2828 | 25555 | 1.0 | 2.9 | 1.0 | 1.0 | 1.5 | 1.3 | 1.0 |
| 2829 | 25540 | 1.0 | 1.0 | 1.0 | 1.2 | 1.0 | 1.0 | 1.0 |
| 2830 | 23576 | 0.0 | 1.0 | 1.0 | 1.0 | 1.0 | 1.5 | 1.4 |
| 2831 | 22566 | 1.0 | 1.0 | 1.0 | 1.0 | 1.0 | 1.3 | 1.0 |
| 2832 | 9036 | 1.9 | 3.8 | 0.6 | 1.8 | 2.6 | 1.3 | 3.1 |
| 2833 | 4164 | 1.0 | 1.0 | 2.2 | 1.0 | 1.5 | 1.0 | 0.9 |
| 2834 | 4146 | 0.8 | 3.7 | 0.9 | 4.4 | 3.3 | 1.0 | 4.3 |
| 2835 | 4091 | 1.0 | 1.0 | 1.0 | 2.5 | 1.7 | 1.0 | 0.9 |
| 2836 | 4072 | 1.0 | 1.0 | 2.1 | 1.0 | 5.9 | 2.0 | 5.1 |
| 2837 | 4022 | 3.5 | 4.5 | 0.8 | 1.0 | 3.0 | 1.0 | 3.2 |
| 2838 | 3965 | 1.9 | 5.6 | 0.4 | 1.0 | 5.5 | 2.3 | 4.1 |
| 2839 | 3954 | 1.0 | 2.7 | 1.3 | 3.6 | 2.8 | 1.9 | 2.6 |
| 2840 | 3872 | 1.0 | 3.2 | 1.3 | 2.8 | 4.0 | 1.8 | 3.9 |
| 2841 | 3869 | 1.0 | 1.0 | 5.8 | 3.8 | 1.0 | 0.7 | 0.6 |
| 2842 | 3838 | 1.0 | 1.6 | 1.2 | 2.0 | 2.6 | 1.7 | 1.9 |
| 2843 | 3806 | 0.6 | 2.6 | 0.9 | 3.7 | 3.0 | 1.0 | 3.4 |
| 2844 | 3798 | 10.2 | 0.9 | 2.9 | 0.3 | 0.7 | 1.0 | 0.4 |
| 2845 | 3792 | 1.0 | 1.0 | 1.0 | 2.7 | 2.9 | 1.0 | 2.5 |
| 2846 | 3788 | 1.7 | 5.4 | 1.2 | 3.4 | 2.5 | 1.3 | 2.7 |
| 2847 | 3767 | 1.1 | 2.2 | 0.7 | 1.7 | 2.5 | 1.0 | 2.5 |
| 2848 | 3458 | 1.2 | 3.3 | 0.7 | 2.0 | 2.6 | 1.0 | 2.2 |
| 2849 | 3251 | 0.4 | 0.5 | 1.4 | 2.7 | 1.4 | 1.0 | 1.0 |
| 2850 | 3194 | 1.0 | 2.3 | 1.3 | 3.1 | 2.2 | 1.3 | 3.2 |
| 2851 | 3102 | 0.5 | 3.2 | 1.0 | 4.8 | 2.9 | 1.0 | 2.3 |
| 2852 | 3094 | 11.5 | 0.8 | 2.7 | 0.3 | 0.6 | 1.0 | 0.4 |
| 2853 | 2671 | 0.8 | 1.6 | 1.0 | 2.2 | 2.8 | 1.9 | 1.0 |
| 2854 | 2634 | 0.9 | 2.8 | 0.4 | 1.0 | 3.8 | 1.7 | 4.0 |
| 2855 | 2567 | 4.6 | 3.3 | 0.8 | 0.6 | 2.6 | 1.0 | 3.3 |
| 2856 | 2317 | 1.0 | 1.0 | 2.4 | 1.0 | 1.0 | 1.0 | 1.1 |
| 2857 | 1958 | 0.3 | 0.6 | 1.0 | 2.6 | 0.9 | 0.8 | 0.9 |
| 2858 | 1680 | 0.3 | 4.7 | 1.0 | 17.7 | 2.7 | 1.0 | 4.5 |
| 2859 | 1625 | 2.2 | 7.8 | 0.5 | 1.8 | 3.1 | 1.7 | 3.4 |
| 2860 | 1445 | 0.2 | 0.6 | 1.0 | 2.7 | 0.8 | 0.9 | 0.9 |
| 2861 | 1320 | 4.9 | 1.0 | 2.4 | 0.4 | 0.6 | 1.2 | 0.5 |
| 2862 | 974 | 0.6 | 3.1 | 1.1 | 3.2 | 2.4 | 1.4 | 3.7 |
| 2863 | 726 | 1.0 | 1.0 | 1.0 | 1.0 | 1.0 | 1.0 | 1.0 |
| 2864 | 718 | 0.4 | 2.6 | 0.5 | 2.7 | 1.6 | 1.0 | 1.0 |
| 2865 | 703 | 1.0 | 4.1 | 1.0 | 2.4 | 1.6 | 1.0 | 1.7 |
| 2866 | 652 | 2.8 | 4.4 | 1.6 | 2.3 | 1.0 | 1.6 | 1.0 |
| 2867 | 630 | 6.9 | 1.0 | 2.2 | 0.3 | 0.6 | 1.0 | 0.5 |
| 2868 | 593 | 1.0 | 4.3 | 1.0 | 2.3 | 1.0 | 1.0 | 1.0 |
| 2869 | 532 | 1.3 | 4.7 | 1.0 | 2.4 | 2.6 | 2.2 | 4.0 |
| 2870 | 272 | 0.7 | 2.7 | 0.9 | 3.1 | 2.4 | 1.3 | 4.3 |
| 2871 | 256 | 0.6 | 3.2 | 0.5 | 1.9 | 2.8 | 1.0 | 3.4 |
| 2872 | 57 | 0.5 | 1.4 | 1.0 | 2.3 | 0.9 | 1.0 | 0.7 |

[0534] TABLE 27

| SEQ ID NO | SPOT ID |
|---|---|
| 2506 | 10594 |
| 2507 | 21851 |
| 2508 | 20990 |
| 2509 | 18641 |
| 2510 | 19037 |
| 2511 | 398 |
| 2512 | 18773 |
| 2513 | 3583 |
| 2514 | 3418 |
| 2515 | 145306 |
| 2516 | 3418 |
| 2517 | 3418 |
| 2518 | 18985 |
| 2519 | 17229 |
| 2520 | 25930 |
| 2521 | 25930 |
| 2522 | 20701 |
| 2523 | 20346 |
| 2524 | 20346 |
| 2525 | 21247 |
| 2526 | 21247 |
| 2527 | 23062 |
| 2528 | 25666 |
| 2529 | 25666 |
| 2530 | 19001 |
| 2531 | 10897 |
| 2532 | 10897 |
| 2533 | 10897 |
| 2534 | 1960 |
| 2535 | 146262 |
| 2536 | 26381 |
| 2537 | 26381 |
| 2538 | 26719 |
| 2539 | 26719 |
| 2540 | 27152 |
| 2541 | 10926 |
| 2542 | 28980 |
| 2543 | 1236 |
| 2544 | 29350 |
| 2545 | 29350 |
| 2546 | 26242 |
| 2547 | 4098 |
| 2548 | 145253 |
| 2549 | 4098 |
| 2550 | 17432 |
| 2551 | 17432 |
| 2552 | 1785 |
| 2553 | 1785 |
| 2554 | 1785 |
| 2555 | 28856 |
| 2556 | 28856 |
| 2557 | 18791 |
| 2558 | 18791 |
| 2559 | 22950 |
| 2560 | 22950 |
| 2561 | 1882 |
| 2562 | 23886 |
| 2563 | 24995 |
| 2564 | 24995 |
| 2565 | 24477 |
| 2566 | 21681 |
| 2567 | 21681 |
| 2568 | 9557 |
| 2569 | 9557 |
| 2570 | 22033 |
| 2571 | 873 |
| 2572 | 17144 |
| 2573 | 26970 |
| 2574 | 26970 |
| 2575 | 21402 |
| 2576 | 27074 |
| 2577 | 27074 |
| 2578 | 10963 |
| 2579 | 10963 |
| 2580 | 29525 |
| 2581 | 29525 |
| 2582 | 25514 |
| 2583 | 25514 |
| 2584 | 26612 |
| 2585 | 26612 |
| 2586 | 24600 |
| 2587 | 9741 |
| 2588 | 9741 |
| 2589 | 9741 |
| 2590 | 23689 |
| 2591 | 23689 |
| 2592 | 22352 |
| 2593 | 23806 |
| 2594 | 12285 |
| 2595 | 27638 |
| 2596 | 27638 |
| 2597 | 9663 |
| 2598 | 9663 |
| 2599 | 26850 |
| 2600 | 10204 |
| 2601 | 10204 |
| 2602 | 10204 |
| 2603 | 25922 |
| 2604 | 25922 |
| 2605 | 26347 |
| 2606 | 26347 |
| 2607 | 20361 |
| 2608 | 20361 |
| 2609 | 28672 |
| 2610 | 28672 |
| 2611 | 25520 |
| 2612 | 25520 |
| 2613 | 1723 |
| 2614 | 1723 |
| 2615 | 28863 |
| 2616 | 25526 |
| 2617 | 25526 |
| 2618 | 27936 |
| 2619 | 27936 |
| 2620 | 26851 |
| 2621 | 25107 |
| 2622 | 25107 |
| 2623 | 25107 |
| 2624 | 24912 |
| 2625 | 24912 |
| 2626 | 25169 |
| 2627 | 25600 |
| 2628 | 25600 |
| 2629 | 28706 |
| 2630 | 28706 |
| 2631 | 26377 |
| 2632 | 26377 |
| 2633 | 19460 |
| 2634 | 25243 |
| 2635 | 20018 |
| 2636 | 20018 |
| 2637 | 918 |
| 2638 | 25027 |
| 2639 | 29089 |
| 2640 | 29089 |
| 2641 | 9141 |
| 2642 | 9141 |
| 2643 | 9141 |
| 2644 | 12005 |
| 2645 | 12148 |
| 2646 | 12148 |
| 2647 | 17394 |
| 2648 | 27017 |
| 2649 | 27017 |
| 2650 | 25809 |
| 2651 | 8719 |
| 2652 | 8719 |
| 2653 | 21030 |
| 2654 | 21030 |
| 2655 | 11436 |
| 2656 | 11436 |
| 2657 | 10374 |
| 2658 | 10374 |
| 2659 | 25861 |
| 2660 | 25861 |
| 2661 | 3317 |
| 2662 | 3317 |
| 2663 | 8743 |
| 2664 | 26240 |
| 2665 | 26240 |
| 2666 | 28562 |
| 2667 | 16877 |
| 2668 | 25955 |
| 2669 | 26308 |
| 2670 | 26308 |
| 2671 | 4140 |
| 2672 | 3436 |
| 2673 | 25612 |
| 2674 | 25612 |
| 2675 | 12257 |
| 2676 | 12257 |
| 2677 | 9111 |
| 2678 | 9111 |
| 2679 | 17620 |
| 2680 | 26025 |
| 2681 | 26025 |
| 2682 | 19271 |
| 2683 | 4151 |
| 2684 | 4151 |
| 2685 | 26569 |
| 2686 | 26569 |
| 2687 | 10344 |
| 2688 | 10344 |
| 2689 | 10344 |
| 2690 | 832 |
| 2691 | 832 |
| 2692 | 12071 |
| 2693 | 12071 |
| 2694 | 12271 |
| 2695 | 11433 |
| 2696 | 20917 |
| 2697 | 25810 |
| 2698 | 12039 |
| 2699 | 12039 |
| 2700 | 25499 |
| 2701 | 25499 |
| 2702 | 25557 |
| 2703 | 25557 |
| 2704 | 9917 |
| 2705 | 19505 |
| 2706 | 17491 |
| 2707 | 10683 |
| 2708 | 10683 |
| 2709 | 1936 |
| 2710 | 828 |
| 2711 | 9558 |
| 2712 | 9558 |
| 2713 | 20164 |
| 2714 | 969 |
| 2715 | 969 |
| 2716 | 9910 |
| 2717 | 2427 |
| 2718 | 19990 |
| 2719 | 20605 |
| 2720 | 20605 |
| 2721 | 10650 |
| 2722 | 10650 |
| 2723 | 25963 |
| 2724 | 25963 |
| 2725 | 25562 |
| 2726 | 25562 |
| 2727 | 3429 |
| 2728 | 2725 |
| 2729 | 19923 |
| 2730 | 20457 |
| 2731 | 20457 |
| 2732 | 24773 |
| 2733 | 24119 |
| 2734 | 3908 |
| 2735 | 3908 |
| 2736 | 8560 |
| 2737 | 8560 |
| 2738 | 9377 |
| 2739 | 9377 |
| 2740 | 17618 |
| 2741 | 12136 |
| 2742 | 17373 |
| 2743 | 18577 |
| 2744 | 18577 |
| 2745 | 3143 |
| 2746 | 17737 |
| 2747 | 17737 |
| 2748 | 20029 |
| 2749 | 20029 |
| 2750 | 18537 |
| 2751 | 18537 |
| 2752 | 12102 |
| 2753 | 12102 |
| 2754 | 8487 |
| 2755 | 9252 |
| 2756 | 9252 |
| 2757 | 25605 |
| 2758 | 25605 |
| 2759 | 29652 |
| 2760 | 10858 |
| 2761 | 1261 |
| 2762 | 4156 |
| 2763 | 4156 |
| 2764 | 3452 |
| 2765 | 3452 |
| 2766 | 2748 |
| 2767 | 2046 |
| 2768 | 2046 |
| 2769 | 2044 |
| 2770 | 2044 |
| 2771 | 1342 |
| 2772 | 1342 |
| 2773 | 1326 |
| 2774 | 1326 |
| 2775 | 9981 |
| 2776 | 9981 |
| 2777 | 27917 |
| 2778 | 8488 |
| 2779 | 22793 |
| 2780 | 22793 |
| 2781 | 26883 |
| 2782 | 26883 |
| 2783 | 11540 |
| 2784 | 17707 |
| 2785 | 20649 |
| 2786 | 20649 |
| 2787 | 24004 |
| 2788 | 24004 |
| 2789 | 11836 |
| 2790 | 11836 |
| 2791 | 11836 |
| 2792 | 24932 |
| 2793 | 19143 |
| 2794 | 19143 |
| 2795 | 26257 |
| 2796 | 26257 |
| 2797 | 21239 |
| 2798 | 21239 |
| 2799 | 16959 |
| 2800 | 2568 |
| 2801 | 25936 |
| 2802 | 25936 |
| 2803 | 23041 |
| 2804 | 9206 |
| 2805 | 25105 |
| 2806 | 25105 |
| 2807 | 24779 |
| 2808 | 22451 |
| 2809 | 22451 |
| 2810 | 22291 |
| 2811 | 22291 |
| 2812 | 21143 |
| 2813 | 24751 |
| 2814 | 24751 |
| 2815 | 24294 |
| 2816 | 24294 |
| 2817 | 24006 |
| 2818 | 24006 |
| 2819 | 25678 |
| 2820 | 25678 |
| 2821 | 22027 |
| 2822 | 29495 |
| 2823 | 29495 |
| 2824 | 24577 |
| 2825 | 24577 |
| 2826 | 24577 |
| 2827 | 23527 |
| 2828 | 17090 |
| 2829 | 25137 |
| 2830 | 23772 |
| 2831 | 1659 |
| 2832 | 8497 |
| 2833 | 25272 |
| 2834 | 21216 |
| 2835 | 21216 |
| 2836 | 21216 |
| 2837 | 11939 |
| 2838 | 11939 |
| 2839 | 11939 |
| 2840 | 9191 |
| 2841 | 3429 |
| 2842 | 24588 |
| 2843 | 4047 |
| 2844 | 28344 |
| 2845 | 28344 |
| 2846 | 27561 |
| 2847 | 3272 |
| 2848 | 26735 |
| 2849 | 26735 |
| 2850 | 24900 |
| 2851 | 24900 |
| 2852 | 9472 |
| 2853 | 9472 |
| 2854 | 9979 |
| 2855 | 21996 |
| 2856 | 22312 |
| 2857 | 11327 |
| 2858 | 18240 |
| 2859 | 18240 |
| 2860 | 21922 |
| 2861 | 21922 |
| 2862 | 22290 |
| 2863 | 10390 |
| 2864 | 10390 |
| 2865 | 2212 |
| 2866 | 20213 |
| 2867 | 20213 |
| 2868 | 24955 |
| 2869 | 19574 |
| 2870 | 19969 |
| 2871 | 8570 |
| 2872 | 18519 |
| 2506 | 9616 |
| 2507 | 9616 |
| 2508 | 17459 |
| 2509 | 17459 |
| 2510 | 25193 |
| 2511 | 25193 |
| 2512 | 25193 |
| 2513 | 25191 |
| 2514 | 22566 |
| 2515 | 4164 |
| 2516 | 4146 |
| 2517 | 4072 |
| 2518 | 4022 |
| 2519 | 3954 |
| 2520 | 3838 |
| 2521 | 3806 |
| 2522 | 3798 |
| 2523 | 3792 |
| 2524 | 3788 |
| 2525 | 3458 |
| 2526 | 3194 |
| 2527 | 3102 |
| 2528 | 25191 |
| 2529 | 25191 |
| 2530 | 9448 |
| 2531 | 9448 |
| 2532 | 25224 |
| 2533 | 20218 |
| 2534 | 3089 |
| 2535 | 3089 |
| 2536 | 19953 |
| 2537 | 19953 |
| 2538 | 22362 |
| 2539 | 25516 |
| 2540 | 25516 |
| 2541 | 25757 |
| 2542 | 24814 |
| 2543 | 21994 |
| 2544 | 27117 |
| 2545 | 22745 |
| 2546 | 24233 |
| 2547 | 2001 |
| 2548 | 2001 |
| 2549 | 2001 |
| 2550 | 17147 |
| 2551 | 21214 |
| 2552 | 21214 |
| 2553 | 21214 |
| 2554 | 26422 |
| 2555 | 21965 |
| 2556 | 25541 |
| 2557 | 25541 |
| 2558 | 18302 |
| 2559 | 18302 |
| 2560 | 24049 |
| 2561 | 24049 |
| 2562 | 26326 |
| 2563 | 26326 |
| 2564 | 2254 |
| 2565 | 162502 |
| 2566 | 10296 |
| 2567 | 20044 |
| 2568 | 28806 |
| 2569 | 17566 |
| 2570 | 17566 |
| 2571 | 19005 |
| 2572 | 3567 |
| 2573 | 159223 |
| 2574 | 3567 |
| 2575 | 3567 |
| 2576 | 458 |
| 2577 | 21411 |
| 2578 | 22972 |
| 2579 | 24853 |
| 2580 | 21502 |
| 2581 | 18180 |
| 2582 | 23918 |
| 2583 | 24144 |
| 2584 | 19996 |
| 2585 | 11528 |
| 2586 | 20506 |
| 2587 | 20506 |
| 2588 | 23833 |
| 2589 | 20042 |
| 2590 | 20042 |
| 2591 | 11646 |
| 2592 | 10577 |
| 2593 | 10577 |
| 2594 | 18556 |
| 2595 | 29433 |
| 2596 | 28763 |
| 2597 | 27450 |
| 2598 | 27450 |
| 2599 | 27255 |
| 2600 | 26550 |
| 2601 | 26550 |
| 2602 | 26508 |
| 2603 | 26334 |
| 2604 | 26334 |
| 2605 | 26027 |
| 2606 | 26027 |
| 2607 | 25977 |
| 2608 | 25977 |
| 2609 | 25965 |
| 2610 | 25965 |
| 2611 | 25844 |
| 2612 | 25844 |
| 2613 | 25834 |
| 2614 | 25816 |
| 2615 | 25746 |
| 2616 | 25712 |
| 2617 | 25621 |
| 2618 | 25621 |
| 2619 | 25614 |
| 2620 | 25614 |
| 2621 | 25603 |
| 2622 | 25603 |
| 2623 | 25556 |
| 2624 | 25556 |
| 2625 | 25555 |
| 2626 | 25555 |
| 2627 | 3094 |
| 2628 | 2567 |
| 2629 | 1958 |
| 2630 | 1680 |
| 2631 | 1445 |
| 2632 | 1320 |
| 2633 | 974 |
| 2634 | 652 |
| 2635 | 630 |
| 2636 | 593 |
| 2637 | 256 |

### Example 41

### Cyclin G Associated Kinase (GAK)

[0535] A gene or product thereof called cyclin G associated kinase, or GAK, was identified as being overexpressed in 3D T4-2 cultures relative to both 3D S1 cultures (ratio: 7.9296) and 2D T4-2 cultures (ratio: 34.6682) (Sample ID RG:1056692:10012:C11, Spot ID 19990). GAK corresponds to Genbank Accession number XM_{—}003450.

### Example 42

### Antisense Regulation of GAK Expression

[0536] Additional functional information on GAK was generated using antisense knockout technology. A number of different oligonucleotides complementary to GAK mRNA were designed (AS) with corresponding controls (RC): GGAATCACCGCTTTGCCATCTTCAA (SEQ ID NO:3005;CHIR159-1AS, gak:P1868AS), AACTTCTACCGTTTCGCCACTAAGG (SEQ ID NO:3006; CHIR159-1RC, gak:P1868RC); GACCGTGTACTGCGTGTCGTGCG (SEQ ID NO:3007; CHIR159-7AS, gak:P0839AS) and GCGTGCTGTGCGTCATGTGCCAG (SEQ ID NO: 3008; CHIR159-7RC, gak:P0839RC), and tested for their ability to suppress expression of GAK in human malignant colorectal carcinoma SW620 cells, human breast cancer MDA231 cells, and human breast cancer T4-2 cells. For each transfection mixture, a carrier molecule, preferably a lipitoid or cholesteroid, was prepared to a working concentration of 0.5 mM in water, sonicated to yield a uniform solution, and filtered through a 0.45 μm PVDF membrane. The antisense or control oligonucleotide was then prepared to a working concentration of 100 μM in sterile Millipore water. The oligonucleotide was further diluted in OptiMEM™ (Gibco/BRL), in a microfuge tube, to 2 μM, or approximately 20 μg oligo/ml of OptiMEM™. In a separate microfuge tube, lipitoid or cholesteroid, typically in the amount of about 1.5-2 nmol lipitoid/μg antisense oligonucleotide, was diluted into the same volume of OptiMEM™ used to dilute the oligonucleotide. The diluted antisense oligonucleotide was immediately added to the diluted lipitoid and mixed by pipetting up and down. Oligonucleotide was added to the cells to a final concentration of 300 nM.

[0537] The level of target mRNA (GAK) in the transfected cells was quantitated in the cancer cell lines using the methods using primers CHIR159_{—}2896 (GCCGTCTTCAGGCAACAACTCCCA; SEQ ID NO: 3009; forward) and CHIR159_{—}3089 (TGCTGGACGAGGCTGTCATCTTGC; SEQ ID NO: 3010; reverse). RNA was extracted as above according to manufacturer's directions.

[0538] Quantitative PCR (qPCR) was performed by first isolating the RNA from the above mentioned tissue/cells using a Qiagen RNeasy mini prep kit. A total of 0.5 micrograms of RNA was used to generate a first strand cDNA using Stratagene MuLV Reverse Transcriptase, using recommended concentrations of buffer, enzyme, and Rnasin. Concentrations and volumes of dNTP, and oligo dT, or random hexamers were lower than recommended to reduce the level of background primer dimerization in the qPCR.

[0539] The cDNA is then used for qPCR to determine the levels of expression of GAK using the GeneAmp 7000 by ABI as recommended by the manufacturer. Primers for actin were also used in order to normalized the values, and eliminate possible variations in cDNA template concentrations, pipetting error, etc.

[0540] For each 20 μl reaction, extracted RNA (generally 0.2-1 μg total) was placed into a sterile 0.5 or 1.5 ml microcentrifuge tube, and water was added to a total volume of 12.5 μl. To each tube was added 7.5 μl of a buffer/enzyme mixture, prepared by mixing (in the order listed) 2.5 μl H₂O, 2.0 μl 10× reaction buffer, 10 μl oligo dT (20 pmol), 1.0 μl dNTP mix (10 mM each), 0.5 μl RNAsin® (20 u) (Ambion, Inc., Hialeah, Fla.), and 0.5 μl MMLV reverse transcriptase (50 u) (Ambion, Inc.). The contents were mixed by pipetting up and down, and the reaction mixture was incubated at 42° C. for 1 hour. The contents of each tube were centrifuged prior to amplification.

[0541] An amplification mixture was prepared by mixing in the following order: 1× PCR buffer II, 3 mM MgCl₂, 140 μM each dNTP, 0.175 pmol each oligo, 1:50,000 dil of_SYBR® Green, 0.25 mg/ml BSA, 1 unit Taq polymerase, and H₂O to 20 μl. (PCR buffer II is available in 10× concentration from Perkin-Elmer, Norwalk, Conn.). In 1× concentration it contains 10 mM Tris pH 8.3 and 50 mM KCl. SYBR® Green (Molecular Probes, Eugene, Oreg.) is a dye which fluoresces when bound to double stranded DNA. As double stranded PCR product is produced during amplification, the fluorescence from SYBR® Green increases. To each 20 μl aliquot of amplification mixture, 2 μl of template RT was added, and amplification was carried out according to standard protocols.

[0542] Table 19 shows that the antisense oligonucleotides described above reduced expression of GAK mRNA as compared to controls in all three cell lines. GAK mRNA reduction ranged from about 50% to about 90%, as compared to cells transfected with reverse (i.e. sense) control oligonucleotides.

TABLE 19
antisense regulation of GAK mRNA

| | | Gene | Actin | | |
|---|---|---|---|---|---|
| Oligo | Cell Line | Message | Message | Ratio | Percent KO |
| CHIR159-1AS | SW620 | 0.0923 | 0.669 | 0.138 | 90.7 |
| CHIR159-1RC | SW620 | 1.01 | 0.680 | 1.49 | |
| CHIR159-7AS | SW620 | 0.0555 | 0.678 | 0.082 | 85.4 |
| CHIR159-7RC | SW620 | 0.335 | 0.598 | 0.560 | |
| CHIR159-1AS | MDA231 | 0.358 | 0.687 | 0.521 | 59.3 |
| CHIR159-1RC | MDA231 | 1.00 | 0.784 | 1.28 | |
| CHIR159-7AS | MDA231 | 0.262 | 0.674 | 0.389 | 69.4 |
| CHIR159-7RC | MDA231 | 0.840 | 0.659 | 1.27 | |
| CHIR159-1AS | T4-2 | 0.307 | 0.707 | 0.434 | 72.9 |
| CHIR159-1RC | T4-2 | 1.23 | 0.770 | 1.60 | |
| CHIR159-7AS | T4-2 | 0.214 | 0.649 | 0.330 | 49.8 |
| CHIR159-7RC | T4-2 | 0.506 | 0.770 | 0.657 | |

[0543] Reduction of GAK protein by antisense polynucleotides in SW620, MDA231 and T4-2 was confirmed using an antibody that specifically recognizes GAK. FIG. 38 shows a western (i.e. protein) blot of protein extracts of the above cell lines decorated with anti-GAK antibodies. GAK protein expression is reduced in cell lines receiving GAK antisense oligonucleotides.

### Example 43

### Role of GAK in Anchorage Independent Cell Growth

[0544] The effect of GAK gene expression upon anchorage-independent cell growth of SW620 and MBA-231 cells was measured by colony formation in soft agar. Soft agar assays were performed by first coating a non-tissue culture treated plate with PolyHEMA to prevent cells from attaching to the plate. Non-transfected cells were harvested using 0.05% trypsin and washing twice in media. The cells are counted using a hemacytometer and resuspended to 10⁴ per ml in media. 50 μl aliquots are placed in poly-HEMA coated 96-well plates and transfected. For each transfection mixture, a carrier molecule, preferably a lipitoid or cholesteroid, was prepared to a working concentration of 0.5 mM in water, sonicated to yield a uniform solution, and filtered through a 0.45 μm PVDF membrane. The antisense or control oligonucleotide was then prepared to a working concentration of 100 μM in sterile Millipore water. The oligonucleotide was further diluted in OptiMEM™ (Gibco/BRL), in a microfuge tube, to 2 μM, or approximately 20 μg oligo/ml of OptiMEM™. In a separate microfuge tube, lipitoid or cholesteroid, typically in the amount of about 1.5-2 nmol lipitoid/μg antisense oligonucleotide, was diluted into the same volume of OptiMEM™ used to dilute the oligonucleotide. The diluted antisense oligonucleotide was immediately added to the diluted lipitoid and mixed by pipetting up and down. Oligonucleotide was added to the cells to a final concentration of 300 nM. Following transfection (˜30 minutes), 3% GTG agarose is added to the cells for a final concentration of 0.35% agarose. After the cell layer agar solidifies, 100 μl of media is dribbled on top of each well. Colonies form in 7 days. For a read-out of growth, 20 μl of Alamar Blue is added to each well and the plate is shaken for 15 minutes. Fluorecence readings (530nm excitation 590 nm emission) are taken after incubation for 6-24 hours.

[0545] The data presented in Table 20 shows that the application of GAK antisense oligonucleotides to SW620 and MDA 231 cells results in inhibition of colony formation and shows that GAK plays a role in production anchorage-independent cell growth. Table 4 shows the average fluorescence reading for several experiments. The standard deviation (St. Dev) of the fluorescence reading and coefficient of variation (% CV) is also shown.

TABLE 20
GAK and anchorage-independent cell growth.

| | | | | % |
|---|---|---|---|---|
| Oligo | Cell Line | Average | St. Dev | CV |
| Blank | SW620 | 12868.17 | 208.78 | 1.78 |
| Untreated | SW620 | 31075.17 | 1944.36 | 7.66 |
| Pos Control | SW620 | 5717.17 | 1108.71 | 23.75 |
| Neg Control | SW620 | 7576.17 | 465.95 | 7.63 |
| Chir159-1AS | SW620 | 9701.5 | 2281.36 | 28.8 |
| Chir159-1RC | SW620 | 17765.5 | 1958.45 | 13.5 |
| Blank | MDA231 | 12726.83 | 232.45 | 2 |
| Untreated | MDA231 | 87272.17 | 0 | 0 |
| Pos Control | MDA231 | 10645.17 | 1591.08 | 18.31 |
| Neg Control | MDA231 | 24159.5 | 2850.58 | 14.45 |
| Chir159-1AS | MDA231 | 8613.5 | 4852.76 | 69 |
| Chir159-1RC | MDA231 | 17859.17 | 1535.55 | 10.53 |

### Example 44

### DKFZp566I133 (DKFZ)

[0546] Several previously uncharacterized genes were identified as being induced in these experiments. One such gene was represented by two spots, Spot ID Nos 22793 and 26883 (gene assignment DKFZp556I133). This gene was expressed at a ratio of about 2.2 in two 2-dimensional (2D) T4-2 vs. 2D S1 experiments, and also at a ratio of about 2 when 3-dimensional (3D) T4-2 cells were compared to the various tumor reversion cultures. However, the ratio of expression increased to an average of 3.2 when 3-dimensional (3D) T4-2 cultures were compared to 2D S1 cultures. In contrast, there was essentially no difference in expression levels when 3D S1 cultures were compared to 2D S1 cultures, suggesting that expression of this gene is specifically elevated in the tumorigenic cell line T4-2, and even further elevated when the tumorigenic cell line is grown in three dimensional cultures (see Table 21).

TABLE 21

| Spot | 2D T4-2/ | 3D T42/ | 3D S1/ | 3D T4-2/ | 3D T4-2/ | 3D T4-2/B1 | 3D T4-2/ |
|---|---|---|---|---|---|---|---|
| ID | 2D S1 | 3D S1 | 2D S1 | 2D T4-2 | EGFRAb | integrin Ab | Tyr |
| 22893 | 1.90387 | 2.64711 | 0.522161 | 1 | 2.17956 | 1.75287 | 2.055538 |
| 26883 | 2.43428 | 3.74613 | 0.524466 | 1 | 2.467573 | 2.029468 | 2.002817 |

[0547] These array data were confirmed by qPCR using the methods described above and the gene specific PCR primers CHIR180_{—}1207 ACAGGGAGAAAACTGGTTGTCCTGG (SEQ ID NO:3011; Forward) and CHIR180_{—}1403 AAGGCAGAACCCATCCACTCCAA (SEQ ID NO:3012; Reverse). Independent cultures were used for these experiments, and data was normalized to B-catenin. These data are shown in Table 22.

TABLE 22

| | | | | | 3D B1 | |
|---|---|---|---|---|---|---|
| | | | | | Integrin | 3D |
| 2D S1 | 2D T4-2 | 3D S1 | 3D T4-2 | 3D EGFRAb | Ab | Tyr |
| 0.165 | 0.421 | 0.14 | 0.475 | 0.231 | 0.175 | 0.174 |

[0548] DKFZ corresponds to Genbank Accession numbers NP_{—}112200, AAH09758, and NM_{—}030938. Orthologs of DKFZ are identified in species other than Homo sapiens include NM_{—}138839 from Rattus norvegicus.

[0549] Analysis of the sequence of DKFZ using a transmembrane helix prediction algorithm (Sonhammer, et al, A hidden Markov model for predicting transmembrane helices in protein sequences, In Proc. of Sixth Int. Conf. on Intelligent Systems for Molecular Biology, p. 175-82, Ed. J. Glasgow, T. Littlejohn, F. Major, R. Lathrop, D. Sankoff, and C. Sensen, Menlo Park, CA: AAAI Press, 1998) indicates that the DKFZ protein has six transmembrane regions (FIG. 18), and, as such, is likely to be a transmembrane protein.

### Example 45

### Antisense Regulation of DKFZ Expression

[0550] Additional functional information on DKFZ was generated using antisense knockout technology. A number of different oligonucleotides complementary to DKFZ mRNA were designed (AS) with corresponding controls (RC): GCTGCTGGATTCGTTTGGCATAACT (SEQ ID NO: 3013; CHIR180-7AS, DKFZp566I1:P1301AS), TCAATACGGTTTGCTTAGGTCGTCG (SEQ ID NO: 3014; CHIR180-7RC, DKFZp566I1:P1301RC), TCTCCTCTGAGTTCAACCGCTGCT (SEQ ID NO: 3015; CHIR180-8AS, DKFZp566I1:P1320AS) and TCGTCGCCAACTTGAGTCTCCTCT (SEQ ID NO: 3016; CHIR180-8RC, DKFZp566I1:P1320AS), and tested for their ability to suppress expression of DKFZ in human malignant colorectal carcinoma SW620 cells, human breast cancer MDA231 cells, and human breast cancer T4-2 cells, as described above.

[0551] Table 23 shows that the antisense (AS) oligonucleotides described above reduced expression of DKFZ mRNA as compared to controls in all three cell lines. DKFZ mRNA reduction ranged from about 95% to about 99%, as compared to cells transfected with reverse (i.e. sense) control (RC) oligonucleotides.

TABLE 23
antisense regulation of DKFZ mRNA

| | | Gene | Actin | | Percent |
|---|---|---|---|---|---|
| Oligo | Cell Line | Message | Message | Ratio | KO |
| CHIR180-7AS | SW620 | 0.0157 | 0.772 | 0.020 | 99.3 |
| CHIR180-7RC | SW620 | 1.99 | 0.736 | 2.70 | |
| CHIR180-8AS | SW620 | 0.0387 | 0.681 | 0.057 | 97.9 |
| CHIR180-8RC | SW620 | 1.89 | 0.703 | 2.69 | |
| CHIR180-7AS | MDA231 | 0.0471 | 3.58 | 0.013 | 98.5 |
| CHIR180-7RC | MDA231 | 1.99 | 2.33 | 0.854 | |
| CHIR180-8AS | MDA231 | 0.00935 | 1.74 | 0.00537 | 99.5 |
| CHIR180-8RC | MDA231 | 1.14 | 1.01 | 1.13 | |
| CHIR180-7AS | T4-2 | 0.119 | 0.667 | 0.178 | 95.4 |
| CHIR180-7RC | T4-2 | 2.8 | 0.728 | 3.85 | |
| CHIR180-8AS | T4-2 | 0.0852 | 0.751 | 0.113 | 95.6 |
| CHIR180-8RC | T4-2 | 1.6 | 0.620 | 2.58 | |

### Example 46

### Effect of DKFZ Expression on Cell Proliferation

[0552] The effect of gene expression on the inhibition of cell proliferation was assessed in metastatic breast cancer cell line MDA-231 and breast cancer cell line T4-2.

[0553] Cells were plated to approximately 60-80% confluency in 96-well dishes. Antisense or reverse control oligonucleotide was diluted to 2 μM in OptiMEM™ and added to OptiMEM™ into which a delivery vehicle, preferably a lipitoid or cholesteroid, had been diluted. The oligo/delivery vehicle mixture was then further diluted into medium with serum on the cells. The final concentration of oligonucleotide for all experiments was 300 nM, and the final ratio of oligo to delivery vehicle for all experiments was 1.5 nmol lipitoid/μg oligonucleotide.

[0554] Antisense oligonucleotides were prepared. Cells were transfected for 4 hours or overnight at 37° C. and the transfection mixture was replaced with fresh medium. Plates are incubated for 4 days, with a plate harvested for each day0-day4. To determine differences in cell number, a CyQuant Cell Proliferation Assay kit (Molecular Probes) was used per manufacturer's instructions. Fluorecence readings (480 nm excitation 520 nm emission) are taken after incubation for 5 minutes.

[0555] The results of these assays are shown in Tables 23A and 24. The data show that DKFZ antisense polynucleotides significantly reduce cell proliferation as compared to controls, and, as such, DKFZ plays a role in production or maintenance of the cancerous phenotype in cancerous breast cells.

TABLE 23A
Cell proliferation

| | | Ave | | | | |
|---|---|---|---|---|---|---|
| | | Day | Ave | Ave | Av3 | Ave |
| Oligo | Cell Line | 0 | Day 1 | Day 2 | Day 3 | Day 4 |
| Untreated | MDA231 | 4233 | 4858 | 9544 | 10981 | 16776 |
| Untreated | MDA231 | 3849 | 4036 | 8686 | 9855 | 14865 |
| Pos Control | MDA231 | 3630 | 2236 | 3564 | 4536 | 7477 |
| Neg Control | MDA231 | 4913 | 5127 | 8331 | 8887 | 13620 |
| CHIR180-7AS | MDA231 | 3848 | 3476 | 6942 | 8715 | 11925 |
| CHIR180-7RC | MDA231 | 4895 | 4700 | 8484 | 10318 | 14226 |
| Untreated | T4-2 | 4062 | 3389 | 5438 | 10579 | 15617 |
| Untreated | T4-2 | 4209 | 3802 | 6346 | 11802 | 16275 |
| Pos Control | T4-2 | 3985 | 2712 | 4081 | 6404 | 9685 |
| Neg Control | T4-2 | 4051 | 3901 | 4356 | 9425 | 12964 |
| CHIR180-7AS | T4-2 | 3792 | 3201 | 3849 | 7376 | 10911 |
| CHIR180-7RC | T4-2 | 3967 | 3840 | 4321 | 8382 | 12293 |

[0556] TABLE 24

| | Standard Deviations | | | | | P-Value of T-Test | | | | |
|---|---|---|---|---|---|---|---|---|---|---|
| Oligo | Day 0 | Day 1 | Day 2 | Day 3 | Day 4 | Day 0 | Day 1 | Day 2 | Day 3 | Day 4 |
| Untreated | 337 | 269 | 299 | 697 | 1333 | 0.1306 | 0.1063 | 0.1804 | 0.0926 | 0.1225 |
| Untreated | 99 | 631 | 867 | 547 | 1047 | 0.1306 | 0.1063 | 0.1804 | 0.0926 | 0.1225 |
| Pos | 94 | 118 | 89 | 441 | 974 | 0.0000 | 0.0001 | 0.0003 | 0.0001 | 0.0010 |
| Control | | | | | | | | | | |
| Neg | 2 | 252 | 697 | 195 | 780 | 0.0000 | 0.0001 | 0.0003 | 0.0001 | 0.0010 |
| Control | | | | | | | | | | |
| CHIR180-7AS | 292 | 16 | 435 | 398 | 418 | 0.0072 | 0.0276 | 0.0059 | 0.0140 | 0.0028 |
| CHIR180-7RC | 208 | 6 | 244 | 533 | 440 | 0.0072 | 0.0276 | 0.0059 | 0.0140 | 0.0028 |
| Untreated | 64 | 283 | 789 | 1593 | 1226 | 0.2550 | 0.0921 | 0.1257 | 0.2794 | 0.4352 |
| Untreated | 22 | 158 | 205 | 577 | 478 | 0.2550 | 0.0921 | 0.1257 | 0.2794 | 0.4352 |
| Pos | 122 | 213 | 6 | 475 | 957 | 0.4320 | 0.0065 | 0.2624 | 0.0051 | 0.0293 |
| Control | | | | | | | | | | |
| Neg | 47 | 335 | 464 | 809 | 1417 | 0.4320 | 0.0065 | 0.2624 | 0.0051 | 0.0293 |
| Control | | | | | | | | | | |
| CHIR180-7AS | 170 | 679 | 263 | 127 | 1330 | 0.2638 | 0.0976 | 0.3516 | 0.0040 | 0.0039 |
| CHIR180-7RC | 22 | 453 | 646 | 579 | 884 | 0.2638 | 0.0976 | 0.3516 | 0.0040 | 0.0039 |

### Example 47

### Role of DKFZ in Anchorage Independent Cell Growth

[0557] The effect of DKFZ gene expression upon anchorage-independent cell growth of MDA435 and MCF7 human breast cancer cells was measured by colony formation in soft agar. Soft agar assays were conducted by the method described for GAK, above.

[0558] The data presented in Table 25 shows that the application of DKFZ antisense oligonucleotides to MDA435 and MCF7 cells results in inhibition of colony formation and shows that DKFZ plays a role in anchorage-independent cell growth of cancer cells. Table 25 shows the average fluorescence reading for several experiments. The standard deviation (St. Dev) of the fluorescence reading and coefficient of variation (% CV) and probability (P-value) is also shown.

TABLE 25

| Oligo | Cell Line | Average | St. Dev | % CV | P-Value |
|---|---|---|---|---|---|
| Untreated | MDA435 | 31190 | 5838 | 19 | 0.1342 |
| Untreated | MDA435 | 38623 | 3620 | 9 | 0.1342 |
| Pos Control | MDA435 | 4776 | 818 | 17 | 0.0156 |
| Neg Control | MDA435 | 16315 | 481 | 3 | 0.0156 |
| Chir180-7AS | MDA435 | 21161 | 3439 | 16 | 0.0274 |
| Chir180-7RC | MDA435 | 28868 | 1902 | 7 | 0.0274 |
| Untreated | MCF7 | 18954 | 1478 | 8 | 0.1476 |
| Untreated | MCF7 | 14383 | 4163 | 29 | 0.1476 |
| Pos Control | MCF7 | 1036 | 194 | 19 | 0.0036 |
| Neg Control | MCF7 | 9478 | 2382 | 25 | 0.0036 |
| Chir180-7AS | MCF7 | 4752 | 2002 | 42 | 0.0139 |
| Chir180-7RC | MCF7 | 9570 | 18 | 0 | 0.0139 |

[0559] The effect of DKFZ gene expression upon invasiveness of MDA231 human breast cancer cells was measured by a matrigel assay. A 3-dimensional reconstituted basement membrane culture of cells was generated as described previously (Peterson et al., (1992) Proc. Natl. Acad. Sci. USA 89:9064-9068) using a commercially prepared reconstituted basement membrane (Matrigel; Collaborative Research, Waltham, Mass.) and examined using methods well known in the art.

[0560] Table 26 (quantitated using Alamar Blue similar to the soft agar assay) and FIG. 40 provides exemplary results of the Matrigel invasion/motility assay to test the invasiveness of MDA231 cells with reduced expression of DKFZ. In general, these data show that a reduction in the expression of DKFZ significantly decreases the invasiveness of MDA231 cells.

TABLE 26

| Oligo | Cell Line | Average | St. Dev | % CV | P-Value |
|---|---|---|---|---|---|
| Untreated | MDA231 | 28316 | 13663 | 48 | 0.9080 |
| Untreated | MDA231 | 26840 | 15669 | 58 | 0.9080 |
| Pos Control | MDA231 | 2756 | 487 | 18 | 0.0002 |
| Neg Control | MDA231 | 14301 | 1386 | 10 | 0.0002 |
| Chir180-7AS | MDA231 | 10508 | 1963 | 19 | 0.0287 |
| Chir180-7RC | MDA231 | 14310 | 153 | 1 | 0.0287 |

### Example 48

### Expression of DKFZ in Cancer Tissues

[0561] The following peptides were used for polyclonal antibody production: peptide 809: gvhqqyvqriek (SEQ ID NO:2885), corresponding to amino acids 97-108 of the DKFZ protein and peptide 810: sgaepddeeyqef (SEQ ID NO: 2886), corresponding to amino acids 215-227 of the DKFZ protein.

[0562] Antibodies specific for DKFZ are used in FACS and immunolocalization analysis to show that DKFZ is associated with membrane, and up-regulated in cancer tissues of biopsies from cancer patients.

[0563] Further, antibodies specific for DKFZ are used to modulate DKFZ activity in cancerous breast, and is further used, alone or conjugated to a toxic moiety, as a treatment for breast cancer.

### Example 49

### Source of Biological Materials

[0564] The biological materials used in the experiments that led to the present invention are described below.

[0565] Source of Patient Tissue Samples

[0566] Normal and cancerous tissues were collected from patients using laser capture microdissection (LCM) techniques, which techniques are well known in the art (see, e.g., Ohyama et al. (2000) Biotechniques 29:530-6; Curran et al. (2000) Mol. Pathol. 53:64-8; Suarez-Quian et al. (1999) Biotechniques 26:328-35; Simone et al. (1998) Trends Genet 14:272-6; Conia et al. (1997) J. Clin. Lab. Anal. 11:28-38; Emmert-Buck et al. (1996) Science 274:998-1001). Table 28 provides information about each patient from which colon tissue samples were isolated, including: the Patient ID (“PT ID”) and Path ReportID (“Path ID”), which are numbers assigned to the patient and the pathology reports for identification purposes; the group (“Grp”) to which the patients have been assigned; the anatomical location of the tumor (“Anatom Loc”); the primary tumor size (“Size”); the primary tumor grade (“Grade”); the identification of the histopathological grade (“Histo Grade”); a description of local sites to which the tumor had invaded (“Local Invasion”); the presence of lymph node metastases (“Lymph Met”); the incidence of lymph node metastases (provided as a number of lymph nodes positive for metastasis over the number of lymph nodes examined) (“Lymph Met Incid”); the regional lymphnode grade (“Reg Lymph Grade”); the identification or detection of metastases to sites distant to the tumor and their location (“Dist Met & Loc”); the grade of distant metastasis (“Dist Met Grade”); and general comments about the patient or the tumor (“Comments”). Histopathology of all primary tumors indicated the tumor was adenocarcinoma except for Patient ID Nos. 130 (for which no information was provided), 392 (in which greater than 50% of the cells were mucinous carcinoma), and 784 (adenosquamous carcinoma). Extranodal extensions were described in three patients, Patient ID Nos. 784, 789, and 791. Lymphovascular invasion was described in Patient ID Nos. 128, 228, 278, 517, 534, 784, 786, 789, 791, 890, and 892. Crohn's-like infiltrates were described in seven patients, Patient ID Nos. 52, 264, 268, 392, 393, 784, and 791.

[0567] Table 28:

TABLE 28

| | | | | | | | | | Lymph | Reg | Dist | Dist | |
|---|---|---|---|---|---|---|---|---|---|---|---|---|---|
| | Path | | Anatom | | | Histo | | Lymph | Met | Lymph | Met | Met | |
| Pt ID | ID | Grp | Loc | Size | Grade | Grade | Local Invasion | Met | Incid | Grade | & Loc | Grade | Comment |
| 10 | 16 | III | Cecum | 8.5 | T3 | G2 | through | Pos | 1/17 | N1 | Neg | M0 | Moderately |
| | | | | | | | muscularis propria | | | | | | differentiated |
| | | | | | | | approaching | | | | | | |
| | | | | | | | pericolic fat, but | | | | | | |
| | | | | | | | not at serosal | | | | | | |
| | | | | | | | surface | | | | | | |
| 15 | 21 | III | Ascending | 4.0 | T3 | G2 | Extending into | Pos | 3/8 | N1 | Neg | MX | invasive |
| | | | colon | | | | subserosal adipose | | | | | | adeno- |
| | | | | | | | tissue | | | | | | carcinoma, |
| | | | | | | | | | | | | | moderately |
| | | | | | | | | | | | | | differentiated; |
| | | | | | | | | | | | | | focal perineural |
| | | | | | | | | | | | | | invasion is seen |
| 52 | 71 | II | Cecum | 9.0 | T3 | G3 | Invasion through | Neg | 0/12 | N0 | Neg | M0 | Hyperplastic |
| | | | | | | | muscularis | | | | | | polyp in |
| | | | | | | | propria, subserosal | | | | | | appendix. |
| | | | | | | | involvement; | | | | | | |
| | | | | | | | ileocec. valve | | | | | | |
| | | | | | | | involvement | | | | | | |
| 121 | 140 | II | Sigmoid | 6 | T4 | G2 | Invasion of | Neg | 0/34 | N0 | Neg | M0 | Perineural |
| | | | | | | | muscularis propria | | | | | | invasion; donut |
| | | | | | | | into serosa, | | | | | | anastomosis |
| | | | | | | | involving | | | | | | Neg. One |
| | | | | | | | submucosa of | | | | | | tubulovillous |
| | | | | | | | urinary bladder | | | | | | and one tubular |
| | | | | | | | | | | | | | adenoma with |
| | | | | | | | | | | | | | no high grade |
| | | | | | | | | | | | | | dysplasia. |
| 125 | 144 | II | Cecum | 6 | T3 | G2 | Invasion through | Neg | 0/19 | N0 | Neg | M0 | patient history |
| | | | | | | | the muscularis | | | | | | of metastatic |
| | | | | | | | propria into | | | | | | melanoma |
| | | | | | | | suserosal adipose | | | | | | |
| | | | | | | | tissue. Ileocecal | | | | | | |
| | | | | | | | junction. | | | | | | |
| 128 | 147 | III | Transverse | 5.0 | T3 | G2 | Invasion of | Pos | 1/5 | N1 | Neg | M0 | |
| | | | colon | | | | muscularis propria | | | | | | |
| | | | | | | | into percolonic fat | | | | | | |
| 130 | 149 | | Splenic | 5.5 | T3 | | through wall and | Pos | 10/24 | N2 | Neg | M1 | |
| | | | flexure | | | | into surrounding | | | | | | |
| | | | | | | | adipose tissue | | | | | | |
| 133 | 152 | II | Rectum | 5.0 | T3 | G2 | Invasion through | Neg | 0/9 | N0 | Neg | M0 | Small separate |
| | | | | | | | muscularis propria | | | | | | tubular |
| | | | | | | | into non- | | | | | | adenoma (0.4 cm) |
| | | | | | | | peritonealized | | | | | | |
| | | | | | | | pericolic tissue; | | | | | | |
| | | | | | | | gross | | | | | | |
| | | | | | | | configuration is | | | | | | |
| | | | | | | | annular. | | | | | | |
| 141 | 160 | IV | Cecum | 5.5 | T3 | G2 | Invasion of | Pos | 7/21 | N2 | Pos - | M1 | Perineural |
| | | | | | | | muscularis propria | | | | Liver | | invasion |
| | | | | | | | into pericolonic | | | | | | identified |
| | | | | | | | adipose tissue, but | | | | | | adjacent to |
| | | | | | | | not through serosa. | | | | | | metastatic |
| | | | | | | | Arising from | | | | | | adenocarcinoma. |
| | | | | | | | tubular adenoma. | | | | | | |
| 156 | 175 | III | Hepatic | 3.8 | T3 | G2 | Invasion through | Pos | 2/13 | N1 | Neg | M0 | Separate |
| | | | flexure | | | | mucsularis propria | | | | | | tubolovillous |
| | | | | | | | into | | | | | | and tubular |
| | | | | | | | subserosa/pericolic | | | | | | adenomas |
| | | | | | | | adipose, no serosal | | | | | | |
| | | | | | | | involvement. | | | | | | |
| | | | | | | | Gross | | | | | | |
| | | | | | | | configuration | | | | | | |
| | | | | | | | annular. | | | | | | |
| 228 | 247 | III | Rectum | 5.8 | T3 | G2 to | Invasion through | Pos | 1/8 | N1 | Neg | MX | Hyperplastic |
| | | | | | | G3 | muscularis propria | | | | | | polyps |
| | | | | | | | to involve | | | | | | |
| | | | | | | | subserosal, | | | | | | |
| | | | | | | | perirectoal | | | | | | |
| | | | | | | | adipose, and | | | | | | |
| | | | | | | | serosa | | | | | | |
| 264 | 283 | II | Ascending | 5.5 | T3 | G2 | Invasion through | Neg | 0/10 | N0 | Neg | M0 | Tubulovillous |
| | | | colon | | | | muscularis propria | | | | | | adenoma with |
| | | | | | | | into subserosal | | | | | | high grade |
| | | | | | | | adipose tissue. | | | | | | dysplasia |
| 266 | 285 | III | Transverse | 9 | T3 | G2 | Invades through | Neg | 0/15 | N1 | Pos - | MX | |
| | | | colon | | | | muscularis propria | | | | Mesen- | | |
| | | | | | | | to involve | | | | teric | | |
| | | | | | | | pericolonic | | | | deposit | | |
| | | | | | | | adipose, extends to | | | | | | |
| | | | | | | | serosa. | | | | | | |
| 267 | 286 | III | Ileocecal | 4.5 | T2 | G2 | Confined to | Pos | 2/12 | N1 | Neg | M0 | |
| | | | | | | | muscularis propria | | | | | | |
| 268 | 287 | I | Cecum | 6.5 | T2 | G2 | Invades full | Neg | 0/12 | N0 | Neg | M0 | |
| | | | | | | | thickness of | | | | | | |
| | | | | | | | muscularis | | | | | | |
| | | | | | | | propria, but | | | | | | |
| | | | | | | | mesenteric adipose | | | | | | |
| | | | | | | | free of malignancy | | | | | | |
| 278 | 297 | III | Rectum | 4 | T3 | G2 | Invasion into | Pos | 7/10 | N2 | Neg | M0 | Descending |
| | | | | | | | perirectal adipose | | | | | | colon polyps, |
| | | | | | | | tissue. | | | | | | no HGD or |
| | | | | | | | | | | | | | carcinoma |
| | | | | | | | | | | | | | identified.. |
| 295 | 314 | II | Ascending | 5.0 | T3 | G2 | Invasion through | Neg | 0/12 | N0 | Neg | M0 | Melanosis coli |
| | | | colon | | | | muscularis propria | | | | | | and diverticular |
| | | | | | | | into percolic | | | | | | disease. |
| | | | | | | | adipose tissue. | | | | | | |
| 296 | 315 | III | Cecum | 5.5 | T3 | G2 | Invasion through | Pos | 2/12 | N1 | Neg | M0 | Tubulovillous |
| | | | | | | | muscularis propria | | | | | | adenoma (2.0 cm) |
| | | | | | | | and invades | | | | | | with no |
| | | | | | | | pericolic adipose | | | | | | high grade |
| | | | | | | | tissue. Ileocecal | | | | | | dysplasia. Neg. |
| | | | | | | | junction. | | | | | | liver biopsy. |
| 300 | 319 | III | Descend- | 5.2 | T2 | G2 | through the | Pos | 2/2 | N1 | Neg | M0 | |
| | | | ing | | | | muscularis propria | | | | | | |
| | | | colon | | | | into pericolic fat | | | | | | |
| 322 | 341 | II | Sigmoid | 7 | T3 | G2 | through the | Neg | 0/5 | N0 | Neg | M0 | vascular |
| | | | | | | | muscularis propria | | | | | | invasion is |
| | | | | | | | into pericolic fat | | | | | | identified |
| 339 | 358 | II | Recto- | 6 | T3 | G2 | Extends into | Neg | 0/6 | N0 | Neg | M0 | 1 hyperplastic |
| | | | sigmoid | | | | perirectal fat but | | | | | | polyp identified |
| | | | | | | | does not reach | | | | | | |
| | | | | | | | serosa | | | | | | |
| 341 | 360 | II | Ascending | 2 cm | T3 | G2 | Invasion through | Neg | 0/4 | N0 | Neg | MX | |
| | | | colon | invasive | | | muscularis propria | | | | | | |
| | | | | | | | to involve | | | | | | |
| | | | | | | | pericolonic fat. | | | | | | |
| | | | | | | | Arising from | | | | | | |
| | | | | | | | villous adenoma. | | | | | | |
| 356 | 375 | II | Sigmoid | 6.5 | T3 | G2 | Through colon | Neg | 0/4 | N0 | Neg | M0 | |
| | | | | | | | wall into | | | | | | |
| | | | | | | | subserosal adipose | | | | | | |
| | | | | | | | tissue. No serosal | | | | | | |
| | | | | | | | spread seen. | | | | | | |
| 360 | 412 | III | Ascending | 4.3 | T3 | G2 | Invasion thru | Pos | 1/5 | N1 | Neg | M0 | Two mucosal |
| | | | colon | | | | muscularis propria | | | | | | polyps |
| | | | | | | | to pericolonic fat | | | | | | |
| 392 | 444 | IV | Ascending | 2 | T3 | G2 | Invasion through | Pos | 1/6 | N1 | Pos - | M1 | Tumor arising |
| | | | colon | | | | muscularis propria | | | | Liver | | at prior |
| | | | | | | | into subserosal | | | | | | ileocolic |
| | | | | | | | adipose tissue, not | | | | | | surgical |
| | | | | | | | serosa. | | | | | | anastomosis. |
| 393 | 445 | II | Cecum | 6.0 | T3 | G2 | Cecum, invades | Neg | 0/21 | N0 | Neg | M0 | |
| | | | | | | | through | | | | | | |
| | | | | | | | muscularis propria | | | | | | |
| | | | | | | | to involve | | | | | | |
| | | | | | | | subserosal adipose | | | | | | |
| | | | | | | | tissue but not | | | | | | |
| | | | | | | | serosa. | | | | | | |
| 413 | 465 | IV | Cecum | 4.8 | T3 | G2 | Invasive through | Neg | 0/7 | N0 | Pos - | M1 | rediagnosis of |
| | | | | | | | muscularis to | | | | Liver | | oophorectomy |
| | | | | | | | involve periserosal | | | | | | path to |
| | | | | | | | fat; abutting | | | | | | metastatic |
| | | | | | | | ileocecal junction. | | | | | | colon cancer. |
| 452 | 504 | II | Ascending | 4 | T3 | G2 | through | Neg | 0/39 | N0 | Neg | M0 | |
| | | | colon | | | | muscularis propria | | | | | | |
| | | | | | | | approaching | | | | | | |
| | | | | | | | pericolic fat, but | | | | | | |
| | | | | | | | not at serosal | | | | | | |
| | | | | | | | surface | | | | | | |
| 505 | 383 | IV | | 7.5 | T3 | G2 | Invasion through | Pos | 2/17 | N1 | Pos - | M1 | Anatomical |
| | | | | | | | muscularis propria | | | | Liver | | location of |
| | | | | | | | involving pericolic | | | | | | primary not |
| | | | | | | | adipose, serosal | | | | | | notated in |
| | | | | | | | surface uninvolved | | | | | | report. |
| | | | | | | | | | | | | | Evidence of |
| | | | | | | | | | | | | | chronic colitis. |
| 517 | 395 | IV | Sigmoid | 3 | T3 | G2 | penetrates | Pos | 6/6 | N2 | Neg | M0 | No mention of |
| | | | | | | | muscularis | | | | | | distant met in |
| | | | | | | | propria, involves | | | | | | report |
| | | | | | | | pericolonic fat. | | | | | | |
| 534 | 553 | II | Ascending | 12 | T3 | G3 | Invasion through | Neg | 0/8 | N0 | Neg | M0 | Omentum with |
| | | | colon | | | | the muscularis | | | | | | fibrosis and fat |
| | | | | | | | propria involving | | | | | | necrosis. Small |
| | | | | | | | pericolic fat. | | | | | | bowel with |
| | | | | | | | Serosa free of | | | | | | acute and |
| | | | | | | | tumor. | | | | | | chronic |
| | | | | | | | | | | | | | serositis, focal |
| | | | | | | | | | | | | | abscess and |
| | | | | | | | | | | | | | adhesions. |
| 546 | 565 | IV | Ascending | 5.5 | T3 | G2 | Invasion through | Pos | 6/12 | N2 | Pos - | M1 | |
| | | | colon | | | | muscularis propria | | | | Liver | | |
| | | | | | | | extensively | | | | | | |
| | | | | | | | through | | | | | | |
| | | | | | | | submucosal and | | | | | | |
| | | | | | | | extending to | | | | | | |
| | | | | | | | serosa. | | | | | | |
| 577 | 596 | II | Cecum | 11.5 | T3 | G2 | Invasion through | Neg | 0/58 | N0 | Neg | M0 | Appendix |
| | | | | | | | the bowel wall, | | | | | | dilated and |
| | | | | | | | into suberosal | | | | | | fibrotic, but not |
| | | | | | | | adipose. Serosal | | | | | | involved by |
| | | | | | | | surface free of | | | | | | tumor |
| | | | | | | | tumor. | | | | | | |
| 695 | 714 | II | Cecum | 14.0 | T3 | G2 | extending through | Neg | 0/22 | N0 | Neg | MX | moderately |
| | | | | | | | bowel wall into | | | | | | differentiated |
| | | | | | | | serosal fat | | | | | | adenocarcinoma |
| | | | | | | | | | | | | | with |
| | | | | | | | | | | | | | mucinous |
| | | | | | | | | | | | | | diferentiation |
| | | | | | | | | | | | | | (% not stated), |
| | | | | | | | | | | | | | tubular |
| | | | | | | | | | | | | | adenoma and |
| | | | | | | | | | | | | | hyperplstic |
| | | | | | | | | | | | | | polyps present, |
| 784 | 803 | IV | Ascending | 3.5 | T3 | G3 | through | Pos | 5/17 | N2 | Pos - | M1 | invasive poorly |
| | | | colon | | | | muscularis propria | | | | Liver | | differentiated |
| | | | | | | | into pericolic soft | | | | | | adenosquamous |
| | | | | | | | tissues | | | | | | carcinoma |
| 786 | 805 | IV | Descend- | 9.5 | T3 | G2 | through | Neg | 0/12 | N0 | Pos - | M1 | moderately |
| | | | ing | | | | muscularis propria | | | | Liver | | differentiated |
| | | | colon | | | | into pericolic fat, | | | | | | invasive |
| | | | | | | | but not at serosal | | | | | | adenocarcinoma |
| | | | | | | | surface | | | | | | |
| 787 | 806 | II | Recto- | 2.5 | T3 | G2-G3 | Invasion of | Neg | | N0 | Neg | MX | Peritumoral |
| | | | sigmoid | | | | muscularis propria | | | | | | lymphocytic |
| | | | | | | | into soft tissue | | | | | | response; 5 LN |
| | | | | | | | | | | | | | examined in |
| | | | | | | | | | | | | | pericolic fat, no |
| | | | | | | | | | | | | | metastatases |
| | | | | | | | | | | | | | observed. |
| 789 | 808 | IV | Cecum | 5.0 | T3 | G2-G3 | Extending through | Pos | 5/10 | N2 | Pos - | M1 | Three fungating |
| | | | | | | | muscularis propria | | | | Liver | | lesions |
| | | | | | | | into pericolonic fat | | | | | | examined. |
| 790 | 809 | IV | Rectum | 6.8 | T3 | G1-G2 | Invading through | Pos | 3/13 | N1 | Pos - | M1 | |
| | | | | | | | muscularis propria | | | | Liver | | |
| | | | | | | | into perirectal fat | | | | | | |
| 791 | 810 | IV | Ascending | 5.8 | T3 | G3 | Through the | Pos | 13/25 | N2 | Pos - | M1 | poorly |
| | | | colon | | | | muscularis propria | | | | Liver | | differentiated |
| | | | | | | | into pericolic fat | | | | | | invasive |
| | | | | | | | | | | | | | colonic |
| | | | | | | | | | | | | | adenocarcinoma |
| 888 | 908 | IV | Ascending | 2.0 | T2 | G1 | Into muscularis | Pos | 3/21 | N0 | Pos - | M1 | well to |
| | | | colon | | | | propria | | | | Liver | | moderately |
| | | | | | | | | | | | | | differentiated |
| | | | | | | | | | | | | | adenocarcinomas; |
| | | | | | | | | | | | | | this patient |
| | | | | | | | | | | | | | has tumors of |
| | | | | | | | | | | | | | the ascending |
| | | | | | | | | | | | | | colon and the |
| | | | | | | | | | | | | | sigmoid colon |
| 889 | 909 | IV | Cecum | 4.8 | T3 | G2 | Through | Pos | 1/4 | N1 | Pos - | M1 | moderately |
| | | | | | | | muscularis propria | | | | Liver | | differentiated |
| | | | | | | | int subserosal | | | | | | adenocarcinoma |
| | | | | | | | tissue | | | | | | |
| 890 | 910 | IV | Ascending | | T3 | G2 | Through | Pos | 11/15 | N2 | Pos - | M1 | |
| | | | colon | | | | muscularis propria | | | | Liver | | |
| | | | | | | | into subserosa. | | | | | | |
| 891 | 911 | IV | Rectum | 5.2 | T3 | G2 | Invasion through | Pos | 4/15 | N2 | Pos - | M1 | Perineural |
| | | | | | | | muscularis propria | | | | Liver | | invasion |
| | | | | | | | into perirectal soft | | | | | | present. |
| | | | | | | | tissue | | | | | | |
| 892 | 912 | IV | Sigmoid | 5.0 | T3 | G2 | Invasion into | Pos | 1/28 | N1 | Pos - | M1 | Perineural |
| | | | | | | | pericolic sort | | | | Liver, | | invasion |
| | | | | | | | tissue. Tumor | | | | left | | present, |
| | | | | | | | focally invading | | | | and | | extensive. |
| | | | | | | | skeletal muscle | | | | right | | Patient with a |
| | | | | | | | attached to colon. | | | | lobe, | | history of colon |
| | | | | | | | | | | | omen- | | cancer. |
| | | | | | | | | | | | tum | | |
| 893 | 913 | IV | Transverse | 6.0 | T3 | G2-G3 | Through | Pos | 14/17 | N2 | Pos - | M1 | Perineural |
| | | | colon | | | | muscularis propria | | | | Liver | | invasion focally |
| | | | | | | | into pericolic fat | | | | | | present. |
| | | | | | | | | | | | | | Omentum |
| | | | | | | | | | | | | | mass, but |
| | | | | | | | | | | | | | resection with |
| | | | | | | | | | | | | | no tumor |
| | | | | | | | | | | | | | identified. |
| 989 | 1009 | IV | Sigmoid | 6.0 | T3 | G2 | Invasion through | Pos | 1/7 | N1 | Pos - | M1 | Primary |
| | | | | | | | colon wall and | | | | Liver | | adenocarcinoma |
| | | | | | | | focally involving | | | | | | arising from |
| | | | | | | | subserosal tissue. | | | | | | tubulovillous |
| | | | | | | | | | | | | | adenoma. |

[0568] Source of Polynucleotides on Arrays

[0569] Polynucleotides for use on the arrays were obtained from both publicly available sources and from cDNA libraries generated from selected cell lines and patient tissues. Table 29 provides information about the polynucleotides on the arrays including: (1) the “SEQ ID NO” assigned to each sequence for use in the present specification; (2) the spot identification number (“Spot ID”), an internal reference that serves as a unique identifier for the spot on the array; (3) the “Clone ID” assigned to the clone from which the sequence was isolated; and (4) the “MAClone ID” assigned to the clone from which the sequence was isolated. The sequences corresponding to the SEQ ID NOS are provided in the Sequence Listing.

TABLE 29

| SEQ ID NO | Spot ID | Clone ID | MAClone ID |
|---|---|---|---|
| 3022 | 18 | M00026919B:A10 | MA40:F01 |
| 3023 | 20 | M00026919B:E07 | MA40:G01 |
| 3024 | 22 | M00026919D:F04 | MA40:H01 |
| 3025 | 54 | M00026914D:G06 | MA40:A01 |
| 3026 | 56 | M00026950A:A09 | MA40:D07 |
| 3027 | 67 | M00003820C:A09 | MA244:B01 |
| 3028 | 73 | M00001673A:G03 | MA244:E01 |
| 3029 | 115 | M00007939A:A12 | MA27:B07 |
| 3030 | 119 | M00007939A:B11 | MA27:D07 |
| 3031 | 127 | M00007939B:G03 | MA27:H07 |
| 3032 | 166 | M00007997D:G08 | MA29:C01 |
| 3033 | 220 | M00026894C:E11 | MA39:F07 |
| 3034 | 238 | M00001391A:C05 | MA15:G01 |
| 3035 | 294 | M00006818A:A06 | MA240:C01 |
| 3036 | 393 | M00023278A:F09 | MA36:E01 |
| 3037 | 405 | M00023299A:G01 | MA36:C07 |
| 3038 | 411 | M00023301A:A11 | MA36:F07 |
| 3039 | 453 | M00008050A:D12 | MA30:C01 |
| 3040 | 460 | M00022135A:C04 | MA35:F01 |
| 3041 | 462 | M00022137A:A05 | MA35:G01 |
| 3042 | 466 | M00022176C:A07 | MA35:A07 |
| 3043 | 471 | M00008077B:A08 | MA30:D07 |
| 3044 | 477 | M00008077C:D09 | MA30:G07 |
| 3045 | 492 | M00022081C:E09 | MA34:F01 |
| 3046 | 495 | M00001662A:G06 | MA24:H01 |
| 3047 | 504 | M00022102B:B11 | MA34:D07 |
| 3048 | 506 | M00022102B:E08 | MA34:E07 |
| 3049 | 556 | M00022569D:G06 | MA22:F01 |
| 3050 | 577 | M00001358B:B11 | MA14:A01 |
| 3051 | 578 | M00001429A:G04 | MA16:A01 |
| 3052 | 579 | M00001358B:F05 | MA14:B01 |
| 3053 | 582 | M00001429C:C03 | MA16:C01 |
| 3054 | 585 | M00001359D:B04 | MA14:E01 |
| 3055 | 587 | M00001360A:E10 | MA14:F01 |
| 3056 | 589 | M00001360C:B05 | MA14:G01 |
| 3057 | 590 | M00001430B:F01 | MA16:G01 |
| 3058 | 592 | M00001430C:A02 | MA16:H01 |
| 3059 | 594 | M00001445C:H05 | MA16:A07 |
| 3060 | 596 | M00001445D:D07 | MA16:B07 |
| 3061 | 605 | M00001374D:D10 | MA14:G07 |
| 3062 | 607 | M00001375A:A08 | MA14:H07 |
| 3063 | 643 | M00006600A:E07 | MA241:B01 |
| 3064 | 661 | M00006690A:F06 | MA241:C07 |
| 3065 | 739 | M00023325D:A08 | MA37:B02 |
| 3066 | 742 | M00026921D:F12 | MA40:C02 |
| 3067 | 743 | M00023325D:F06 | MA37:D02 |
| 3068 | 750 | M00026924A:E09 | MA40:G02 |
| 3069 | 823 | M00007940C:A04 | MA27:D08 |
| 3070 | 827 | M00007941C:H03 | MA27:F08 |
| 3071 | 828 | M00021638B:F03 | MA31:F08 |
| 3072 | 831 | M00007941D:C04 | MA27:H08 |
| 3073 | 842 | M00004054D:D02 | |
| 3074 | 857 | M00001507A:A10 | MA23:E08 |
| 3075 | 858 | M00004198D:A01 | |
| 3076 | 861 | M00001528C:B08 | MA23:G08 |
| 3077 | 868 | M00008002C:A05 | MA29:B03 |
| 3078 | 880 | M00008006C:H05 | MA29:H03 |
| 3079 | 898 | M00026850C:A01 | MA39:A02 |
| 3080 | 908 | M00026853D:C07 | MA39:F02 |
| 3081 | 920 | M00026896A:C09 | MA39:D08 |
| 3082 | 934 | M00001391B:D02 | MA15:C02 |
| 3083 | 938 | M00001391B:H05 | MA15:E02 |
| 3084 | 940 | M00001391D:C07 | MA15:F02 |
| 3085 | 942 | M00001392B:B01 | MA15:G02 |
| 3086 | 954 | M00001407B:C03 | MA15:E08 |
| 3087 | 1011 | M00005635B:E02 | MA242:B08 |
| 3088 | 1017 | M00005636B:B06 | MA242:E08 |
| 3089 | 1018 | M00006971A:E06 | MA240:E08 |
| 3090 | 1019 | M00005636D:B08 | MA242:F08 |
| 3091 | 1107 | M00023302C:A04 | MA36:B08 |
| 3092 | 1117 | M00023305A:C02 | MA36:G08 |
| 3093 | 1172 | M00022180A:E08 | MA35:B08 |
| 3094 | 1178 | M00022181C:H11 | MA35:E08 |
| 3095 | 1193 | M00001673A:C11 | |
| 3096 | 1201 | M00003853B:C07 | |
| 3097 | 1204 | M00022106B:D04 | MA34:B08 |
| 3098 | 1209 | M00003858B:G01 | MA24:E08 |
| 3099 | 1214 | M00022109B:A11 | MA34:G08 |
| 3100 | 1260 | M00022921A:H05 | MA22:F02 |
| 3101 | 1282 | M00001430D:H07 | MA16:A02 |
| 3102 | 1283 | M00001360D:H10 | MA14:B02 |
| 3103 | 1284 | M00001431A:E01 | MA16:B02 |
| 3104 | 1285 | M00001361A:A02 | MA14:C02 |
| 3105 | 1295 | M00001362A:B03 | MA14:H02 |
| 3106 | 1297 | M00001376C:C01 | MA14:A08 |
| 3107 | 1300 | M00001449A:D02 | MA16:B08 |
| 3108 | 1301 | M00001378B:A02 | MA14:C08 |
| 3109 | 1302 | M00001450A:D12 | MA16:C08 |
| 3110 | 1303 | M00001378C:D08 | MA14:D08 |
| 3111 | 1310 | M00001451D:F01 | MA16:G08 |
| 3112 | 1349 | M00006628B:A02 | MA241:C02 |
| 3113 | 1444 | M00026926C:F03 | MA40:B03 |
| 3114 | 1458 | M00026963B:H03 | MA40:A09 |
| 3115 | 1464 | M00026964A:E10 | MA40:D09 |
| 3116 | 1468 | M00026965C:A11 | MA40:F09 |
| 3117 | 1493 | M00001398A:D11 | MA244:C09 |
| 3118 | 1512 | M00008095C:H08 | MA31:D03 |
| 3119 | 1523 | M00007942A:F12 | MA27:B09 |
| 3120 | 1554 | M00004212B:B12 | MA25:A09 |
| 3121 | 1576 | M00008014C:E11 | MA29:D05 |
| 3122 | 1578 | M00008015A:B05 | MA29:E05 |
| 3123 | 1586 | M00022049A:B08 | MA33:A05 |
| 3124 | 1602 | M00026856B:F08 | MA39:A03 |
| 3125 | 1604 | M00026856C:H12 | MA39:B03 |
| 3126 | 1628 | M00026900D:A03 | MA39:F09 |
| 3127 | 1630 | M00026900D:C12 | MA39:G09 |
| 3128 | 1632 | M00026901D:A03 | MA39:H09 |
| 3129 | 1642 | M00001393A:G03 | MA15:E03 |
| 3130 | 1656 | M00001409B:D03 | MA15:D09 |
| 3131 | 1658 | M00001409B:G01 | MA15:E09 |
| 3132 | 1660 | M00001410C:C09 | MA15:F09 |
| 3133 | 1662 | M00001410D:A03 | MA15:G09 |
| 3134 | 1697 | M00005504D:F06 | MA242:A03 |
| 3135 | 1709 | M00005510D:H10 | MA242:G03 |
| 3136 | 1726 | M00006990D:D06 | MA240:G09 |
| 3137 | 1761 | SL146 | MA248:A03 |
| 3138 | 1775 | SL153 | MA248:H03 |
| 3139 | 1785 | SL198 | MA248:E09 |
| 3140 | 1787 | SL199 | MA248:F09 |
| 3141 | 1789 | SL200 | MA248:G09 |
| 3142 | 1797 | M00023283D:C03 | MA36:C03 |
| 3143 | 1799 | M00023283D:D03 | MA36:D03 |
| 3144 | 1801 | M00023284A:D09 | MA36:E03 |
| 3145 | 1807 | M00023285D:C05 | MA36:H03 |
| 3146 | 1809 | M00023306C:H11 | MA36:A09 |
| 3147 | 1813 | M00023308D:B06 | MA36:C09 |
| 3148 | 1817 | M00023309D:H04 | MA36:E09 |
| 3149 | 1819 | M00023310A:D07 | MA36:F09 |
| 3150 | 1875 | M00008079C:H04 | MA30:B09 |
| 3151 | 1883 | M00008080B:B10 | MA30:F09 |
| 3152 | 1884 | M00022198D:C02 | MA35:F09 |
| 3153 | 1886 | M00022198D:G03 | MA35:G09 |
| 3154 | 1895 | M00003768B:B09 | MA24:D03 |
| 3155 | 1910 | M00022110C:A08 | MA34:C09 |
| 3156 | 1913 | M00003886C:H08 | MA24:E09 |
| 3157 | 1960 | M00023297B:A10 | MA22:D03 |
| 3158 | 1966 | M00023314C:G05 | MA22:G03 |
| 3159 | 1991 | M00001363B:C04 | MA14:D03 |
| 3160 | 1992 | M00001434D:F08 | MA16:D03 |
| 3161 | 1994 | M00001435B:A04 | MA16:E03 |
| 3162 | 1996 | M00001435B:B09 | MA16:F03 |
| 3163 | 2000 | M00001435C:F08 | MA16:H03 |
| 3164 | 2001 | M00001381A:F03 | MA14:A09 |
| 3165 | 2004 | M00001453B:E11 | MA16:B09 |
| 3166 | 2008 | M00001453C:D02 | MA16:D09 |
| 3167 | 2050 | M00007121D:A05 | MA243:A03 |
| 3168 | 2052 | M00007122C:F03 | MA243:B03 |
| 3169 | 2053 | M00006638A:G02 | MA241:C03 |
| 3170 | 2059 | M00006639B:H09 | MA241:F03 |
| 3171 | 2064 | M00007127C:C11 | MA243:H03 |
| 3172 | 2073 | M00006720D:C11 | MA241:E09 |
| 3173 | 2075 | M00006728C:E07 | MA241:F09 |
| 3174 | 2156 | M00026931D:E08 | MA40:F04 |
| 3175 | 2158 | M00026932D:B08 | MA40:G04 |
| 3176 | 2168 | M00026969D:D02 | MA40:D10 |
| 3177 | 2169 | M00023393B:E02 | MA37:E10 |
| 3178 | 2185 | M00003782D:D06 | MA244:E04 |
| 3179 | 2189 | M00004105D:B04 | MA244:G04 |
| 3180 | 2199 | M00001556D:B11 | MA244:D10 |
| 3181 | 2234 | M00021664B:G03 | MA31:E10 |
| 3182 | 2242 | M00004078A:A07 | |
| 3183 | 2263 | M00001561A:B03 | MA23:D10 |
| 3184 | 2284 | M00008023C:A06 | MA29:F07 |
| 3185 | 2286 | M00008024C:F02 | MA29:G07 |
| 3186 | 2288 | M00008024C:G06 | MA29:H07 |
| 3187 | 2292 | M00022057C:H10 | MA33:B07 |
| 3188 | 2294 | M00022059B:B06 | MA33:C07 |
| 3189 | 2324 | M00026902B:F10 | MA39:B10 |
| 3190 | 2342 | M00001394D:B08 | MA15:C04 |
| 3191 | 2354 | M00001415A:G05 | MA15:A10 |
| 3192 | 2356 | M00001416B:E03 | MA15:B10 |
| 3193 | 2368 | M00001421B:B12 | MA15:H10 |
| 3194 | 2413 | M00005528C:E02 | MA242:G04 |
| 3195 | 2513 | M00023312D:F10 | MA36:A10 |
| 3196 | 2566 | M00022157A:C06 | MA35:C04 |
| 3197 | 2576 | M00022165A:A11 | MA35:H04 |
| 3198 | 2584 | M00022206A:B10 | MA35:D10 |
| 3199 | 2601 | M00003811B:F09 | |
| 3200 | 2605 | M00003812D:A11 | |
| 3201 | 2606 | M00022088D:C10 | MA34:G04 |
| 3202 | 2613 | M00003910B:C12 | |
| 3203 | 2689 | M00001366A:F06 | MA14:A04 |
| 3204 | 2692 | M00001435C:F12 | MA16:B04 |
| 3205 | 2694 | M00001436B:E11 | MA16:C04 |
| 3206 | 2695 | M00001366B:E01 | MA14:D04 |
| 3207 | 2696 | M00001436C:C03 | MA16:D04 |
| 3208 | 2700 | M00001437A:B01 | MA16:F04 |
| 3209 | 2702 | M00001437B:B08 | MA16:G04 |
| 3210 | 2712 | M00001467B:H05 | |
| 3211 | 2716 | M00001468A:D02 | MA16:F10 |
| 3212 | 2756 | M00007131B:B11 | MA243:B04 |
| 3213 | 2761 | M00006650A:A10 | MA241:E04 |
| 3214 | 2765 | M00006653C:B09 | MA241:G04 |
| 3215 | 2766 | M00007154B:H08 | MA243:G04 |
| 3216 | 2769 | M00006740A:E02 | MA241:A10 |
| 3217 | 2770 | M00021621A:D04 | MA243:A10 |
| 3218 | 2771 | M00006740B:F11 | MA241:B10 |
| 3219 | 2773 | M00006741C:A01 | MA241:C10 |
| 3220 | 2780 | M00022171C:A04 | MA243:F10 |
| 3221 | 2858 | M00026937C:B08 | MA40:E05 |
| 3222 | 2861 | M00023367A:H06 | MA37:G05 |
| 3223 | 2876 | M00026985C:E12 | MA40:F11 |
| 3224 | 2916 | M00008100A:A07 | MA31:B05 |
| 3225 | 2921 | M00007936B:H07 | MA27:E05 |
| 3226 | 2924 | M00008100C:E05 | MA31:F05 |
| 3227 | 2937 | M00007947B:B02 | MA27:E11 |
| 3228 | 2956 | M00004105A:C09 | MA25:F05 |
| 3229 | 2957 | M00001433C:D09 | MA23:G05 |
| 3230 | 2980 | M00008027B:D09 | MA29:B09 |
| 3231 | 2984 | M00008028D:B01 | MA29:D09 |
| 3232 | 2988 | M00008039A:C09 | MA29:F09 |
| 3233 | 3026 | M00026905A:A10 | MA39:A11 |
| 3234 | 3030 | M00026905D:C05 | MA39:C11 |
| 3235 | 3054 | M00001401B:A06 | MA15:G05 |
| 3236 | 3056 | M00001402A:A08 | MA15:H05 |
| 3237 | 3105 | M00005534C:E12 | MA242:A05 |
| 3238 | 3111 | M00005542A:D09 | MA242:D05 |
| 3239 | 3132 | M00007031D:E02 | MA240:F11 |
| 3240 | 3134 | M00007032A:D04 | MA240:G11 |
| 3241 | 3135 | M00005813C:F12 | MA242:H11 |
| 3242 | 3171 | SL163 | MA248:B05 |
| 3243 | 3173 | SL164 | MA248:C05 |
| 3244 | 3179 | SL167 | MA248:F05 |
| 3245 | 3181 | SL168 | MA248:G05 |
| 3246 | 3183 | SL169 | MA248:H05 |
| 3247 | 3231 | M00023320B:A03 | MA36:H11 |
| 3248 | 3238 | M00005350B:F10 | MA246:C05 |
| 3249 | 3267 | M00008069D:F01 | MA30:B05 |
| 3250 | 3268 | M00022165B:C08 | MA35:B05 |
| 3251 | 3272 | M00022165C:E12 | MA35:D05 |
| 3252 | 3274 | M00022166C:E07 | MA35:E05 |
| 3253 | 3275 | M00008072D:E12 | MA30:F05 |
| 3254 | 3282 | M00022211B:D05 | MA35:A11 |
| 3255 | 3293 | M00008089A:E09 | MA30:G11 |
| 3256 | 3317 | M00003974D:E04 | MA24:C11 |
| 3257 | 3323 | M00003980D:F10 | MA24:F11 |
| 3258 | 3327 | M00003984D:C08 | MA24:H11 |
| 3259 | 3370 | M00023373D:A01 | MA22:E05 |
| 3260 | 3376 | M00023396D:D01 | MA22:H05 |
| 3261 | 3394 | M00001437D:E12 | MA16:A05 |
| 3262 | 3396 | M00001438A:B09 | MA16:B05 |
| 3263 | 3401 | M00001369A:C07 | MA14:E05 |
| 3264 | 3404 | M00001439C:A07 | MA16:F05 |
| 3265 | 3407 | M00001369C:A05 | MA14:H05 |
| 3266 | 3410 | M00001468D:B11 | MA16:A11 |
| 3267 | 3411 | M00001386B:F08 | MA14:B11 |
| 3268 | 3419 | M00001387A:A08 | MA14:F11 |
| 3269 | 3460 | M00007163A:B10 | MA243:B05 |
| 3270 | 3465 | M00006675C:A06 | MA241:E05 |
| 3271 | 3470 | M00007191C:A06 | MA243:G05 |
| 3272 | 3471 | M00006678A:D02 | MA241:H05 |
| 3273 | 3562 | M00026941C:A12 | MA40:E06 |
| 3274 | 3578 | M00026996A:E01 | MA40:E12 |
| 3275 | 3581 | M00023401B:E06 | MA37:G12 |
| 3276 | 3584 | M00027005B:D03 | MA40:H12 |
| 3277 | 3621 | M00007937B:A02 | MA27:C06 |
| 3278 | 3622 | M00021612C:E11 | MA31:C06 |
| 3279 | 3629 | M00007938C:C12 | MA27:G06 |
| 3280 | 3675 | M00001623C:A06 | MA23:F12 |
| 3281 | 3677 | M00001630D:A11 | MA23:G12 |
| 3282 | 3682 | M00008044B:E11 | MA29:A11 |
| 3283 | 3684 | M00008044C:C10 | MA29:B11 |
| 3284 | 3686 | M00008044D:B08 | MA29:C11 |
| 3285 | 3688 | M00008044D:C05 | MA29:D11 |
| 3286 | 3706 | M00022074C:A04 | MA33:E11 |
| 3287 | 3738 | M00026910C:D12 | MA39:E12 |
| 3288 | 3742 | M00026913A:D06 | MA39:G12 |
| 3289 | 3752 | M00001402C:H08 | MA15:D06 |
| 3290 | 3756 | M00001404C:C11 | MA15:F06 |
| 3291 | 3813 | M00005587B:G05 | MA242:C06 |
| 3292 | 3814 | M00006934D:D10 | MA240:C06 |
| 3293 | 3885 | SL176 | MA248:G06 |
| 3294 | 3905 | M00023295D:E05 | MA36:A06 |
| 3295 | 3921 | M00023320B:C02 | MA36:A12 |
| 3296 | 3956 | M00005401B:F12 | MA246:B12 |
| 3297 | 3979 | M00008074D:C05 | MA30:F06 |
| 3298 | 3982 | M00022175B:F06 | MA35:G06 |
| 3299 | 3998 | M00022230B:C10 | MA35:G12 |
| 3300 | 4006 | M00022093C:C08 | MA34:C06 |
| 3301 | 4008 | M00022093C:C12 | MA34:D06 |
| 3302 | 4028 | M00022132A:H07 | MA34:F12 |
| 3303 | 4066 | M00023397B:D04 | MA22:A06 |
| 3304 | 4074 | M00023399D:G04 | MA22:E06 |
| 3305 | 4098 | M00001439D:C09 | MA16:A06 |
| 3306 | 4100 | M00001441A:A09 | MA16:B06 |
| 3307 | 4101 | M00001369D:E02 | MA14:C06 |
| 3308 | 4105 | M00001371D:H10 | MA14:E06 |
| 3309 | 4107 | M00001372A:D01 | MA14:F06 |
| 3310 | 4110 | M00001444C:F03 | MA16:G06 |
| 3311 | 4112 | M00001445A:B02 | |
| 3312 | 4119 | M00001388D:F11 | MA14:D12 |
| 3313 | 4124 | M00001481C:A12 | MA16:F12 |
| 3314 | 4125 | M00001389B:B05 | MA14:G12 |
| 3315 | 4127 | M00001389C:G01 | MA14:H12 |
| 3316 | 4128 | M00001482D:D11 | MA16:H12 |
| 3317 | 4183 | M00006809B:F04 | MA241:D12 |
| 3318 | 8513 | I:3325119:07A01:A01 | MA127:A01 |
| 3319 | 8517 | I:3033345:07A01:C01 | MA127:C01 |
| 3320 | 8537 | I:3176222:07A01:E07 | MA127:E07 |
| 3321 | 8542 | I:2510627:07B01:G07 | MA129:G07 |
| 3322 | 8546 | I:1705208:06B01:A01 | MA125:A01 |
| 3323 | 8566 | I:1672781:06B01:C07 | MA125:C07 |
| 3324 | 8568 | I:1712888:06B01:D07 | MA125:D07 |
| 3325 | 8570 | I:1696224:06B01:E07 | MA125:E07 |
| 3326 | 8576 | I:3935034:06B01:H07 | MA125:H07 |
| 3327 | 8617 | I:1800114:03A01:E01 | MA111:E01 |
| 3328 | 8631 | I:1976029:03A01:D07 | MA111:D07 |
| 3329 | 8634 | I:1439934:03B01:E07 | MA113:E07 |
| 3330 | 8645 | I:2512879:01A01:C01 | MA103:C01 |
| 3331 | 8660 | I:2900277:01B01:B07 | MA105:B07 |
| 3332 | 8661 | I:1479255:01A01:C07 | MA103:C07 |
| 3333 | 8738 | I:2648612:04B01:A01 | MA117:A01 |
| 3334 | 8741 | I:1889867:04A01:C01 | MA115:C01 |
| 3335 | 8743 | I:1858905:04A01:D01 | MA115:D01 |
| 3336 | 8752 | I:2591494:04B01:H01 | MA117:H01 |
| 3337 | 8754 | I:2916261:04B01:A07 | MA117:A07 |
| 3338 | 8756 | I:2397815:04B01:B07 | MA117:B07 |
| 3339 | 8760 | I:2182095:04B01:D07 | MA117:D07 |
| 3340 | 8769 | I:2506194:02A01:A01 | MA107:A01 |
| 3341 | 8773 | I:1806219:02A01:C01 | MA107:C01 |
| 3342 | 8797 | I:1729724:02A01:G07 | MA107:G07 |
| 3343 | 8845 | I:1886842:05A02:G01 | MA120:G01 |
| 3344 | 8851 | I:1352669:05A02:B07 | MA120:B07 |
| 3345 | 8854 | I:1755847:05B02:C07 | MA122:C07 |
| 3346 | 8856 | I:1803418:05B02:D07 | MA122:D07 |
| 3347 | 8860 | I:1568725:05B02:F07 | MA122:F07 |
| 3348 | 8861 | I:1857708:05A02:G07 | MA120:G07 |
| 3349 | 8862 | I:1687060:05B02:G07 | MA122:G07 |
| 3350 | 8881 | I:3407289:07A02:A07 | MA128:A07 |
| 3351 | 8883 | I:1235535:07A02:B07 | MA128:B07 |
| 3352 | 8984 | I:1525795:03B02:D07 | MA114:D07 |
| 3353 | 8991 | I:3744592:03A02:H07 | MA112:H07 |
| 3354 | 8995 | I:1485817:01A02:B01 | MA104:B01 |
| 3355 | 8996 | I:2365149:01B02:B01 | MA106:B01 |
| 3356 | 8999 | I:1439677:01A02:D01 | MA104:D01 |
| 3357 | 9006 | I:2372275:01B02:G01 | MA106:G01 |
| 3358 | 9008 | I:3211615:01B02:H01 | MA106:H01 |
| 3359 | 9012 | I:2368282:01B02:B07 | MA106:B07 |
| 3360 | 9095 | I:1737833:04A02:D01 | MA116:D01 |
| 3361 | 9100 | I:2382192:04B02:F01 | MA118:F01 |
| 3362 | 9111 | I:1958902:04A02:D07 | MA116:D07 |
| 3363 | 9118 | I:1704472:04B02:G07 | MA118:G07 |
| 3364 | 9119 | I:1903767:04A02:H07 | MA116:H07 |
| 3365 | 9125 | I:1268080:02A02:C01 | MA108:C01 |
| 3366 | 9141 | I:1347384:02A02:C07 | MA108:C07 |
| 3367 | 9168 | I:2344817:08B01:H02 | MA133:H02 |
| 3368 | 9171 | I:3236109:08A01:B08 | MA131:B08 |
| 3369 | 9247 | I:2832506:07A01:H08 | MA127:H08 |
| 3370 | 9252 | I:1673876:06B01:B02 | MA125:B02 |
| 3371 | 9258 | I:3686211:06B01:E02 | MA125:E02 |
| 3372 | 9264 | I:2449837:06B01:H02 | MA125:H02 |
| 3373 | 9270 | I:1613874:06B01:C08 | MA125:C08 |
| 3374 | 9317 | I:1813409:03A01:C02 | MA111:C02 |
| 3375 | 9329 | I:1975514:03A01:A08 | MA111:A08 |
| 3376 | 9347 | I:1403294:01A01:B02 | MA103:B02 |
| 3377 | 9352 | I:2414624:01B01:D02 | MA105:D02 |
| 3378 | 9360 | I:2901811:01B01:H02 | MA105:H02 |
| 3379 | 9364 | I:2683564:01B01:B08 | MA105:B08 |
| 3380 | 9366 | I:2725511:01B01:C08 | MA105:C08 |
| 3381 | 9441 | I:1431273:04A01:A02 | MA115:A02 |
| 3382 | 9442 | I:1636639:04B01:A02 | MA117:A02 |
| 3383 | 9448 | I:2455617:04B01:D02 | MA117:D02 |
| 3384 | 9452 | I:2952504:04B01:F02 | MA117:F02 |
| 3385 | 9457 | I:1483847:04A01:A08 | MA115:A08 |
| 3386 | 9460 | I:2923150:04B01:B08 | MA117:B08 |
| 3387 | 9467 | I:1813133:04A01:F08 | MA115:F08 |
| 3388 | 9472 | I:2510171:04B01:H08 | MA117:H08 |
| 3389 | 9487 | I:2190284:02A01:H02 | MA107:H02 |
| 3390 | 9540 | I:1522716:05B02:B02 | MA122:B02 |
| 3391 | 9549 | I:1901271:05A02:G02 | MA120:G02 |
| 3392 | 9552 | I:1820522:05B02:H02 | MA122:H02 |
| 3393 | 9553 | I:2365295:05A02:A08 | MA120:A08 |
| 3394 | 9557 | I:1335140:05A02:C08 | MA120:C08 |
| 3395 | 9560 | I:1822577:05B02:D08 | MA122:D08 |
| 3396 | 9618 | I:1306814:06B02:A08 | MA126:A08 |
| 3397 | 9624 | I:3034694:06B02:D08 | MA126:D08 |
| 3398 | 9666 | I:1453049:03B02:A02 | MA114:A02 |
| 3399 | 9672 | I:1453748:03B02:D02 | MA114:D02 |
| 3400 | 9677 | I:3001492:03A02:G02 | MA112:G02 |
| 3401 | 9685 | I:3876715:03A02:C08 | MA112:C08 |
| 3402 | 9687 | I:2992851:03A02:D08 | MA112:D08 |
| 3403 | 9694 | I:1500649:03B02:G08 | MA114:G08 |
| 3404 | 9699 | I:1512943:01A02:B02 | MA104:B02 |
| 3405 | 9703 | I:1467565:01A02:D02 | MA104:D02 |
| 3406 | 9720 | I:2455118:01B02:D08 | MA106:D08 |
| 3407 | 9722 | I:2840251:01B02:E08 | MA106:E08 |
| 3408 | 9770 | I:2911347:10B02:E02 | MA67:E02 |
| 3409 | 9790 | I:1812030:10B02:G08 | MA67:G08 |
| 3410 | 9820 | I:2663606:04B02:F08 | MA118:F08 |
| 3411 | 9833 | I:1308333:02A02:E02 | MA108:E02 |
| 3412 | 9834 | I:1578941:02B02:E02 | MA110:E02 |
| 3413 | 9847 | I:1535439:02A02:D08 | MA108:D08 |
| 3414 | 9856 | I:1857475:02B02:H08 | MA110:H08 |
| 3415 | 9884 | I:2908878:08B01:F09 | MA133:F09 |
| 3416 | 9925 | I:2830575:07A01:C03 | MA127:C03 |
| 3417 | 9934 | I:1557906:07B01:G03 | MA129:G03 |
| 3418 | 9964 | I:2200604:06B01:F03 | MA125:F03 |
| 3419 | 9973 | I:1653326:06A01:C09 | MA123:C09 |
| 3420 | 9981 | I:1720149:06A01:G09 | MA123:G09 |
| 3421 | 10030 | I:1560987:03B01:G03 | MA113:G03 |
| 3422 | 10046 | I:1510714:03B01:G09 | MA113:G09 |
| 3423 | 10050 | I:2501484:01B01:A03 | MA105:A03 |
| 3424 | 10051 | I:1379063:01A01:B03 | MA103:B03 |
| 3425 | 10054 | I:2797902:01B01:C03 | MA105:C03 |
| 3426 | 10062 | I:1805613:01B01:G03 | MA105:G03 |
| 3427 | 10063 | I:1524885:01A01:H03 | MA103:H03 |
| 3428 | 10064 | I:2888464:01B01:H03 | MA105:H03 |
| 3429 | 10148 | I:1992788:04B01:B03 | MA117:B03 |
| 3430 | 10155 | I:1413451:04A01:F03 | MA115:F03 |
| 3431 | 10166 | I:2779515:04B01:C09 | MA117:C09 |
| 3432 | 10206 | I:1583076:02B01:G09 | MA109:G09 |
| 3433 | 10243 | I:3070110:05A02:B03 | MA120:B03 |
| 3434 | 10255 | I:1904493:05A02:H03 | MA120:H03 |
| 3435 | 10257 | I:2860815:05A02:A09 | MA120:A09 |
| 3436 | 10285 | I:1930135:07A02:G03 | MA128:G03 |
| 3437 | 10318 | I:3747901:06B02:G03 | MA126:G03 |
| 3438 | 10321 | I:1720946:06A02:A09 | MA124:A09 |
| 3439 | 10328 | I:2877413:06B02:D09 | MA126:D09 |
| 3440 | 10330 | I:3035279:06B02:E09 | MA126:E09 |
| 3441 | 10393 | I:2503913:03A02:E09 | MA112:E09 |
| 3442 | 10403 | I:1517380:01A02:B03 | MA104:B03 |
| 3443 | 10406 | I:3138128:01B02:C03 | MA106:C03 |
| 3444 | 10409 | I:2453722:01A02:E03 | MA104:E03 |
| 3445 | 10417 | I:1414260:01A02:A09 | MA104:A09 |
| 3446 | 10418 | I:2891247:01B02:A09 | MA106:A09 |
| 3447 | 10427 | I:1682176:01A02:F09 | MA104:F09 |
| 3448 | 10503 | I:2739076:04A02:D03 | MA116:D03 |
| 3449 | 10508 | I:1900378:04B02:F03 | MA118:F03 |
| 3450 | 10509 | I:1603391:04A02:G03 | MA116:G03 |
| 3451 | 10517 | I:2018222:04A02:C09 | MA116:C09 |
| 3452 | 10523 | I:1327263:04A02:F09 | MA116:F09 |
| 3453 | 10547 | I:1734393:02A02:B09 | MA108:B09 |
| 3454 | 10553 | I:2190607:02A02:E09 | MA108:E09 |
| 3455 | 10569 | I:2447969:08A01:E04 | MA131:E04 |
| 3456 | 10592 | I:1753033:08B01:H10 | MA133:H10 |
| 3457 | 10650 | I:2456393:07B01:E10 | MA129:E10 |
| 3458 | 10658 | I:1719920:06B01:A04 | MA125:A04 |
| 3459 | 10672 | I:2927362:06B01:H04 | MA125:H04 |
| 3460 | 10684 | I:4082816:06B01:F10 | MA125:F10 |
| 3461 | 10721 | I:1803446:03A01:A04 | MA111:A04 |
| 3462 | 10725 | I:1557490:03A01:C04 | MA111:C04 |
| 3463 | 10746 | I:1445895:03B01:E10 | MA113:E10 |
| 3464 | 10767 | I:1336836:01A01:H04 | MA103:H04 |
| 3465 | 10778 | I:1802745:01B01:E10 | MA105:E10 |
| 3466 | 10784 | I:2503003:01B01:H10 | MA105:H10 |
| 3467 | 10827 | I:1655377:10A01:F04 | MA64:F04 |
| 3468 | 10849 | I:1430662:04A01:A04 | MA115:A04 |
| 3469 | 10861 | I:3335055:04A01:G04 | MA115:G04 |
| 3470 | 10868 | I:2457671:04B01:B10 | MA117:B10 |
| 3471 | 10901 | I:1641421:02A01:C10 | MA107:C10 |
| 3472 | 10906 | I:1655225:02B01:E10 | MA109:E10 |
| 3473 | 10947 | I:1313325:05A02:B04 | MA120:B04 |
| 3474 | 10962 | I:1558081:05B02:A10 | MA122:A10 |
| 3475 | 10975 | I:1889191:05A02:H10 | MA120:H10 |
| 3476 | 10997 | I:3495906:07A02:C10 | MA128:C10 |
| 3477 | 11095 | I:3704132:03A02:D10 | MA112:D10 |
| 3478 | 11100 | I:1636553:03B02:F10 | MA114:F10 |
| 3479 | 11104 | I:1402228:03B02:H10 | MA114:H10 |
| 3480 | 11107 | I:1361963:01A02:B04 | MA104:B04 |
| 3481 | 11111 | I:1510424:01A02:D04 | MA104:D04 |
| 3482 | 11112 | I:2918558:01B02:D04 | MA106:D04 |
| 3483 | 11127 | I:1731061:01A02:D10 | MA104:D10 |
| 3484 | 11201 | I:2579602:04A02:A04 | MA116:A04 |
| 3485 | 11202 | I:2824181:04B02:A04 | MA118:A04 |
| 3486 | 11203 | I:2123183:04A02:B04 | MA116:B04 |
| 3487 | 11221 | I:1958560:04A02:C10 | MA116:C10 |
| 3488 | 11229 | I:1447903:04A02:G10 | MA116:G10 |
| 3489 | 11257 | I:1875576:02A02:E10 | MA108:E10 |
| 3490 | 11262 | I:1709457:02B02:G10 | MA110:G10 |
| 3491 | 11278 | I:2155675:08B01:G05 | MA133:G05 |
| 3492 | 11329 | I:1635069:07A01:A05 | MA127:A05 |
| 3493 | 11341 | I:1453445:07A01:G05 | MA127:G05 |
| 3494 | 11351 | I:3002566:07A01:D11 | MA127:D11 |
| 3495 | 11365 | I:1631511:06A01:C05 | MA123:C05 |
| 3496 | 11375 | I:1610523:06A01:H05 | MA123:H05 |
| 3497 | 11386 | I:3297656:06B01:E11 | MA125:E11 |
| 3498 | 11392 | I:2509730:06B01:H11 | MA125:H11 |
| 3499 | 11432 | I:2121863:03B01:D05 | MA113:D05 |
| 3500 | 11434 | I:1413704:03B01:E05 | MA113:E05 |
| 3501 | 11441 | I:1626232:03A01:A11 | MA111:A11 |
| 3502 | 11460 | I:2354446:01B01:B05 | MA105:B05 |
| 3503 | 11466 | I:2916753:01B01:E05 | MA105:E05 |
| 3504 | 11473 | I:2555034:01A01:A11 | MA103:A11 |
| 3505 | 11480 | I:2804190:01B01:D11 | MA105:D11 |
| 3506 | 11481 | I:1814488:01A01:E11 | MA103:E11 |
| 3507 | 11482 | I:2474163:01B01:E11 | MA105:E11 |
| 3508 | 11485 | I:1402967:01A01:G11 | MA103:G11 |
| 3509 | 11543 | I:2821541:10A01:D11 | MA64:D11 |
| 3510 | 11554 | I:2888814:04B01:A05 | MA117:A05 |
| 3511 | 11557 | I:1451005:04A01:C05 | MA115:C05 |
| 3512 | 11567 | I:1457726:04A01:H05 | MA115:H05 |
| 3513 | 11568 | I:2883195:04B01:H05 | MA117:H05 |
| 3514 | 11581 | I:1603605:04A01:G11 | MA115:G11 |
| 3515 | 11583 | I:2832224:04A01:H11 | MA115:H11 |
| 3516 | 11585 | I:2231364:02A01:A05 | MA107:A05 |
| 3517 | 11612 | I:1595081:02B01:F11 | MA109:F11 |
| 3518 | 11654 | I:1877913:05B02:C05 | MA122:C05 |
| 3519 | 11660 | I:1666130:05B02:F05 | MA122:F05 |
| 3520 | 11664 | I:1709995:05B02:H05 | MA122:H05 |
| 3521 | 11683 | I:3872557:07A02:B05 | MA128:B05 |
| 3522 | 11705 | I:2734906:07A02:E11 | MA128:E11 |
| 3523 | 11715 | I:1798585:06A02:B05 | MA124:B05 |
| 3524 | 11723 | I:1683389:06A02:F05 | MA124:F05 |
| 3525 | 11725 | I:1704517:06A02:G05 | MA124:G05 |
| 3526 | 11728 | I:2792982:06B02:H05 | MA126:H05 |
| 3527 | 11736 | I:3511355:06B02:D11 | MA126:D11 |
| 3528 | 11777 | I:1738060:03A02:A05 | MA112:A05 |
| 3529 | 11780 | I:1810821:03B02:B05 | MA114:B05 |
| 3530 | 11785 | I:2451279:03A02:E05 | MA112:E05 |
| 3531 | 11786 | I:1431166:03B02:E05 | MA114:E05 |
| 3532 | 11794 | I:2949427:03B02:A11 | MA114:A11 |
| 3533 | 11802 | I:1458366:03B02:E11 | MA114:E11 |
| 3534 | 11806 | I:1525881:03B02:G11 | MA114:G11 |
| 3535 | 11817 | I:2071473:01A02:E05 | MA104:E05 |
| 3536 | 11829 | I:2481012:01A02:C11 | MA104:C11 |
| 3537 | 11830 | I:2816931:01B02:C11 | MA106:C11 |
| 3538 | 11836 | I:1806769:01B02:F11 | MA106:F11 |
| 3539 | 11922 | I:2636634:04B02:A11 | MA118:A11 |
| 3540 | 11962 | I:1649959:02B02:E11 | MA110:E11 |
| 3541 | 11964 | I:1633719:02B02:F11 | MA110:F11 |
| 3542 | 11966 | I:1901035:02B02:G11 | MA110:G11 |
| 3543 | 11990 | I:2503879:08B01:C12 | MA133:C12 |
| 3544 | 12036 | I:2383065:07B01:B06 | MA129:B06 |
| 3545 | 12043 | I:3357245:07A01:F06 | MA127:F06 |
| 3546 | 12045 | I:2832314:07A01:G06 | MA127:G06 |
| 3547 | 12055 | I:3667096:07A01:D12 | MA127:D12 |
| 3548 | 12071 | I:1798283:06A01:D06 | MA123:D06 |
| 3549 | 12131 | I:1648206:03A01:B06 | MA111:B06 |
| 3550 | 12148 | I:3360476:03B01:B12 | MA113:B12 |
| 3551 | 12150 | I:2500511:03B01:C12 | MA113:C12 |
| 3552 | 12152 | I:1730806:03B01:D12 | MA113:D12 |
| 3553 | 12166 | I:2479074:01B01:C06 | MA105:C06 |
| 3554 | 12170 | I:1635004:01B01:E06 | MA105:E06 |
| 3555 | 12174 | I:2378569:01B01:G06 | MA105:G06 |
| 3556 | 12183 | I:2207849:01A01:D12 | MA103:D12 |
| 3557 | 12187 | I:1504554:01A01:F12 | MA103:F12 |
| 3558 | 12258 | I:2989991:04B01:A06 | MA117:A06 |
| 3559 | 12260 | I:2852561:04B01:B06 | MA117:B06 |
| 3560 | 12277 | I:2832839:04A01:C12 | MA115:C12 |
| 3561 | 12282 | I:2845548:04B01:E12 | MA117:E12 |
| 3562 | 12292 | I:1251819:02B01:B06 | MA109:B06 |
| 3563 | 12296 | I:1672930:02B01:D06 | MA109:D06 |
| 3564 | 12298 | I:2122820:02B01:E06 | MA109:E06 |
| 3565 | 12303 | I:2174920:02A01:H06 | MA107:H06 |
| 3566 | 12362 | I:1875994:05B02:E06 | MA122:E06 |
| 3567 | 12365 | I:1858644:05A02:G06 | MA120:G06 |
| 3568 | 12425 | I:1700047:06A02:E06 | MA124:E06 |
| 3569 | 12426 | I:1718257:06B02:E06 | MA126:E06 |
| 3570 | 12427 | I:1612306:06A02:F06 | MA124:F06 |
| 3571 | 12443 | I:1637427:06A02:F12 | MA124:F12 |
| 3572 | 12499 | I:2513883:03A02:B12 | MA112:B12 |
| 3573 | 12525 | I:2645840:01A02:G06 | MA104:G06 |
| 3574 | 12529 | I:1737403:01A02:A12 | MA104:A12 |
| 3575 | 12544 | I:1733522:01B02:H12 | MA106:H12 |
| 3576 | 17049 | RG:160664:10006:E07 | MA155:E07 |
| 3577 | 17065 | I:747335:16A01:E01 | MA87:E01 |
| 3578 | 17071 | I:2085191:16A01:H01 | MA87:H01 |
| 3579 | 17081 | I:1211126:16A01:E07 | MA87:E07 |
| 3580 | 17157 | RG:669310:10010:C01 | MA159:C01 |
| 3581 | 17167 | RG:730402:10010:H01 | MA159:H01 |
| 3582 | 17174 | RG:1047541:10012:C07 | MA161:C07 |
| 3583 | 17178 | RG:1161753:10012:E07 | MA161:E07 |
| 3584 | 17194 | I:1218464:17B01:E01 | MA93:E01 |
| 3585 | 17214 | I:958633:17B01:G07 | MA93:G07 |
| 3586 | 17236 | I:1602726:09B01:B07 | MA137:B07 |
| 3587 | 17379 | RG:205212:10007:B01 | MA156:B01 |
| 3588 | 17395 | RG:207395:10007:B07 | MA156:B07 |
| 3589 | 17422 | I:349535:16B02:G01 | MA90:G01 |
| 3590 | 17423 | I:2323525:16A02:H01 | MA88:H01 |
| 3591 | 17432 | I:1965049:16B02:D07 | MA90:D07 |
| 3592 | 17437 | I:2054436:16A02:G07 | MA88:G07 |
| 3593 | 17515 | RG:1506197:10013:F01 | MA162:F01 |
| 3594 | 17518 | RG:1871436:10015:G01 | MA164:G01 |
| 3595 | 17524 | RG:1705470:10015:B07 | MA164:B07 |
| 3596 | 17556 | I:546910:17B02:B07 | MA94:B07 |
| 3597 | 17580 | I:1799023:09B02:F01 | MA138:F01 |
| 3598 | 17584 | I:2380380:09B02:H01 | MA138:H01 |
| 3599 | 17675 | I:2319269:18A01:F02 | MA95:F02 |
| 3600 | 17687 | I:2296344:18A01:D08 | MA95:D08 |
| 3601 | 17737 | RG:155066:10006:E02 | MA155:E02 |
| 3602 | 17741 | RG:180135:10006:G02 | MA155:G02 |
| 3603 | 17755 | RG:178093:10006:F08 | MA155:F08 |
| 3604 | 17757 | RG:184042:10006:G08 | MA155:G08 |
| 3605 | 17761 | I:1741643:16A01:A02 | MA87:A02 |
| 3606 | 17860 | RG:928026:10012:B02 | MA161:B02 |
| 3607 | 17862 | RG:1032969:10012:C02 | MA161:C02 |
| 3608 | 17872 | RG:1322660:10012:H02 | MA161:H02 |
| 3609 | 17876 | RG:968474:10012:B08 | MA161:B08 |
| 3610 | 17878 | RG:1047592:10012:C08 | MA161:C08 |
| 3611 | 17914 | I:617750:17B01:E08 | MA93:E08 |
| 3612 | 17934 | I:2808775:09B01:G02 | MA137:G02 |
| 3613 | 18035 | I:966692:18A02:B08 | MA96:B08 |
| 3614 | 18085 | RG:209240:10007:C02 | MA156:C02 |
| 3615 | 18087 | RG:223355:10007:D02 | MA156:D02 |
| 3616 | 18095 | RG:267629:10007:H02 | MA156:H02 |
| 3617 | 18134 | I:2246234:16B02:C08 | MA90:C08 |
| 3618 | 18212 | RG:1696513:10015:B02 | MA164:B02 |
| 3619 | 18216 | RG:1733895:10015:D02 | MA164:D02 |
| 3620 | 18225 | RG:1353930:10013:A08 | MA162:A08 |
| 3621 | 18238 | RG:1881947:10015:G08 | MA164:G08 |
| 3622 | 18443 | RG:166575:10006:F03 | MA155:F03 |
| 3623 | 18465 | I:1998994:16A01:A03 | MA87:A03 |
| 3624 | 18471 | I:1953051:16A01:D03 | MA87:D03 |
| 3625 | 18473 | I:518826:16A01:E03 | MA87:E03 |
| 3626 | 18483 | I:81490:16A01:B09 | MA87:B09 |
| 3627 | 18572 | RG:1256163:10012:F03 | MA161:F03 |
| 3628 | 18584 | RG:1132085:10012:D09 | MA161:D09 |
| 3629 | 18614 | I:2132717:17B01:C09 | MA93:C09 |
| 3630 | 18620 | I:1998428:17B01:F09 | MA93:F09 |
| 3631 | 18787 | RG:206694:10007:B03 | MA156:B03 |
| 3632 | 18811 | RG:261714:10007:F09 | MA156:F09 |
| 3633 | 18821 | I:1461515:16A02:C03 | MA88:C03 |
| 3634 | 18831 | I:338859:16A02:H03 | MA88:H03 |
| 3635 | 18845 | I:1425861:16A02:G09 | MA88:G09 |
| 3636 | 18848 | I:1928644:16B02:H09 | MA90:H09 |
| 3637 | 18917 | RG:1404414:10013:C03 | MA162:C03 |
| 3638 | 18919 | RG:1415437:10013:D03 | MA162:D03 |
| 3639 | 18920 | RG:1734353:10015:D03 | MA164:D03 |
| 3640 | 18926 | RG:1872251:10015:G03 | MA164:G03 |
| 3641 | 18929 | RG:1354408:10013:A09 | MA162:A09 |
| 3642 | 18930 | RG:1690198:10015:A09 | MA164:A09 |
| 3643 | 18937 | RG:1476452:10013:E09 | MA162:E09 |
| 3644 | 18988 | I:2069305:09B02:F03 | MA138:F03 |
| 3645 | 19088 | I:1966067:18B01:H04 | MA97:H04 |
| 3646 | 19090 | I:2128547:18B01:A10 | MA97:A10 |
| 3647 | 19143 | RG:149960:10006:D04 | MA155:D04 |
| 3648 | 19147 | RG:171569:10006:F04 | MA155:F04 |
| 3649 | 19163 | RG:178638:10006:F10 | MA155:F10 |
| 3650 | 19167 | RG:195122:10006:H10 | MA155:H10 |
| 3651 | 19195 | I:814216:16A01:F10 | MA87:F10 |
| 3652 | 19265 | RG:491163:10010:A04 | MA159:A04 |
| 3653 | 19266 | RG:827185:10012:A04 | MA161:A04 |
| 3654 | 19272 | RG:1129102:10012:D04 | MA161:D04 |
| 3655 | 19279 | RG:730938:10010:H04 | MA159:H04 |
| 3656 | 19282 | RG:925984:10012:A10 | MA161:A10 |
| 3657 | 19283 | RG:668442:10010:B10 | MA159:B10 |
| 3658 | 19284 | RG:1028911:10012:B10 | MA161:B10 |
| 3659 | 19285 | RG:684866:10010:C10 | MA159:C10 |
| 3660 | 19292 | RG:1283076:10012:F10 | MA161:F10 |
| 3661 | 19309 | I:627654:17A01:G04 | MA91:G04 |
| 3662 | 19319 | I:1833801:17A01:D10 | MA91:D10 |
| 3663 | 19328 | I:961473:17B01:H10 | MA93:H10 |
| 3664 | 19348 | I:2556708:09B01:B10 | MA137:B10 |
| 3665 | 19511 | RG:243565:10007:D10 | MA156:D10 |
| 3666 | 19517 | RG:266649:10007:G10 | MA156:G10 |
| 3667 | 19524 | I:2013513:16B02:B04 | MA90:B04 |
| 3668 | 19539 | I:2312442:16A02:B10 | MA88:B10 |
| 3669 | 19543 | I:2060626:16A02:D10 | MA88:D10 |
| 3670 | 19623 | RG:1415858:10013:D04 | MA162:D04 |
| 3671 | 19627 | RG:1517435:10013:F04 | MA162:F04 |
| 3672 | 19632 | RG:1914716:10015:H04 | MA164:H04 |
| 3673 | 19633 | RG:1354528:10013:A10 | MA162:A10 |
| 3674 | 19636 | RG:1706414:10015:310 | MA164:B10 |
| 3675 | 19653 | I:1998510:17A02:C04 | MA92:C04 |
| 3676 | 19678 | I:899118:17B02:G10 | MA94:G10 |
| 3677 | 19684 | I:2680168:09B02:B04 | MA138:B04 |
| 3678 | 19690 | I:1354558:09B02:E04 | MA138:E04 |
| 3679 | 19708 | I:1665871:09B02:F10 | MA138:F10 |
| 3680 | 19782 | I:1922084:18B01:C05 | MA97:C05 |
| 3681 | 19795 | I:2307946:18A01:B11 | MA95:B11 |
| 3682 | 19798 | I:1923572:18B01:C11 | MA97:C11 |
| 3683 | 19851 | RG:171993:10006:F05 | MA155:F05 |
| 3684 | 19859 | RG:129317:10006:B11 | MA155:B11 |
| 3685 | 19863 | RG:153244:10006:D11 | MA155:D11 |
| 3686 | 19871 | RG:196236:10006:H11 | MA155:H11 |
| 3687 | 19893 | I:557538:16A01:C11 | MA87:C11 |
| 3688 | 19899 | I:782235:16A01:F11 | MA87:F11 |
| 3689 | 19980 | RG:1257341:10012:F05 | MA161:F05 |
| 3690 | 19981 | RG:727387:10010:G05 | MA159:G05 |
| 3691 | 19992 | RG:1145235:10012:D11 | MA161:D11 |
| 3692 | 19995 | RG:725145:10010:F11 | MA159:F11 |
| 3693 | 19999 | RG:740079:10010:H11 | MA159:H11 |
| 3694 | 20042 | I:1873176:09B01:E05 | MA137:E05 |
| 3695 | 20056 | I:2081974:09B01:D11 | MA137:D11 |
| 3696 | 20141 | I:2107723:18A02:G05 | MA96:G05 |
| 3697 | 20211 | RG:207777:10007:B11 | MA156:B11 |
| 3698 | 20213 | RG:221172:10007:C11 | MA156:C11 |
| 3699 | 20230 | I:1968436:16B02:C05 | MA90:C05 |
| 3700 | 20253 | I:2060973:16A02:G11 | MA88:G11 |
| 3701 | 20323 | RG:1369494:10013:B05 | MA162:B05 |
| 3702 | 20330 | RG:1752177:10015:E05 | MA164:E05 |
| 3703 | 20331 | RG:1519327:10013:F05 | MA162:F05 |
| 3704 | 20338 | RG:1694569:10015:A11 | MA164:A11 |
| 3705 | 20346 | RG:1839794:10015:E11 | MA164:E11 |
| 3706 | 20359 | I:514124:17A02:D05 | MA92:D05 |
| 3707 | 20365 | I:997782:17A02:G05 | MA92:G05 |
| 3708 | 20412 | I:1709364:09B02:F11 | MA138:F11 |
| 3709 | 20485 | I:2004896:18A01:C06 | MA95:C06 |
| 3710 | 20555 | RG:172982:10006:F06 | MA155:F06 |
| 3711 | 20557 | RG:180978:10006:G06 | MA155:G06 |
| 3712 | 20563 | RG:129528:10006:B12 | MA155:B12 |
| 3713 | 20573 | RG:186511:10006:G12 | MA155:G12 |
| 3714 | 20580 | I:2005910:16B01:B06 | MA89:B06 |
| 3715 | 20583 | I:620871:16A01:D06 | MA87:D06 |
| 3716 | 20593 | I:1920819:16A01:A12 | MA87:A12 |
| 3717 | 20601 | I:990375:16A01:E12 | MA87:E12 |
| 3718 | 20605 | I:690313:16A01:G12 | MA87:G12 |
| 3719 | 20674 | RG:878195:10012:A06 | MA161:A06 |
| 3720 | 20679 | RG:687128:10010:D06 | MA159:D06 |
| 3721 | 20712 | I:884855:17B01:D06 | MA93:D06 |
| 3722 | 20716 | I:1218621:17B01:F06 | MA93:F06 |
| 3723 | 20719 | I:620371:17A01:H06 | MA91:H06 |
| 3724 | 20744 | I:1681610:09B01:D06 | MA137:D06 |
| 3725 | 20909 | RG:265206:10007:G06 | MA156:G06 |
| 3726 | 20911 | RG:268073:10007:H06 | MA156:H06 |
| 3727 | 20939 | I:2117221:16A02:F06 | MA88:F06 |
| 3728 | 20942 | I:1760693:16B02:G06 | MA90:G06 |
| 3729 | 20948 | I:776793:16B02:B12 | MA90:B12 |
| 3730 | 21029 | RG:1405692:10013:C06 | MA162:C06 |
| 3731 | 21044 | RG:1707747:10015:B12 | MA164:B12 |
| 3732 | 21046 | RG:1722789:10015:C12 | MA164:C12 |
| 3733 | 21066 | I:2112348:17B02:E06 | MA94:E06 |
| 3734 | 21067 | I:630458:17A02:F06 | MA92:F06 |
| 3735 | 21071 | I:901577:17A02:H06 | MA92:H06 |
| 3736 | 21082 | I:2298081:17B02:E12 | MA94:E12 |
| 3737 | 21120 | I:2718565:09B02:H12 | MA138:H12 |
| 3738 | 21122 | M00056237C:E03 | MA181:A01 |
| 3739 | 21130 | M00055261C:F04 | MA197:E01 |
| 3740 | 21144 | M00055353D:A04 | MA197:D07 |
| 3741 | 21152 | M00055357B:B10 | MA197:H07 |
| 3742 | 21189 | M00056386D:H12 | MA173:C01 |
| 3743 | 21191 | M00056394B:B04 | MA173:D01 |
| 3744 | 21193 | M00056395A:B04 | MA173:E01 |
| 3745 | 21195 | M00056396B:G05 | MA173:F01 |
| 3746 | 21198 | M00056137A:A05 | MA180:G01 |
| 3747 | 21199 | M00056401C:C03 | MA173:H01 |
| 3748 | 21209 | M00056484A:F06 | MA173:E07 |
| 3749 | 21212 | M00056193B:C11 | MA180:F07 |
| 3750 | 21213 | M00056484B:B07 | MA173:G07 |
| 3751 | 21214 | M00056193B:D06 | MA180:G07 |
| 3752 | 21216 | M00056194B:G06 | MA180:H07 |
| 3753 | 21217 | M00054633D:B07 | MA187:A01 |
| 3754 | 21219 | M00054633D:E06 | MA187:B01 |
| 3755 | 21232 | M00054848A:C03 | MA189:H01 |
| 3756 | 21234 | M00054882C:C06 | MA189:A07 |
| 3757 | 21237 | M00054678D:A03 | MA187:C07 |
| 3758 | 21239 | M00054679B:B03 | MA187:D07 |
| 3759 | 21245 | M00054680B:D06 | MA187:G07 |
| 3760 | 21247 | M00054680C:A06 | MA187:H07 |
| 3761 | 21252 | M00057176B:F11 | MA193:B01 |
| 3762 | 21254 | M00057181A:D01 | MA193:C01 |
| 3763 | 21272 | M00057219D:B04 | MA193:D07 |
| 3764 | 21281 | M00042341A:D12 | MA167:A01 |
| 3765 | 21284 | M00042433B:G09 | MA171:B01 |
| 3766 | 21288 | M00042435A:F08 | MA171:D01 |
| 3767 | 21290 | M00042437B:G03 | MA171:E01 |
| 3768 | 21291 | M00042525D:E07 | MA167:F01 |
| 3769 | 21292 | M00042438B:D01 | MA171:F01 |
| 3770 | 21293 | M00042529C:G07 | MA167:G01 |
| 3771 | 21295 | M00042529D:B12 | MA167:H01 |
| 3772 | 21297 | M00042700A:E05 | MA167:A07 |
| 3773 | 21300 | M00042777D:G05 | MA171:B07 |
| 3774 | 21304 | M00042781C:F03 | MA171:D07 |
| 3775 | 21306 | M00042783C:F10 | MA171:E07 |
| 3776 | 21307 | M00042702D:B02 | MA167:F07 |
| 3777 | 21312 | M00042785B:F11 | MA171:H07 |
| 3778 | 21329 | M00056566C:C03 | MA174:A07 |
| 3779 | 21333 | M00056567B:A09 | MA174:C07 |
| 3780 | 21341 | M00056569B:D09 | MA174:G07 |
| 3781 | 21343 | M00056571D:E05 | MA174:H07 |
| 3782 | 21349 | RG:376801:10009:C01 | MA158:C01 |
| 3783 | 21363 | RG:365436:10009:B07 | MA158:B07 |
| 3784 | 21367 | RG:416839:10009:D07 | MA158:D07 |
| 3785 | 21370 | RG:784224:10011:E07 | MA160:E07 |
| 3786 | 21374 | RG:796852:10011:G07 | MA160:G07 |
| 3787 | 21386 | M00043412A:F04 | MA184:E01 |
| 3788 | 21391 | M00057273B:H10 | MA182:H01 |
| 3789 | 21396 | M00054506C:B10 | MA184:B07 |
| 3790 | 21404 | M00054507D:G03 | MA184:F07 |
| 3791 | 21418 | M00054935B:B03 | MA198:E01 |
| 3792 | 21424 | M00054935D:C11 | MA198:H01 |
| 3793 | 21432 | M00054976A:E09 | MA198:D07 |
| 3794 | 21461 | M00055788B:F08 | MA170:C07 |
| 3795 | 21469 | M00055791A:E10 | MA170:G07 |
| 3796 | 21497 | M00055224C:H11 | MA196:E07 |
| 3797 | 21539 | M00055932A:C02 | MA179:B01 |
| 3798 | 21542 | M00056908A:F12 | MA177:C01 |
| 3799 | 21543 | M00055935D:B06 | MA179:D01 |
| 3800 | 21546 | M00056908D:D08 | MA177:E01 |
| 3801 | 21547 | M00055942B:F08 | MA179:F01 |
| 3802 | 21550 | M00056910A:B07 | MA177:G01 |
| 3803 | 21568 | M00056952B:C08 | MA177:H07 |
| 3804 | 21569 | M00054728C:E03 | MA188:A01 |
| 3805 | 21571 | M00054728D:E06 | MA188:B01 |
| 3806 | 21583 | M00054731C:H01 | MA188:H01 |
| 3807 | 21591 | M00054778B:A12 | MA188:D07 |
| 3808 | 21595 | M00054778C:D08 | MA188:F07 |
| 3809 | 21599 | M00054780A:G06 | MA188:H07 |
| 3810 | 21633 | M00042899D:D02 | MA168:A01 |
| 3811 | 21638 | M00042831B:G10 | MA172:C01 |
| 3812 | 21640 | M00042833A:G07 | MA172:D01 |
| 3813 | 21641 | M00042906D:F05 | MA168:E01 |
| 3814 | 21645 | M00042910C:A02 | MA168:G01 |
| 3815 | 21648 | M00042838C:D06 | MA172:H01 |
| 3816 | 21650 | M00042867B:F03 | MA172:A07 |
| 3817 | 21651 | M00055439B:G05 | MA168:B07 |
| 3818 | 21659 | M00055442D:E12 | MA168:F07 |
| 3819 | 21667 | M00056711D:A02 | MA175:B01 |
| 3820 | 21681 | M00056771C:A12 | MA175:A07 |
| 3821 | 21685 | M00056772D:G07 | MA175:C07 |
| 3822 | 21691 | M00056782D:E04 | MA175:F07 |
| 3823 | 21693 | M00056785D:G01 | MA175:G07 |
| 3824 | 21695 | M00056788C:A01 | MA175:H07 |
| 3825 | 21723 | RG:1663880:10014:F07 | MA163:F07 |
| 3826 | 21733 | M00043310B:D08 | MA183:C01 |
| 3827 | 21734 | M00054538C:G03 | MA185:C01 |
| 3828 | 21743 | M00043315C:G05 | MA183:H01 |
| 3829 | 21764 | M00055397B:E08 | MA199:B01 |
| 3830 | 21765 | M00056624B:H11 | MA186:C01 |
| 3831 | 21786 | M00055423C:C03 | MA199:E07 |
| 3832 | 21787 | M00056668D:C06 | MA186:F07 |
| 3833 | 21789 | M000566698:A10 | MA186:G07 |
| 3834 | 21790 | M00055424A:D01 | MA199:G07 |
| 3835 | 21791 | M00056669B:E07 | MA186:H07 |
| 3836 | 21792 | M00055424D:F01 | MA199:H07 |
| 3837 | 21798 | M00056243A:H07 | MA181:C02 |
| 3838 | 21800 | M00056243C:G10 | MA181:D02 |
| 3839 | 21803 | M00055528D:H03 | MA169:F02 |
| 3840 | 21811 | M00055607B:A11 | MA169:B08 |
| 3841 | 21842 | M00055363C:E02 | MA197:A08 |
| 3842 | 21852 | M00055373D:H02 | MA197:F08 |
| 3843 | 21856 | M00055374D:E01 | MA197:H08 |
| 3844 | 21889 | M00056401D:D09 | MA173:A02 |
| 3845 | 21892 | M00056139D:A10 | MA180:B02 |
| 3846 | 21896 | M00056140A:E11 | MA180:D02 |
| 3847 | 21898 | M00056142D:A08 | MA180:E02 |
| 3848 | 21899 | M00056412D:A09 | MA173:F02 |
| 3849 | 21900 | M00056142D:H11 | MA180:F02 |
| 3850 | 21901 | M00056414C:F03 | MA173:G02 |
| 3851 | 21908 | M00056196A:H09 | MA180:B08 |
| 3852 | 21912 | M00056200A:E11 | MA180:D08 |
| 3853 | 21913 | M00056488C:G01 | MA173:E08 |
| 3854 | 21914 | M00056200B:B01 | MA180:E08 |
| 3855 | 21916 | M00056203B:G08 | MA180:F08 |
| 3856 | 21919 | M00056493A:F09 | MA173:H08 |
| 3857 | 21923 | M00054640D:D12 | MA187:B02 |
| 3858 | 11927 | M00054643B:F04 | MA187:D02 |
| 3859 | 21929 | M00054643B:D08 | MA187:E02 |
| 3860 | 21932 | M00054854D:B06 | MA189:F02 |
| 3861 | 21933 | M00054644B:F02 | MA187:G02 |
| 3862 | 21934 | M00054857A:E08 | MA189:G02 |
| 3863 | 21939 | M00054681D:G03 | MA187:B08 |
| 3864 | 21943 | M00054682D:F11 | MA187:D08 |
| 3865 | 21947 | M00054684B:C07 | MA197:F08 |
| 3866 | 21960 | M00057191B:E11 | MA193:D02 |
| 3867 | 21966 | M00057194B:G12 | MA193:G02 |
| 3868 | 21972 | M00057222D:G09 | MA193:B08 |
| 3869 | 21985 | M00042531B:H03 | MA167:A02 |
| 3870 | 21986 | M00042440C:G04 | MA171:A02 |
| 3871 | 21989 | M00042533C:D02 | MA167:C02 |
| 3872 | 21993 | M00042536D:H05 | MA167:E02 |
| 3873 | 21994 | M00042465B:E04 | MA171:E02 |
| 3874 | 21995 | M00042537D:F10 | MA167:F02 |
| 3875 | 21996 | M00042467B:B04 | MA171:F02 |
| 3876 | 21997 | M00042538D:D12 | MA167:G02 |
| 3877 | 21998 | M00042467B:B08 | MA171:G02 |
| 3878 | 22003 | M00042711B:G09 | MA167:B08 |
| 3879 | 22004 | M00042790B:E12 | MA171:B08 |
| 3880 | 22006 | M00042791A:C10 | MA171:C08 |
| 3881 | 22007 | M00042711C:H05 | MA167:D08 |
| 3882 | 22016 | M00042801D:B02 | MA171:H08 |
| 3883 | 22016 | M00042801D:B02 | MA171:H08 |
| 3884 | 22021 | M00056532A:D09 | MA174:C02 |
| 3885 | 22025 | M00056533D:H04 | MA174:E02 |
| 3886 | 22035 | M00056575B:C04 | MA174:B08 |
| 3887 | 22037 | M00056578C:A09 | MA174:C08 |
| 3888 | 22044 | RG:1862465:20001:D08 | MA139:D08 |
| 3889 | 22044 | RG:1862465:20001:F08 | MA139:F08 |
| 3890 | 22049 | RG:347381:10009:A02 | MA158:A02 |
| 3891 | 22071 | RG:417093:10009:D08 | MA158:D08 |
| 3892 | 22082 | M00043413B:C04 | MA184:A02 |
| 3893 | 22092 | M00043502D:C12 | MA184:F02 |
| 3894 | 22105 | M00057341B:B11 | MA182:E08 |
| 3895 | 22110 | M00054512A:F11 | MA184:G08 |
| 3896 | 22111 | M00042353A:D05 | MA182:H08 |
| 3897 | 22116 | M00054937B:D09 | MA198:B02 |
| 3898 | 22167 | M00055797C:H09 | MA170:D08 |
| 3899 | 22169 | M00055799B:C01 | MA170:E08 |
| 3900 | 22183 | M00055194C:G12 | MA196:D02 |
| 3901 | 22195 | M00055233B:D08 | MA196:B08 |
| 3902 | 22255 | M00055966C:D06 | MA179:H02 |
| 3903 | 22263 | M00056024B:B06 | MA179:D08 |
| 3904 | 22265 | M00056024C:G04 | MA179:E08 |
| 3905 | 22279 | M00054737D:F10 | MA188:D02 |
| 3906 | 22289 | M00054780D:C09 | MA188:A08 |
| 3907 | 22295 | M00054787A:E09 | MA188:D08 |
| 3908 | 22297 | M00054806B:E11 | MA188:E08 |
| 3909 | 22339 | M00042913B:C11 | MA168:B02 |
| 3910 | 22343 | M00042915B:B10 | MA168:D02 |
| 3911 | 22345 | M00054792C:E12 | MA168:E02 |
| 3912 | 22350 | M00042842A:C01 | MA172:G02 |
| 3913 | 22367 | M00055450A:C09 | MA168:H08 |
| 3914 | 22399 | M00056804C:D01 | MA175:H08 |
| 3915 | 22423 | RG:1647954:10014:D08 | MA163:D08 |
| 3916 | 22427 | RG:1664311:10014:F08 | MA163:F08 |
| 3917 | 22429 | RG:1671377:10014:G08 | MA163:G08 |
| 3918 | 22437 | M00043316B:F10 | MA183:C02 |
| 3919 | 22440 | M00054545B:A03 | MA185:D02 |
| 3920 | 22442 | M00054545B:B09 | MA185:E02 |
| 3921 | 22456 | M00054575A:B09 | MA185:D08 |
| 3922 | 22459 | M00043374B:H05 | MA183:F08 |
| 3923 | 22475 | M00056641A:G11 | MA186:F02 |
| 3924 | 22479 | M00056642A:D08 | MA186:H02 |
| 3925 | 22480 | M00055403B:B11 | MA199:H02 |
| 3926 | 22495 | M00056676B:C11 | MA186:H08 |
| 3927 | 22499 | M00055530D:B02 | MA169:B03 |
| 3928 | 22502 | M00056253A:D06 | MA181:C03 |
| 3929 | 22504 | M00056253B:B06 | MA181:D03 |
| 3930 | 22519 | M00055642D:F09 | MA169:D09 |
| 3931 | 22521 | M00055643A:E09 | MA169:E09 |
| 3932 | 22523 | M00055643D:E02 | MA169:F09 |
| 3933 | 22548 | M00055376D:D08 | MA197:B09 |
| 3934 | 22595 | M00056415C:D02 | MA173:B03 |
| 3935 | 22596 | M00056146D:F05 | MA180:B03 |
| 3936 | 22597 | M00056417A:F02 | MA173:C03 |
| 3937 | 22598 | M00056148A:B07 | MA180:C03 |
| 3938 | 22599 | M00056420C:E07 | MA173:D03 |
| 3939 | 22600 | M00056150A:E04 | MA180:D03 |
| 3940 | 22603 | M00056421C:H11 | MA173:F03 |
| 3941 | 22604 | M00056150C:A10 | MA180:F03 |
| 3942 | 22605 | M00056421D:H05 | MA173:G03 |
| 3943 | 22606 | M00056150C:C04 | MA180:G03 |
| 3944 | 22607 | M00056422B:D11 | MA173:H03 |
| 3945 | 22608 | M00056151C:A12 | MA180:H03 |
| 3946 | 22609 | M00056493C:E06 | MA173:A09 |
| 3947 | 22610 | M00056205D:E03 | MA180:A09 |
| 3948 | 22611 | M00056495A:G10 | MA173:B09 |
| 3949 | 22618 | M00056206D:B10 | MA180:E09 |
| 3950 | 22623 | M00056501D:C08 | MA173:H09 |
| 3951 | 22624 | M00056209D:H10 | MA180:H09 |
| 3952 | 22627 | M00054645B:C12 | MA187:B03 |
| 3953 | 22629 | M00054646A:B10 | MA187:C03 |
| 3954 | 22637 | M00054647D:E01 | MA187:G03 |
| 3955 | 22666 | M00057202C:G06 | MA193:E03 |
| 3956 | 22668 | M00057202D:C11 | MA193:F03 |
| 3957 | 22693 | M00042549A:G12 | MA167:C03 |
| 3958 | 22695 | M00042549D:F03 | MA167:D03 |
| 3959 | 22697 | M00042551B:D12 | MA167:E03 |
| 3960 | 22698 | M00042513A:D03 | MA171:E03 |
| 3961 | 22700 | M00042513D:A12 | MA171:F03 |
| 3962 | 22703 | M00042551D:D12 | MA167:H03 |
| 3963 | 22705 | M00042717B:D05 | MA167:A09 |
| 3964 | 22707 | M00042719D:C09 | MA167:B09 |
| 3965 | 22710 | M00042803C:F11 | MA171:C09 |
| 3966 | 22714 | M00042805D:D12 | MA171:E09 |
| 3967 | 22715 | M00042731A:G04 | MA167:F09 |
| 3968 | 22718 | M00042806C:E09 | MA171:G09 |
| 3969 | 22720 | M00042806D:F08 | MA171:H09 |
| 3970 | 22725 | M00056537A:F05 | MA174:C03 |
| 3971 | 22727 | M00056537D:A07 | MA174:D03 |
| 3972 | 22734 | RG:1862584:20001:G03 | MA139:G03 |
| 3973 | 22737 | M00056585D:D05 | MA174:A09 |
| 3974 | 22739 | M00056586C:B08 | MA174:B09 |
| 3975 | 22745 | M00056592A:B08 | MA174:E09 |
| 3976 | 22757 | RG:378550:10009:C03 | MA158:C03 |
| 3977 | 22780 | RG:789040:10011:F09 | MA160:F09 |
| 3978 | 22787 | M00057283A:D01 | MA182:B03 |
| 3979 | 22792 | M00043505A:E07 | MA184:D03 |
| 3980 | 22798 | M00043506B:G10 | MA184:G03 |
| 3981 | 22800 | M00043507A:B02 | MA184:H03 |
| 3982 | 22801 | M00042353C:F02 | MA182:A09 |
| 3983 | 22812 | M00054516B:A08 | MA184:F09 |
| 3984 | 22834 | M00054986D:B04 | MA198:A09 |
| 3985 | 22836 | M00054987C:B10 | MA198:B09 |
| 3986 | 22838 | M00054988D:B11 | MA198:C09 |
| 3987 | 22857 | M00055743C:G08 | MA170:E03 |
| 3988 | 22887 | M00055196B:C09 | MA196:D03 |
| 3989 | 22899 | M00055238B:G05 | MA196:B09 |
| 3990 | 22910 | M00056207B:H06 | MA180:G09 |
| 3991 | 22945 | M00055966C:G04 | MA179:A03 |
| 3992 | 22946 | M00056920D:C08 | MA177:A03 |
| 3993 | 22949 | M00055969D:D01 | MA179:C03 |
| 3994 | 22969 | M00056055D:F06 | MA179:E09 |
| 3995 | 22970 | M00056956B:G12 | MA177:E09 |
| 3996 | 22971 | M00056060D:C04 | MA179:F09 |
| 3997 | 22973 | M00056061C:H04 | MA179:G09 |
| 3998 | 22977 | M00054743C:E05 | MA188:A03 |
| 3999 | 22979 | M00054744C:B02 | MA188:B03 |
| 4000 | 22997 | M00054808A:E02 | MA188:C09 |
| 4001 | 23005 | M00054811A:G01 | MA188:G09 |
| 4002 | 23041 | M00054797C:G10 | MA168:A03 |
| 4003 | 23042 | M00042843B:H01 | MA172:A03 |
| 4004 | 23048 | M00042844D:D10 | MA172:D03 |
| 4005 | 23050 | M00042845D:A12 | MA172:E03 |
| 4006 | 23053 | M00054800C:H10 | MA168:G03 |
| 4007 | 23055 | M00054911D:E09 | MA168:H03 |
| 4008 | 23057 | M00055450A:G03 | MA168:A09 |
| 4009 | 23063 | M00055456B:H05 | MA168:D09 |
| 4010 | 23079 | M00056733C:D03 | MA175:D03 |
| 4011 | 23087 | M00056737D:E08 | MA175:H03 |
| 4012 | 23097 | M00056809B:A12 | MA175:E09 |
| 4013 | 23101 | M00056809D:C07 | MA175:G09 |
| 4014 | 23131 | RG:1664308:10014:F09 | MA163:F09 |
| 4015 | 23139 | M00043321A:G07 | MA183:B03 |
| 4016 | 23142 | M00054549A:F03 | MA185:C03 |
| 4017 | 23159 | M00043381A:C08 | MA183:D09 |
| 4018 | 23169 | M00056642B:G03 | MA186:A03 |
| 4019 | 23199 | M00056688C:A07 | MA186:H09 |
| 4020 | 23202 | M00056257C:G03 | MA181:A04 |
| 4021 | 23213 | M00055545C:F11 | MA169:G04 |
| 4022 | 23221 | M00055653C:F04 | MA169:C10 |
| 4023 | 23223 | M00055653D:F01 | MA169:D10 |
| 4024 | 23252 | M00055385A:C11 | MA197:B10 |
| 4025 | 23304 | M00056157A:F11 | MA180:D04 |
| 4026 | 23306 | M00056160A:F03 | MA180:E04 |
| 4027 | 23307 | M00056426A:H07 | MA173:F04 |
| 4028 | 23318 | M00056214C:B04 | MA180:C10 |
| 4029 | 23320 | M00056216A:F10 | MA180:D10 |
| 4030 | 23325 | M00056507A:G11 | MA173:G10 |
| 4031 | 23329 | M00054648C:C10 | MA187:A04 |
| 4032 | 23330 | M00054862A:H11 | MA189:A04 |
| 4033 | 23331 | M00054648D:F12 | MA187:B04 |
| 4034 | 23335 | M00054650C:H08 | MA187:D04 |
| 4035 | 23344 | M00054868C:C11 | MA189:H04 |
| 4036 | 23351 | M00054700C:E02 | MA187:D10 |
| 4037 | 23356 | M00054902D:G11 | MA189:F10 |
| 4038 | 23358 | M00054903B:G06 | MA189:G10 |
| 4039 | 23359 | M00054706A:D05 | MA187:H10 |
| 4040 | 23366 | M00057207A:D05 | MA193:C04 |
| 4041 | 23368 | M00057207C:F06 | MA193:D04 |
| 4042 | 23372 | M00057208B:F11 | MA193:F04 |
| 4043 | 23382 | M00057242B:B10 | MA193:C10 |
| 4044 | 23397 | M00042555A:E06 | MA167:C04 |
| 4045 | 23399 | M00042561A:H03 | MA167:D04 |
| 4046 | 23402 | M00042756C:E10 | MA171:E04 |
| 4047 | 23404 | M00042758D:F01 | MA171:F04 |
| 4048 | 23408 | M00042759B:E02 | MA171:H04 |
| 4049 | 23412 | M00042808D:D03 | MA171:B10 |
| 4050 | 23414 | M00042808D:D10 | MA171:C10 |
| 4051 | 23416 | M00042811B:A05 | MA171:D10 |
| 4052 | 23417 | M00042746B:F05 | MA167:E10 |
| 4053 | 23421 | M00042746C:D01 | MA167:G10 |
| 4054 | 23422 | M00042812D:B04 | MA171:G10 |
| 4055 | 23425 | M00056546B:F12 | MA174:A04 |
| 4056 | 23439 | M00056550A:G09 | MA174:H04 |
| 4057 | 23453 | M00056610C:B08 | MA174:G10 |
| 4058 | 23460 | RG:745556:10011:B04 | MA160:B04 |
| 4059 | 23469 | RG:446537:10009:G04 | MA158:G04 |
| 4060 | 23475 | RG:375937:10009:B10 | MA158:B10 |
| 4061 | 23476 | RG:755120:10011:B10 | MA160:B10 |
| 4062 | 23480 | RG:781108:10011:D10 | MA160:D10 |
| 4063 | 23505 | M00042450C:H10 | MA182:A10 |
| 4064 | 23507 | M00042451B:B05 | MA182:B10 |
| 4065 | 23508 | M00054517D:D12 | MA184:B10 |
| 4066 | 23544 | M00055002B:G06 | MA198:D10 |
| 4067 | 23555 | M00055749A:C09 | MA170:B04 |
| 4068 | 23559 | M00055750A:F10 | MA170:D04 |
| 4069 | 23565 | M00055757A:H06 | MA170:G04 |
| 4070 | 23591 | M00055200B:F03 | MA196:D04 |
| 4071 | 23595 | M00055203B:F05 | MA196:F04 |
| 4072 | 23657 | M00055980B:F12 | MA179:E04 |
| 4073 | 23667 | M00056066C:H10 | MA179:B10 |
| 4074 | 23669 | M00056067B:F12 | MA179:C10 |
| 4075 | 23671 | M00056075D:H10 | MA179:D10 |
| 4076 | 23672 | M00056962D:A05 | MA177:D10 |
| 4077 | 23673 | M00056081D:B09 | MA179:E10 |
| 4078 | 23674 | M00056963A:E01 | MA177:E10 |
| 4079 | 23675 | M00056081D:C02 | MA179:F10 |
| 4080 | 23678 | M00056964D:C08 | MA177:G10 |
| 4081 | 23679 | M00056084A:B08 | MA179:H10 |
| 4082 | 23683 | M00054750C:G08 | MA188:B04 |
| 4083 | 23685 | M00054750D:F04 | MA188:C04 |
| 4084 | 23693 | M00054757A:F05 | MA188:G04 |
| 4085 | 23695 | M00054760D:B10 | MA188:H04 |
| 4086 | 23746 | M00042847A:A04 | MA172:A04 |
| 4087 | 23748 | M00042847A:D10 | MA172:B04 |
| 4088 | 23755 | M00054917B:G02 | MA168:F04 |
| 4089 | 23765 | M00055468D:D05 | MA168:C10 |
| 4090 | 23767 | M00055469B:E11 | MA168:D10 |
| 4091 | 23773 | M00055492C:C01 | MA168:G10 |
| 4092 | 23775 | M00055496A:E06 | MA168:H10 |
| 4093 | 23787 | M00056742D:D01 | MA175:F04 |
| 4094 | 23805 | M00056814D:C08 | MA175:G10 |
| 4095 | 23827 | RG:1636303:10014:B10 | MA163:B10 |
| 4096 | 23829 | RG:1643142:10014:C10 | MA163:C10 |
| 4097 | 23831 | RG:1650444:10014:D10 | MA163:D10 |
| 4098 | 23840 | RG:1418984:10003:H10 | MA152:H10 |
| 4099 | 23841 | M00043339C:C12 | MA183:A04 |
| 4100 | 23843 | M00043342C:H03 | MA183:B04 |
| 4101 | 23847 | M00043350A:C04 | MA183:D04 |
| 4102 | 23875 | M00056646D:G05 | MA186:B04 |
| 4103 | 23880 | M00055406C:H08 | MA199:D04 |
| 4104 | 23887 | M00056653C:F06 | MA186:H04 |
| 4105 | 23888 | M00055408A:H06 | MA199:H04 |
| 4106 | 23905 | M00055545D:E02 | MA169:A05 |
| 4107 | 23909 | M00055548B:H07 | MA169:C05 |
| 4108 | 23912 | M00056271C:F02 | MA181:D05 |
| 4109 | 23915 | M00055550D:A05 | MA169:F05 |
| 4110 | 23929 | M00055661A:F09 | MA169:E11 |
| 4111 | 24003 | M00056427D:A09 | MA173:B05 |
| 4112 | 24004 | M00056163C:H09 | MA180:B05 |
| 4113 | 24005 | M00056428B:F07 | MA173:C05 |
| 4114 | 24006 | M00056163D:E01 | MA180:C05 |
| 4115 | 24009 | M00056428C:A12 | MA173:E05 |
| 4116 | 24011 | M00056429D:D07 | MA173:F05 |
| 4117 | 24014 | M00056175D:B05 | MA180:G05 |
| 4118 | 24017 | M00056507D:D04 | MA173:A11 |
| 4119 | 24027 | M00056511D:H07 | MA173:F11 |
| 4120 | 24033 | M00054654A:F12 | MA187:A05 |
| 4121 | 24034 | M00054868D:F12 | MA189:A05 |
| 4122 | 24039 | M00054661B:H10 | MA187:D05 |
| 4123 | 24043 | M00054666B:C07 | MA187:F05 |
| 4124 | 24044 | M00054870B:H05 | MA189:F05 |
| 4125 | 24045 | M00054669B:B03 | MA187:G05 |
| 4126 | 24049 | M00054706B:G04 | MA187:A11 |
| 4127 | 24055 | M00054720C:F01 | MA187:D11 |
| 4128 | 24057 | M00054722B:E08 | MA187:E11 |
| 4129 | 24058 | M00054908A:H08 | MA189:E11 |
| 4130 | 24061 | M00054723B:H12 | MA187:G11 |
| 4131 | 24070 | M00057210B:G10 | MA193:C05 |
| 4132 | 24084 | M00057248D:B05 | MA193:B11 |
| 4133 | 24092 | M00057252A:F06 | MA193:F11 |
| 4134 | 24099 | M00042573B:A02 | MA167:B05 |
| 4135 | 24108 | M00042766A:E10 | MA171:F05 |
| 4136 | 24113 | M00042882D:G08 | MA167:A11 |
| 4137 | 24115 | M00042885C:A12 | MA167:B11 |
| 4138 | 24116 | M00042815A:E07 | MA171:B11 |
| 4139 | 24118 | M00042817B:E11 | MA171:C11 |
| 4140 | 24121 | M00042887C:A07 | MA167:E11 |
| 4141 | 24126 | M00042818D:A08 | MA171:G11 |
| 4142 | 24133 | M00056552A:G08 | MA174:C05 |
| 4143 | 24135 | M00056552C:D08 | MA174:D05 |
| 4144 | 24137 | M00056553C:E10 | MA174:E05 |
| 4145 | 24143 | M00056555B:C11 | MA174:H05 |
| 4146 | 24151 | M00056611C:D03 | MA174:D11 |
| 4147 | 24155 | M00056611D:B03 | MA174:F11 |
| 4148 | 24157 | M00056611D:F08 | MA174:G11 |
| 4149 | 24159 | M00056614C:F06 | MA174:H11 |
| 4150 | 24161 | RG:358387:10009:A05 | MA158:A05 |
| 4151 | 24193 | M00057302A:F08 | MA182:A05 |
| 4152 | 24197 | M00057302C:H09 | MA182:C05 |
| 4153 | 24204 | M00054496A:B09 | MA184:F05 |
| 4154 | 24208 | M00054496A:H05 | MA184:H05 |
| 4155 | 24209 | M00042460B:A08 | MA182:A11 |
| 4156 | 24210 | M00054524B:B09 | MA184:A11 |
| 4157 | 24212 | M00054526C:E05 | MA184:B11 |
| 4158 | 24213 | M00042516B:A08 | MA182:C11 |
| 4159 | 24215 | M00042517D:H10 | MA182:D11 |
| 4160 | 24216 | M00054527B:H11 | MA184:D11 |
| 4161 | 24217 | M00042517D:H11 | MA182:E11 |
| 4162 | 24222 | M00054529C:G04 | MA184:G11 |
| 4163 | 24223 | M00043300D:A06 | MA182:H11 |
| 4164 | 24230 | M00054958A:G10 | MA198:C05 |
| 4165 | 24232 | M00054958B:B07 | MA198:D05 |
| 4166 | 24240 | M00054961D:E08 | MA198:H05 |
| 4167 | 24246 | M00055015C:H02 | MA198:C11 |
| 4168 | 24250 | M00055016B:D03 | MA198:E11 |
| 4169 | 24265 | M00055764D:D05 | MA170:E05 |
| 4170 | 24275 | M00055815C:E08 | MA170:B11 |
| 4171 | 24283 | M00055819B:B12 | MA170:F11 |
| 4172 | 24287 | M00055820C:H11 | MA170:H11 |
| 4173 | 24289 | M00055204B:C04 | MA196:A05 |
| 4174 | 24295 | M00055209A:C09 | MA196:D05 |
| 4175 | 24311 | M00055252C:G12 | MA196:D11 |
| 4176 | 24354 | M00056934C:D08 | MA177:A05 |
| 4177 | 24355 | M00055989C:D03 | MA179:B05 |
| 4178 | 24360 | M00056937C:G12 | MA177:D05 |
| 4179 | 24367 | M00055997B:A02 | MA179:H05 |
| 4180 | 24373 | M00056087A:G01 | MA179:C11 |
| 4181 | 24375 | M00056091A:H05 | MA179:D11 |
| 4182 | 24378 | M00056966B:A05 | MA177:E11 |
| 4183 | 24379 | M00056093A:F08 | MA179:F11 |
| 4184 | 24383 | M00056096C:H10 | MA179:H11 |
| 4185 | 24399 | M00054766B:E10 | MA188:H05 |
| 4186 | 24403 | M00054817B:H09 | MA188:B11 |
| 4187 | 24407 | M00054818D:G04 | MA188:D11 |
| 4188 | 24450 | M00042851D:H04 | MA172:A05 |
| 4189 | 24452 | M00042853A:F01 | MA172:B05 |
| 4190 | 24457 | M00055426A:G06 | MA168:E05 |
| 4191 | 24467 | M00055496A:G12 | MA168:B11 |
| 4192 | 24475 | M00055509C:C02 | MA168:F11 |
| 4193 | 24477 | M00055510B:F08 | MA168:G11 |
| 4194 | 24479 | M00055510D:A08 | MA168:H11 |
| 4195 | 24483 | M00056748C:B08 | MA175:B05 |
| 4196 | 24485 | M00056749A:F01 | MA175:C05 |
| 4197 | 24493 | M00056754B:A10 | MA175:G05 |
| 4198 | 24495 | M00056754B:H06 | MA175:H05 |
| 4199 | 24521 | RG:1653390:10014:E05 | MA163:E05 |
| 4200 | 24525 | RG:1669553:10014:G05 | MA163:G05 |
| 4201 | 24547 | M00043355A:H12 | MA183:B05 |
| 4202 | 24549 | M00043355B:F10 | MA183:C05 |
| 4203 | 24557 | M00043357B:B10 | MA183:G05 |
| 4204 | 24558 | M00054557C:D09 | MA185:G05 |
| 4205 | 24559 | M00043358B:G11 | MA183:H05 |
| 4206 | 24561 | M00043396D:B04 | MA183:A11 |
| 4207 | 24576 | M00054612D:D11 | MA185:H11 |
| 4208 | 24578 | M00055409B:D08 | MA199:A05 |
| 4209 | 24580 | M00055409D:F06 | MA199:B05 |
| 4210 | 24582 | M00055410A:A06 | MA199:C05 |
| 4211 | 24587 | M00056659A:D08 | MA186:F05 |
| 4212 | 24599 | M00056704C:H08 | MA186:D11 |
| 4213 | 24609 | M00055553C:B06 | MA169:A06 |
| 4214 | 24610 | M00056280B:D10 | MA181:A06 |
| 4215 | 24614 | M00056282D:G10 | MA181:C06 |
| 4216 | 24622 | M00056288B:A12 | MA181:G06 |
| 4217 | 24627 | M00055686D:E11 | MA169:B12 |
| 4218 | 24630 | M00042346B:F09 | MA181:C12 |
| 4219 | 24633 | M00055698C:E05 | MA169:E12 |
| 4220 | 24634 | M00042347C:D07 | MA181:E12 |
| 4221 | 24635 | M00055702C:C04 | MA169:F12 |
| 4222 | 24638 | M00042348C:F03 | MA181:G12 |
| 4223 | 24648 | M00055335D:E01 | MA197:D06 |
| 4224 | 24708 | M00056180C:E06 | MA180:B06 |
| 4225 | 24712 | M00056184B:G11 | MA180:D06 |
| 4226 | 24721 | M00056514A:F06 | MA173:A12 |
| 4227 | 24727 | M00056514C:H11 | MA173:D12 |
| 4228 | 24741 | M00054674D:C05 | MA187:C06 |
| 4229 | 24743 | M00054675A:H07 | MA187:D06 |
| 4230 | 24744 | M00054878A:G12 | MA189:D06 |
| 4231 | 24751 | M00054676B:D07 | MA187:H06 |
| 4232 | 24755 | M00054725A:E09 | MA187:B12 |
| 4233 | 24758 | M00054924C:B09 | MA189:C12 |
| 4234 | 24759 | M00054726D:B04 | MA187:D12 |
| 4235 | 24762 | M00054927A:H09 | MA189:E12 |
| 4236 | 24763 | M00054727C:F11 | MA187:F12 |
| 4237 | 24767 | M00054728A:H05 | MA187:H12 |
| 4238 | 24768 | M00054930B:G05 | MA189:H12 |
| 4239 | 24772 | M00057214C:G11 | MA193:B06 |
| 4240 | 24776 | M00057216C:G01 | MA193:D06 |
| 4241 | 24780 | M00057217C:B07 | MA193:F06 |
| 4242 | 24803 | M00042695A:H04 | MA167:B06 |
| 4243 | 24805 | M00042695D:D09 | MA167:C06 |
| 4244 | 24808 | M00042771A:D01 | MA171:D06 |
| 4245 | 24810 | M00042772D:F02 | MA171:E06 |
| 4246 | 24812 | M00042773A:A12 | MA171:F06 |
| 4247 | 24813 | M00042699B:B10 | MA167:G06 |
| 4248 | 24817 | M00042889A:H07 | MA167:A12 |
| 4249 | 24818 | M00042819A:C09 | MA171:A12 |
| 4250 | 24820 | M00042819C:B03 | MA171:B12 |
| 4251 | 24821 | M00042895B:C02 | MA167:C12 |
| 4252 | 24822 | M00042823B:A02 | MA171:C12 |
| 4253 | 24825 | M00042895D:B04 | MA167:E12 |
| 4254 | 24843 | M00056564B:F11 | MA174:F06 |
| 4255 | 24845 | M00056564C:E08 | MA174:G06 |
| 4256 | 24849 | M00056615D:A01 | MA174:A12 |
| 4257 | 24861 | M00056620D:F02 | MA174:G12 |
| 4258 | 24865 | RG:359184:10009:A06 | MA158:A06 |
| 4259 | 24887 | RG:428530:10009:D12 | MA158:D12 |
| 4260 | 24897 | M00057310A:A07 | MA182:A06 |
| 4261 | 24908 | M00054503C:H10 | MA184:F06 |
| 4262 | 24917 | M00043302C:D03 | MA182:C12 |
| 4263 | 24924 | M00054535B:F10 | MA184:F12 |
| 4264 | 24926 | M00054535C:D10 | MA184:G12 |
| 4265 | 24928 | M00054535C:H09 | MA184:H12 |
| 4266 | 24934 | M00054964B:A08 | MA198:C06 |
| 4267 | 24936 | M00054966C:H01 | MA198:D06 |
| 4268 | 24952 | M00055022D:F01 | MA198:D12 |
| 4269 | 24958 | M00055026C:C12 | MA198:G12 |
| 4270 | 24960 | M00055027B:C11 | MA198:H12 |
| 4271 | 24985 | M00055826D:C11 | MA170:E12 |
| 4272 | 24989 | M00055828C:D10 | MA170:G12 |
| 4273 | 24991 | M00055828D:F12 | MA170:H12 |
| 4274 | 24995 | M00055215C:E11 | MA196:B06 |
| 4275 | 24999 | M00055217C:E09 | MA196:D06 |
| 4276 | 25001 | M00055221B:C01 | MA196:E06 |
| 4277 | 25005 | M00055222A:E02 | MA196:G06 |
| 4278 | 25012 | M00056226D:F03 | MA180:B12 |
| 4279 | 25019 | M00055258A:G02 | MA196:F12 |
| 4280 | 25057 | M00055998A:A02 | MA179:A06 |
| 4281 | 25058 | M00056945A:B11 | MA177:A06 |
| 4282 | 25062 | M00056945D:H03 | MA177:C06 |
| 4283 | 25063 | M00056001A:F11 | MA179:D06 |
| 4284 | 25068 | M00056946D:B04 | MA177:F06 |
| 4285 | 25073 | M00056101B:B02 | MA179:A12 |
| 4286 | 25081 | M00056110C:D09 | MA179:E12 |
| 4287 | 25083 | M00056111B:H03 | MA179:F12 |
| 4288 | 25101 | M00054772B:H06 | MA188:G06 |
| 4289 | 25109 | M00054825B:B05 | MA188:C12 |
| 4290 | 25111 | M00054831A:G04 | MA188:D12 |
| 4291 | 25115 | M00054831D:B07 | MA188:F12 |
| 4292 | 25156 | M00042862D:A12 | MA172:B06 |
| 4293 | 25162 | M00042864A:E05 | MA172:E06 |
| 4294 | 25164 | M00042864D:E06 | MA172:F06 |
| 4295 | 25177 | M00055514B:A05 | MA168:E12 |
| 4296 | 25191 | M00056763B:A12 | MA175:D06 |
| 4297 | 25195 | M00056767D:F06 | MA175:F06 |
| 4298 | 25201 | M00056821A:D08 | MA175:A12 |
| 4299 | 25205 | M00056822C:G03 | MA175:C12 |
| 4300 | 25209 | M00056823D:H02 | MA175:E12 |
| 4301 | 25217 | RG:1609994:10014:A06 | MA163:A06 |
| 4302 | 25243 | RG:1667183:10014:F12 | MA163:F12 |
| 4303 | 25249 | M00043358D:C06 | MA183:A06 |
| 4304 | 25250 | M00054558B:E05 | MA185:A06 |
| 4305 | 25257 | M00043361B:G03 | MA183:E06 |
| 4306 | 25277 | M00043408C:D11 | MA183:G12 |
| 4307 | 25280 | M00054632A:E11 | MA185:H12 |
| 4308 | 25281 | M00056661A:G05 | MA186:A06 |
| 4309 | 25283 | M00056661C:C11 | MA186:B06 |
| 4310 | 25284 | M00055412D:E05 | MA199:B06 |
| 4311 | 25286 | M00055413A:G12 | MA199:C06 |
| 4312 | 25288 | M00055414D:A09 | MA199:D06 |
| 4313 | 25301 | M00056707B:C01 | MA186:C12 |
| 4314 | 25317 | M00056237D:C10 | MA181:D01 |
| 4315 | 25319 | M00056238B:D03 | MA181:E01 |
| 4316 | 25323 | M00056239B:D05 | MA181:G01 |
| 4317 | 25325 | M00056241B:H07 | MA181:H01 |
| 4318 | 25380 | I:2921194:04B02:C06 | MA118:C06 |
| 4319 | 25388 | I:1624865:04B02:G06 | MA118:G06 |
| 4320 | 25389 | I:1728607:04A02:H06 | MA116:H06 |
| 4321 | 25390 | I:2827453:04B02:H06 | MA118:H06 |
| 4322 | 25398 | I:2070593:04B02:D12 | MA118:D12 |
| 4323 | 25405 | I:2683114:04A02:H12 | MA116:H12 |
| 4324 | 25419 | I:1809336:02A02:G06 | MA108:G06 |

[0570] Characterization of Sequences

[0571] The sequences of the isolated polynucleotides were first masked to eliminate low complexity sequences using the RepeatMasker masking program, publicly available through a web site supported by the University of Washington (See also Smit, A. F. A. and Green, P., unpublished results). Generally, masking does not influence the final search results, except to eliminate sequences of relatively little interest due to their low complexity, and to eliminate multiple “hits” based on similarity to repetitive regions common to multiple sequences, e.g., Alu repeats. Masking resulted in the elimination of several sequences.

[0572] The remaining sequences of the isolated polynucleotides were used in a homology search of the GenBank database using the TeraBLAST program (TimeLogic, Crystal Bay, Nevada), a DNA and protein sequence homology searching algorithm. TeraBLAST is a version of the publicly available BLAST search algorithm developed by the National Center for Biotechnology, modified to operate at an accelerated speed with increased sensitivity on a specialized computer hardware platform. The program was run with the default parameters recommended by TimeLogic to provide the best sensitivity and speed for searching DNA and protein sequences. Gene assignment for the query sequences was determined based on best hit form the GenBank database; expectancy values are provided with the hit.

[0573] Summary of TeraBLAST Search Results

[0574] Table 30 provides information about the gene corresponding to each polynucleotide. Table 3 includes: (1) the “SEQ ID NO” of the sequence; (2) the “Clone ID” assigned to the clone from which the sequence was isolated; (3) the “MAClone ID” assigned to the clone from which the sequence was isolated; (4) the percentage of masking of the sequence (“Mask Prcnt”) (5) the GenBank Accession Number of the publicly available sequence corresponding to the polynucleotide (“GBHit”); (6) a description of the GenBank sequence (“GBDescription”); and (7) the score of the similarity of the polynucleotide sequence and the GenBank sequence (“GBScore”). The published information for each GenBank and EST description, as well as the corresponding sequence identified by the provided accession number, are incorporated herein by reference.

TABLE 30

| SEQ | | | | | | |
|---|---|---|---|---|---|---|
| ID | | MAClone | Mask | | | |
| NO | Clone ID | ID | Prcnt | GBHit | GBDescription | GBScore |
| 3022 | M00026919B:A10 | MA40:F01 | | Z69708 | gi\|1204106\|emb\|Z69708.1HSL241B9C | 2.2E−208 |
| | | | | | Human DNA sequence from cosmid | |
| | | | | | L241B9, Huntington's Disease Region, | |
| | | | | | chromosome 4p16.3 contains pol | |
| 3023 | M00026919B:E07 | MA40:G01 | | Y16675 | gi\|3378616\|emb\|Y16675.1HSCPRM1 | 0 |
| | | | | | Homo sapiens mRNA for aflatoxin B1- | |
| | | | | | aldehyde reductase | |
| 3024 | M00026919D:F04 | MA40:H01 | | M62810 | gi\|188563\|gb\|M62810.1HUMMITF1 | 1E−300 |
| | | | | | Human mitochondrial transcription factor 1 | |
| | | | | | mRNA, complete cds | |
| 3025 | M00026914D:G06 | MA40:A01 | | NM_020990 | gi\|11641403\|ref\|NM_020990.2 Homo | 2.3E−288 |
| | | | | | sapiens creatine kinase, mitochondrial 1 | |
| | | | | | (ubiquitous) (CKMT1), nuclear gene | |
| | | | | | encoding mitochondrial | |
| 3026 | M00026950A:A09 | MA40:D07 | | BC010020 | gi\|14603100\|gb\|BC010020.1BC010020 | 9.3E−207 |
| | | | | | Homo sapiens, adaptor-related protein | |
| | | | | | complex 3, sigma 2 subunit, clone | |
| | | | | | MGC: 19643 IMAGE: 2959670, | |
| 3027 | M00003820C:A09 | MA244:B01 | 0.83544 | AK026527 | gi\|10439404\|dbj\|AK026527.1AK026527 | 6.6E−24 |
| | | | | | Homo sapiens cDNA: FLJ22874 fis, clone | |
| | | | | | KAT02871 | |
| 3028 | M00001673A:G03 | MA244:E01 | | BC018192 | gi\|17390428\|gb\|BC018192.1BC018192 | 4.6E−274 |
| | | | | | Homo sapiens, inositol 1,3,4-triphosphate | |
| | | | | | 5/6 kinase, clone MGC: 21491 | |
| | | | | | IMAGE: 3867269, mRNA, comple | |
| 3029 | M00007939A:A12 | MA27:B07 | | | | |
| 3030 | M00007939A:B11 | MA27:D07 | | AK055664 | gi\|16550447\|dbj\|AK055664.1AK055664 | 6.7E−186 |
| | | | | | Homo sapiens cDNA FLJ31102 fis, clone | |
| | | | | | IMR322000010 | |
| 3031 | M00007939B:G03 | MA27:H07 | | BC006230 | gi\|13623260\|gb\|BC006230.1BC006230 | 2.3E−151 |
| | | | | | Homo sapiens, lysophospholipase-like, | |
| | | | | | clone MGC: 10338 IMAGE: 3945191, | |
| | | | | | mRNA, complete cds | |
| 3032 | M00007997D:G08 | MA29:C01 | | BC012323 | gi\|15147375\|gb\|BC012323.1BC012323 | 2.1E−198 |
| | | | | | Homo sapiens, Similar to cut (Drosophila)- | |
| | | | | | like 1 (CCAAT displacement protein), | |
| | | | | | clone IMAGE: 455060 | |
| 3033 | M00026894C:E11 | MA39:F07 | | AF052955 | gi\|8117711\|gb\|AF052955.1AF052955 | 9E−204 |
| | | | | | Homo sapiens F1-ATPase epsilon-subunit | |
| | | | | | (ATP5E) mRNA, complete cds; nuclear | |
| | | | | | gene for mitochondrial | |
| 3034 | M00001391A:C05 | MA15:G01 | | AK000140 | gi\|7020034\|dbj\|AK000140.1AK000140 | 2.2E−107 |
| | | | | | Homo sapiens cDNA FLJ20133 fis, clone | |
| | | | | | COL06539 | |
| 3035 | M00006818A:A06 | MA240:C01 | 0.06554 | AL136706 | gi\|12052931\|emb\|AL136706.1HSM801674 | 9.2E−248 |
| | | | | | Homo sapiens mRNA; cDNA | |
| | | | | | DKFZp566B2024 (from clone | |
| | | | | | DKFZp566B2024); complete cds | |
| 3036 | M00023278A:F09 | MA36:E01 | | | | |
| 3037 | M00023299A:G01 | MA36:C07 | | | | |
| 3038 | M00023301A:A11 | MA36:F07 | | BC007270 | gi\|13938284\|gb\|BC007270.1BC007270 | 1E−300 |
| | | | | | Homo sapiens, clone MGC: 15585 | |
| | | | | | IMAGE: 3160319, mRNA, complete cds | |
| 3039 | M00008050A:D12 | MA30:C01 | | BC015839 | gi\|16198382\|gb\|BC015839.1BC015839 | 1.6E−267 |
| | | | | | Homo sapiens, clone IMAGE: 4296901, | |
| | | | | | mRNA | |
| 3040 | M00022135A:C04 | MA35:F01 | | BC007925 | gi\|14043985\|gb\|BC007925.1BC007925 | 1.3E−124 |
| | | | | | Homo sapiens, retinoid X receptor, alpha, | |
| | | | | | clone MGC: 14451 IMAGE: 4304205, | |
| | | | | | mRNA, complete cds | |
| 3041 | M00022137A:A05 | MA35:G01 | | AK025549 | gi\|10438098\|dbj\|AK025549.1AK025549 | 1.6E−267 |
| | | | | | Homo sapiens cDNA: FLJ21896 fis, clone | |
| | | | | | HEP03441 | |
| 3042 | M00022176C:A07 | MA35:A07 | | BC000393 | gi\|12653248\|gb\|BC000393.1BC000393 | 2.4E−183 |
| | | | | | Homo sapiens, Similar to CAAX box 1, | |
| | | | | | clone MGC: 8471 IMAGE: 2821721, | |
| | | | | | mRNA, complete cds | |
| 3043 | M00008077B:A08 | MA30:D07 | | U09564 | gi\|507212\|gb\|U09564.1HSU09564 Human | 6.3E−211 |
| | | | | | serine kinase mRNA, complete cds | |
| 3044 | M00008077C:D09 | MA30:G07 | | U50939 | gi\|1314559\|gb\|U50939.1HSU50939 | 1.4E−258 |
| | | | | | Human amyloid precursor protein-binding | |
| | | | | | protein 1 mRNA, complete cds | |
| 3045 | M00022081C:E09 | MA34:F01 | | AJ271408 | gi\|6729589\|emb\|AJ271408.1HSA271408 | 1E−237 |
| | | | | | Homo sapiens mRNA for Fas-associated | |
| | | | | | factor, FAF1 (Faf1 gene) | |
| 3046 | M00001662A:G06 | MA24:H01 | | BC006229 | gi\|13623258\|gb\|BC006229.1BC006229 | 1.6E−264 |
| | | | | | Homo sapiens, cytochrome c oxidase | |
| | | | | | subunit Vb, clone MGC: 10622 | |
| | | | | | IMAGE: 3952882, mRNA, complete cds | |
| 3047 | M00022102B:B11 | MA34:D07 | | AJ250229 | gi\|8926686\|emb\|AJ250229.1HSA250229 | 0 |
| | | | | | Homo sapiens mRNA for chromosome 11 | |
| | | | | | hypothetical protein (ORF1) | |
| 3048 | M00022102B:E08 | MA34:E07 | | | | |
| 3049 | M00022569D:G06 | MA22:F01 | 0.0572 | U08839 | gi\|517197\|gb\|U08839.1HSU08839 Human | 6.7E−233 |
| | | | | | urokinase-type plasminogen activator | |
| | | | | | receptor mRNA, complete cds | |
| 3050 | M00001358B:B11 | MA14:A01 | | AB047848 | gi\|11094286\|dbj\|AB047848.1AB047848 | 4.3E−299 |
| | | | | | Homo sapiens mRNA for zetal-COP, | |
| | | | | | complete cds | |
| 3051 | M00001429A:G04 | MA16:A01 | | BC000491 | gi\|12653440\|gb\|BC000491.1BC000491 | 0 |
| | | | | | Homo sapiens, proliferating cell nuclear | |
| | | | | | antigen, clone MGC: 8367 | |
| | | | | | IMAGE: 2820036, mRNA, complete cd | |
| 3052 | M00001358B:F05 | MA14:B01 | | BC000706 | gi\|12653834\|gb\|BC000706.1BC000706 | 1.1E−299 |
| | | | | | Homo sapiens, Similar to G8 protein, clone | |
| | | | | | MGC: 1225 IMAGE: 3349773, mRNA, | |
| | | | | | complete cds | |
| 3053 | M00001429C:C03 | MA16:C01 | | X16064 | gi\|37495\|emb\|X16064.1HSTUMP Human | 0 |
| | | | | | mRNA for translationally controlled tumor | |
| | | | | | protein | |
| 3054 | M00001359D:B04 | MA14:E01 | | AK000481 | gi\|7020597\|dbj\|AK000481.1AK000481 | 1E−300 |
| | | | | | Homo sapiens cDNA FLJ20474 fis, clone | |
| | | | | | KAT07183 | |
| 3055 | M00001360A:E10 | MA14:F01 | | BC002899 | gi\|12804092\|gb\|BC002899.1BC002899 | 6.4E−267 |
| | | | | | Homo sapiens, protein (peptidyl-prolyl | |
| | | | | | cis/trans isomerase) NIMA-interacting 1, | |
| | | | | | clone MGC: 10717 I | |
| 3056 | M00001360C:B05 | MA14:G01 | | NM_001014 | gi\|13904867\|ref\|NM_001014.2 Homo | 2.1E−282 |
| | | | | | sapiens ribosomal protein S10 (RPS 10), | |
| | | | | | mRNA | |
| 3057 | M00001430B:F01 | MA16:G01 | | AL050096 | gi\|4884121\|emb\|AL050096.1HSM800178 | 6.9E−47 |
| | | | | | Homo sapiens mRNA; cDNA | |
| | | | | | DKFZp586A0419 (from clone | |
| | | | | | DKFZp586A0419); partial cds | |
| 3058 | M00001430C:A02 | MA16:H01 | | AF083248 | gi\|5106790\|gb\|AF083248.1AF083248 | 0 |
| | | | | | Homo sapiens ribosomal protein L26 | |
| | | | | | homolog mRNA, complete cds | |
| 3059 | M00001445C:H05 | MA16:A07 | | X02152 | gi\|34312\|emb\|X02152.1HSLDHAR | 0 |
| | | | | | Human mRNA for lactate dehydrogenase- | |
| | | | | | A (LDH-A, EC 1.1.1.27) | |
| 3060 | M00001445D:D07 | MA16:B07 | | X73458 | gi\|312997\|emb\|X73458.1HSPLK1 | 2.7E−266 |
| | | | | | H. sapiens plk-1 mRNA | |
| 3061 | M00001374D:D10 | MA14:G07 | | BC018620 | gi\|17391359\|gb\|BC018620.1BC018620 | 8.3E−254 |
| | | | | | Homo sapiens, Similar to ADP- | |
| | | | | | ribosyltransferase (NAD+; poly (ADP- | |
| | | | | | ribose) polymerase), clone IMAGE | |
| 3062 | M00001375A:A08 | MA14:H07 | | AF231705 | gi\|8745393\|gb\|AF231705.1AF231705 | 4.1E−137 |
| | | | | | Homo sapiens Alu co-repressor 1 (ACR1) | |
| | | | | | mRNA, complete cds | |
| 3063 | M00006600A:E07 | MA241:B01 | | AK001635 | gi\|7023008\|dbj\|AK001635.1AK001635 | 3.2E−281 |
| | | | | | Homo sapiens cDNA FLJ10773 fis, clone | |
| | | | | | NT2RP4000246, moderately similar to | |
| | | | | | NPC DERIVED PROLINE RIC | |
| 3064 | M00006690A:F06 | MA241:C07 | 0.28152 | | | |
| 3065 | M00023325D:A08 | MA37:B02 | | BC001901 | gi\|12804898\|gb\|BC001901.1BC001901 | 2.7E−294 |
| | | | | | Homo sapiens, BCL2-antagonist of cell | |
| | | | | | death, clone MGC: 2100 IMAGE: 3537914, | |
| | | | | | mRNA, complete cds | |
| 3066 | M00026921D:F12 | MA40:C02 | | AK054686 | gi\|16549280\|dbj\|AK054686.1AK054686 | 0 |
| | | | | | Homo sapiens cDNA FLJ30124 fis, clone | |
| | | | | | BRACE1000093, highly similar to TNF | |
| | | | | | RECEPTOR ASSOCIATED FA | |
| 3067 | M00023325D:F06 | MA37:D02 | 0.15781 | BC017660 | gi\|17389200\|gb\|BC017660.1BC017660 | 1.2E−188 |
| | | | | | Homo sapiens, clone MGC: 14608 | |
| | | | | | IMAGE: 4049404, mRNA, complete cds | |
| 3068 | M00026924A:E09 | MA40:G02 | | AL359938 | gi\|8977893\|emb\|AL359938.1HSM802719 | 0 |
| | | | | | Homo sapiens mRNA; cDNA | |
| | | | | | DKFZp547H236 (from clone | |
| | | | | | DKFZp547H236) | |
| 3069 | M00007940C:A04 | MA27:D08 | | AF381986 | gi\|17985445\|gb\|AF381986.1AF381986 | 1.6E−264 |
| | | | | | Homo sapiens haplotype X mitochondrion, | |
| | | | | | complete genome | |
| 3070 | M00007941C:H03 | MA27:F08 | | U97519 | gi\|2213812\|gb\|U97519.1HSU97519 Homo | 4.5E−271 |
| | | | | | sapiens podocalyxin-like protein mRNA, | |
| | | | | | complete cds | |
| 3071 | M00021638B:F03 | MA31:F08 | | NM_004417 | gi\|7108342\|ref\|NM_004417.2 Homo | 3.2E−250 |
| | | | | | sapiens dual specificity phosphatase 1 | |
| | | | | | (DUSP1), mRNA | |
| 3072 | M00007941D:C04 | MA27:H08 | | AL110202 | gi\|5817121\|emb\|AL110202.1HSM800854 | 2.5E−263 |
| | | | | | Homo sapiens mRNA; cDNA | |
| | | | | | DKFZp586I2022 (from clone | |
| | | | | | DKFZp586I2022) | |
| 3073 | M00004054D:D02 | | 0.19296 | | | |
| 3074 | M00001507A:A10 | MA23:E08 | | AF220656 | gi\|7107358\|gb\|AF220656.1AF220656 | 1.4E−255 |
| | | | | | Homo sapiens apoptosis-associated nuclear | |
| | | | | | protein PHLDA1 (PHLDA1) mRNA, | |
| | | | | | partial cds | |
| 3075 | M00004198D:A01 | | | AY007138 | gi\|9956042\|gb\|AY007138.1 Homo sapiens | 0 |
| | | | | | clone CDABP0061 mRNA sequence | |
| 3076 | M00001528C:B08 | MA23:G08 | | AF106066 | gi\|5353548\|gb\|AF106066.1AF106066 | 4.1E−28 |
| | | | | | Homo sapiens RAD17 pseudogene, | |
| | | | | | complete sequence | |
| 3077 | M00008002C:A05 | MA29:B03 | | AB023173 | gi\|4589555\|dbj\|AB023173.1AB023173 | 1.6E−292 |
| | | | | | Homo sapiens mRNA for KIAA0956 | |
| | | | | | protein, partial cds | |
| 3078 | M00008006C:H05 | MA29:H03 | | AF327923 | gi\|13241760\|gb\|AF327923.1AF327923 | 8.2E−205 |
| | | | | | Homo sapiens transmembrane protein | |
| | | | | | induced by tumor necrosis factor alpha | |
| | | | | | (TMPIT) mRNA, complete | |
| 3079 | M00026850C:A01 | MA39:A02 | | AK055812 | gi\|16550635\|dbj\|AK055812.1AK055812 | 8.5E−66 |
| | | | | | Homo sapiens cDNA FLJ31250 fis, clone | |
| | | | | | KIDNE2005336, weakly similar to Homo | |
| | | | | | sapiens antigen NY-CO | |
| 3080 | M00026853D:C07 | MA39:F02 | 0.27143 | AF212248 | gi\|13182770\|gb\|AF212248.1AF212248 | 1.9E−153 |
| | | | | | Homo sapiens CDA09 mRNA, complete | |
| | | | | | cds | |
| 3081 | M00026896A:C09 | MA39:D08 | | AK018953 | gi\|12858931\|dbj\|AK018953.1AK018953 | 3.9E−139 |
| | | | | | Mus musculus adult male testis cDNA, | |
| | | | | | RIKEN full-length enriched library, | |
| | | | | | clone: 1700111D04, full | |
| 3082 | M00001391B:D02 | MA15:C02 | | D86956 | gi\|1503985\|dbj\|D86956.1D86956 Human | 4.7E−221 |
| | | | | | mRNA for KIAA0201 gene, complete cds | |
| 3083 | M00001391B:H05 | MA15:E02 | | AL110153 | gi\|5817055\|emb\|AL110153.1HSM800798 | 1E−300 |
| | | | | | Homo sapiens mRNA; cDNA | |
| | | | | | DKFZp586E0524 (from clone | |
| | | | | | DKFZp586E0524) | |
| 3084 | M00001391D:C07 | MA15:F02 | | AL136593 | gi\|7018431\|emb\|AL136593.1HSM801567 | 0 |
| | | | | | Homo sapiens mRNA; cDNA | |
| | | | | | DKFZp761K102 (from clone | |
| | | | | | DKFZp761K102); complete cds | |
| 3085 | M00001392B:B01 | MA15:G02 | | M73791 | gi\|189265\|gb\|M73791.1HUMANOVGENE | 3.5E−94 |
| | | | | | Human novel gene mRNA, complete cds | |
| 3086 | M00001407B:C03 | MA15:E08 | | BC005116 | gi\|13477284\|gb\|BC005116.1BC005116 | 1E−300 |
| | | | | | Homo sapiens, structure specific | |
| | | | | | recognition protein 1, clone MGC: 1608 | |
| | | | | | IMAGE: 3536048, mRNA, compl | |
| 3087 | M00005635B:E02 | MA242:B08 | 0.86798 | | | |
| 3088 | M00005636B:B06 | MA242:E08 | | AK008041 | gi\|12841981\|dbj\|AK008041.1AK008041 | 1.5E−24 |
| | | | | | Mus musculus adult male small intestine | |
| | | | | | cDNA, RIKEN full-length enriched | |
| | | | | | library, clone: 2010002G | |
| 3089 | M00006971A:E06 | MA240:E08 | | NM_002403 | gi\|9665260\|ref\|NM_002403.2 Homo | 4.7E−274 |
| | | | | | sapiens microfibrillar-associated protein 2 | |
| | | | | | (MFAP2), transcript variant 2, mRNA | |
| 3090 | M00005636D:B08 | MA242:F08 | | | | |
| 3091 | M00023302C:A04 | MA36:B08 | | AF202922 | gi\|13540826\|gb\|AF202922.2AF202922 | 4.6E−231 |
| | | | | | Homo sapiens LRP16 (LRP16) mRNA, | |
| | | | | | complete cds | |
| 3092 | M00023305A:C02 | MA36:G08 | | | | |
| 3093 | M00022180A:E08 | MA35:B08 | | BC018918 | gi\|17511926\|gb\|BC018918.1BC018918 | 3.6E−203 |
| | | | | | Homo sapiens, clone MGC: 12603 | |
| | | | | | IMAGE: 4130906, mRNA, complete cds | |
| 3094 | M00022181C:H11 | MA35:E08 | | AK001485 | gi\|7022770\|dbj\|AK001485.1AK001485 | 1.6E−161 |
| | | | | | Homo sapiens cDNA FLJ10623 fis, clone | |
| | | | | | NT2RP2005520, highly similar to Homo | |
| | | | | | sapiens chromosome-ass | |
| 3095 | M00001673A:C11 | | | U15128 | gi\|902744\|gb\|U15128.1HSU15128 Human | 0 |
| | | | | | beta-1,2-N-acetylglucosaminyltransferase | |
| | | | | | II (MGAT2) gene, complete cds | |
| 3096 | M00003853B:C07 | | | BC008378 | gi\|14249982\|gb\|BC008378.1BC008378 | 2.4E−207 |
| | | | | | Homo sapiens, programmed cell death 2, | |
| | | | | | clone MGC: 12347 IMAGE: 4102043, | |
| | | | | | mRNA, complete cds | |
| 3097 | M00022106B:D04 | MA34:B08 | | AB055387 | gi\|12862374\|dbj\|AB055387.1AB055387 | 1.4E−86 |
| | | | | | Homo sapiens mitochondrial DNA | |
| 3098 | M00003858B:G01 | MA24:E08 | 0.26044 | | | |
| 3099 | M00022109B:A11 | MA34:G08 | | AK023237 | gi\|10435081\|dbj\|AK023237.1AK023237 | 0 |
| | | | | | Homo sapiens cDNA FLJ13175 fis, clone | |
| | | | | | NT2RP3003842 | |
| 3100 | M00022921A:H05 | MA22:F02 | 0.11424 | BC002976 | gi\|12804234\|gb\|BC002976.1BC002976 | 0 |
| | | | | | Homo sapiens, Similar to cytochrome b- | |
| | | | | | 561, clone MGC: 2190 IMAGE: 3535771, | |
| | | | | | mRNA, complete cds | |
| 3101 | M00001430D:H07 | MA16:A02 | | X58965 | gi\|35069\|emb\|X58965.1HSNM23H2G | 1.9E−276 |
| | | | | | H. sapiens RNA for nm23-H2 gene | |
| 3102 | M00001360D:H10 | MA14:B02 | | NM_002415 | gi\|4505184\|ref\|NM_002415.1 Homo | 6.2E−158 |
| | | | | | sapiens macrophage migration inhibitory | |
| | | | | | factor (glycosylation-inhibiting factor) | |
| | | | | | (MIF), mRNA | |
| 3103 | M00001431A:E01 | MA16:B02 | | AK026534 | gi\|10439413\|dbj\|AK026534.1AK026534 | 1E−300 |
| | | | | | Homo sapiens cDNA: FLJ22881 fis, clone | |
| | | | | | KAT03571, highly similar to HUMFERL | |
| | | | | | Human ferritin L chai | |
| 3104 | M00001361A:A02 | MA14:C02 | | NM_004053 | gi\|15208644\|ref\|NM_004053.2 Homo | 6.7E−270 |
| | | | | | sapiens bystin-like (BYSL), mRNA | |
| 3105 | M00001362A:B03 | MA14:H02 | | L47277 | gi\|986911\|gb\|L47277.1HUMTOPATRA | 1E−296 |
| | | | | | Homo sapiens (cell line HepG2, HeLa) | |
| | | | | | alpha topoisomerase truncated-form | |
| | | | | | mRNA, 3′UTR | |
| 3106 | M00001376C:C01 | MA14:A08 | | S73591 | gi\|688296\|gb\|S73591.1S73591 Homo | 5.8E−233 |
| | | | | | sapiens brain-expressed HHCPA78 | |
| | | | | | homolog VDUP1 (Gene) mRNA, complete | |
| | | | | | cds | |
| 3107 | M00001449A:D02 | MA16:B08 | | BC013954 | gi\|15530314\|gb\|BC013954.1BC013954 | 9.6E−291 |
| | | | | | Homo sapiens, clone IMAGE: 3505920, | |
| | | | | | mRNA | |
| 3108 | M00001378B:A02 | MA14:C08 | | BC002343 | gi\|12803082\|gb\|BC002343.1BC002343 | 5.2E−124 |
| | | | | | Homo sapiens, Similar to nucleolin, clone | |
| | | | | | MGC: 8580 IMAGE: 2960982, mRNA, | |
| | | | | | complete cds | |
| 3109 | M00001450A:D12 | MA16:C08 | | AF106622 | gi\|4378528\|gb\|AF106622.1AF106622 | 5E−280 |
| | | | | | Homo sapiens mitochondrial inner | |
| | | | | | membrane preprotein translocase Tim17a | |
| | | | | | mRNA, nuclear gene encodin | |
| 3110 | M00001378C:D08 | MA14:D08 | 0.06114 | BC002569 | gi\|12803486\|gb\|BC002569.1BC002569 | 3E−235 |
| | | | | | Homo sapiens, ribosomal protein S4, X- | |
| | | | | | linked, clone MGC: 2328 | |
| | | | | | IMAGE: 3139352, mRNA, complete cds | |
| 3111 | M00001451D:F01 | MA16:G08 | | BC001432 | gi\|12655154\|gb\|BC001432.1BC001432 | 0 |
| | | | | | Homo sapiens, heterogeneous nuclear | |
| | | | | | ribonucleoprotein F, clone MGC: 2197 | |
| | | | | | IMAGE: 3138435, mRNA, comp | |
| 3112 | M00006628B:A02 | MA241:C02 | | NM_005826 | gi\|14141188\|ref\|NM_005826.2 Homo | 4.9E−80 |
| | | | | | sapiens heterogeneous nuclear | |
| | | | | | ribonucleoprotein R (HNRPR), mRNA | |
| 3113 | M00026926C:F03 | MA40:B03 | | AK027855 | gi\|14042836\|dbj\|AK027855.1AK027855 | 1.1E−215 |
| | | | | | Homo sapiens cDNA FLJ14949 fis, clone | |
| | | | | | PLACE2000341, highly similar to Homo | |
| | | | | | sapiens sodium-depend | |
| 3114 | M00026963B:H03 | MA40:A09 | | BC014557 | gi\|17939595\|gb\|BC014557.1BC014557 | 2.6E−241 |
| | | | | | Homo sapiens, clone IMAGE: 3837222, | |
| | | | | | mRNA | |
| 3115 | M00026964A:E10 | MA40:D09 | | NM_013375 | gi\|17572813\|ref\|NM_013375.2 Homo | 1.5E−171 |
| | | | | | sapiens TATA-binding protein-binding | |
| | | | | | protein (ABT1), mRNA | |
| 3116 | M00026965C:A11 | MA40:F09 | 0.07092 | AK054883 | gi\|16549505\|dbj\|AK054883.1AK054883 | 1E−176 |
| | | | | | Homo sapiens cDNA FLJ30321 fis, clone | |
| | | | | | BRACE2006281 | |
| 3117 | M00001398A:D11 | MA244:C09 | | BC009503 | gi\|14550505\|gb\|BC009503.1BC009503 | 1E−300 |
| | | | | | Homo sapiens, G1 to S phase transition 1, | |
| | | | | | clone MGC: 1735 IMAGE: 2822947, | |
| | | | | | mRNA, complete cds | |
| 3118 | M00008095C:H08 | MA31:D03 | | BC000820 | gi\|12654032\|gb\|BC000820.1BC000820 | 5.3E−255 |
| | | | | | Homo sapiens, menage a trois 1 (CAK | |
| | | | | | assembly factor), clone MGC: 5154 | |
| | | | | | IMAGE: 3453943, mRNA, complet | |
| 3119 | M00007942A:F12 | MA27:B09 | | NM_001102 | gi\|12025669\|ref\|NM_001102.2 Homo | 2.3E−257 |
| | | | | | sapiens actinin, alpha 1 (ACTN1), mRNA | |
| 3120 | M00004212B:B12 | MA25:A09 | 0.11538 | D38112 | gi\|644480\|dbj\|D38112.1HUMMTA Homo | 2.4E−48 |
| | | | | | sapiens mitochondrial DNA, complete | |
| | | | | | sequence | |
| 3121 | M00008014C:E11 | MA29:D05 | 0.05435 | AL080111 | gi\|5262538\|emb\|AL080111.1HSM800619 | 1.7E−292 |
| | | | | | Homo sapiens mRNA; cDNA | |
| | | | | | DKFZp586G2222 (from clone | |
| | | | | | DKFZp586G2222) | |
| 3122 | M00008015A:B05 | MA29:E05 | | M23161 | gi\|339899\|gb\|M23161.1HUMTRANSC | 1.3E−157 |
| | | | | | Human transposon-like element mRNA | |
| 3123 | M00022049A:B08 | MA33:A05 | | AK001731 | gi\|7023175\|dbj\|AK001731.1AK001731 | 5.8E−286 |
| | | | | | Homo sapiens cDNA FLJ10869 fis, clone | |
| | | | | | NT2RP4001677 | |
| 3124 | M00026856B:F08 | MA39:A03 | | AK023351 | gi\|10435249\|dbj\|AK023351.1AK023351 | 1.7E−298 |
| | | | | | Homo sapiens cDNA FLJ13289 fis, clone | |
| | | | | | OVARC1001170 | |
| 3125 | M00026856C:H12 | MA39:B03 | 0.55489 | | | |
| 3126 | M00026900D:A03 | MA39:F09 | | NM_000995 | gi\|16117786\|ref\|NM_000995.2 Homo | 3.5E−200 |
| | | | | | sapiens ribosomal protein L34 (RPL34), | |
| | | | | | transcript variant 1, mRNA | |
| 3127 | M00026900D:C12 | MA39:G09 | | BC014377 | gi\|15680094\|gb\|BC014377.1BC014377 | 1.2E−274 |
| | | | | | Homo sapiens, clone IMAGE: 4041545, | |
| | | | | | mRNA, partial cds | |
| 3128 | M00026901D:A03 | MA39:H09 | | AK057845 | gi\|16553806\|dbj\|AK057845.1AK057845 | 3.6E−178 |
| | | | | | Homo sapiens cDNA FLJ25116 fis, clone | |
| | | | | | CBR05731, highly similar to EPHRIN-A1 | |
| | | | | | PRECURSOR | |
| 3129 | M00001393A:G03 | MA15:E03 | | NM_001015 | gi\|14277698\|ref\|NM_001015.2 Homo | 0 |
| | | | | | sapiens ribosomal protein S11 (RPS11), | |
| | | | | | mRNA | |
| 3130 | M00001409B:D03 | MA15:D09 | | AF104914 | gi\|4206125\|gb\|AF104914.1AF104914 | 0 |
| | | | | | Homo sapiens map 3p22; 9.65 cR from | |
| | | | | | CHLC.GATA87B02 repeat region, | |
| | | | | | complete sequence | |
| 3131 | M00001409B:G01 | MA15:E09 | | Z69043 | gi\|2398656\|emb\|Z69043.1HSTRAPRNA | 3.1E−278 |
| | | | | | H. sapiens mRNA translocon-associated | |
| | | | | | protein delta subunit precursor | |
| 3132 | M00001410C:C09 | MA15:F09 | | BC007261 | gi\|13938270\|gb\|BC007261.1BC007261 | 5.3E−252 |
| | | | | | Homo sapiens, clone MGC: 15545 | |
| | | | | | IMAGE: 3050745, mRNA, complete cds | |
| 3133 | M00001410D:A03 | MA15:G09 | | X52003 | gi\|311379\|emb\|X52003.1HSPS2MKN | 3.9E−265 |
| | | | | | H. sapiens pS2 protein gene | |
| 3134 | M00005504D:F06 | MA242:A03 | 0.33179 | AK026112 | gi\|10438858\|dbj\|AK026112.1AK026112 | 5E−144 |
| | | | | | Homo sapiens cDNA: FLJ22459 fis, clone | |
| | | | | | HRC10045 | |
| 3135 | M00005510D:H10 | MA242:G03 | | | | |
| 3136 | M00006990D:D06 | MA240:G09 | | M79321 | gi\|187270\|gb\|M79321.1HUMLYNTK | 3.8E−290 |
| | | | | | Human Lyn B protein mRNA, complete | |
| | | | | | cds | |
| 3137 | SL146 | MA248:A03 | 0.09302 | AF415176 | gi\|16589066\|gb\|AF415176.1AF415176 | 7.8E−92 |
| | | | | | Homo sapiens CSGEF (SGEF) mRNA, | |
| | | | | | complete cds, alternatively spliced | |
| 3138 | SL153 | MA248:H03 | | | | |
| 3139 | SL198 | MA248:E09 | 0.45185 | BC008180 | gi\|14198240\|gb\|BC008180.1BC008180 | 8.2E−115 |
| | | | | | Homo sapiens, DKFZP586A0522 protein, | |
| | | | | | clone MGC: 5320 IMAGE: 2900478, | |
| | | | | | mRNA, complete cds | |
| 3140 | SL199 | MA248:F09 | | AF415176 | gi\|16589066\|gb\|AF415176.1AF415176 | 6.2E−92 |
| | | | | | Homo sapiens CSGEF (SGEF) mRNA, | |
| | | | | | complete cds, alternatively spliced | |
| 3141 | SL200 | MA248:G09 | | BC005307 | gi\|13529043\|gb\|BC005307.1BC005307 | 3.1E−191 |
| | | | | | Homo sapiens, kallikrein 3, (prostate | |
| | | | | | specific antigen), clone MGC: 12378 | |
| | | | | | IMAGE: 3950475, mRNA, com | |
| 3142 | M00023283D:C03 | MA36:C03 | | AF070673 | gi\|3978241\|gb\|AF070673.1AF070673 | 3.7E−181 |
| | | | | | Homo sapiens stannin mRNA, complete | |
| | | | | | cds | |
| 3143 | M00023283D:D03 | MA36:D03 | | Z69881 | gi\|1524091\|emb\|Z69881.1HSSERCA3M | 1.1E−299 |
| | | | | | H. sapiens mRNA for adenosine | |
| | | | | | triphosphatase, calcium | |
| 3144 | M00023284A:D09 | MA36:E03 | | AK024338 | gi\|10436699\|dbj\|AK024338.1AK024338 | 1E−300 |
| | | | | | Homo sapiens cDNA FLJ14276 fis, clone | |
| | | | | | PLACE1005128 | |
| 3145 | M00023285D:C05 | MA36:H03 | | U34877 | gi\|1143231\|gb\|U34877.1HSU34877 Homo | 6.5E−295 |
| | | | | | sapiens biliverdin-IX alpha reductase | |
| | | | | | mRNA, complete cds | |
| 3146 | M00023306C:H11 | MA36:A09 | | BC003366 | gi\|13097197\|gb\|BC003366.1BC003366 | 0 |
| | | | | | Homo sapiens, calcium-regulated heat- | |
| | | | | | stable protein (24 kD), clone MGC: 5235 | |
| | | | | | IMAGE: 2900952, mRNA, c | |
| 3147 | M00023308D:B06 | MA36:C09 | | M57730 | gi\|179320\|gb\|M57730.1HUMB61 Human | 2.1E−176 |
| | | | | | B61 mRNA, complete cds | |
| 3148 | M00023309D:H04 | MA36:E09 | | AL136720 | gi\|12052958\|emb\|AL136720.1HSM801688 | 0 |
| | | | | | Homo sapiens mRNA; cDNA | |
| | | | | | DKFZp566J2046 (from clone | |
| | | | | | DKFZp566J2046); complete cds | |
| 3149 | M00023310A:D07 | MA36:F09 | | AL359587 | gi\|8655647\|emb\|AL359587.1HSM802689 | 0 |
| | | | | | Homo sapiens mRNA; cDNA | |
| | | | | | DKFZp762M115 (from clone | |
| | | | | | DKFZp762M115) | |
| 3150 | M00008079C:H04 | MA30:B09 | | AF201943 | gi\|9295189\|gb\|AF201943.1AF201943 | 5.6E−258 |
| | | | | | Homo sapiens HAH-P (HAH-P) mRNA, | |
| | | | | | complete cds | |
| 3151 | M00008080B:B10 | MA30:F09 | | D50683 | gi\|1827474\|dbj\|D50683.1D50683 Homo | 1.3E−224 |
| | | | | | sapiens mRNA for TGF-betaIIR alpha, | |
| | | | | | complete cds | |
| 3152 | M00022198D:C02 | MA35:F09 | | BC001546 | gi\|16306729\|gb\|BC001546.1BC001546 | 1E−300 |
| | | | | | Homo sapiens, Similar to RIKEN cDNA | |
| | | | | | 1110064N10 gene, clone MGC: 4924 | |
| | | | | | IMAGE: 3462041, mRNA, complete | |
| 3153 | M00022198D:G03 | MA35:G09 | | X54199 | gi\|31641\|emb\|X54199.1HSGAGMR | 1.1E−231 |
| | | | | | Human mRNA for GARS-AIRS-GART | |
| 3154 | M00003768B:B09 | MA24:D03 | | M32308 | gi\|202453\|gb\|M32308.1MUSZFXAA | 2.4E−103 |
| | | | | | Mouse zinc finger protein (Zfx) mRNA, | |
| | | | | | complete cds, clone pDP1115 | |
| 3155 | M00022110C:A08 | MA34:C09 | | AK026894 | gi\|10439861\|dbj\|AK026894.1AK026894 | 9.2E−288 |
| | | | | | Homo sapiens cDNA: FLJ23241 fis, clone | |
| | | | | | COL01375 | |
| 3156 | M00003886C:H08 | MA24:E09 | 0.36691 | AK056001 | gi\|16550873\|dbj\|AK056001.1AK056001 | 7.9E−146 |
| | | | | | Homo sapiens cDNA FLJ31439 fis, clone | |
| | | | | | NT2NE2000707 | |
| 3157 | M00023297B:A10 | MA22:D03 | | M33376 | gi\|187444\|gb\|M33376.1HUMMCDR2 | 0 |
| | | | | | Human pseudo-chlordecone reductase | |
| | | | | | mRNA, complete cds | |
| 3158 | M00023314C:G05 | MA22:G03 | | D87071 | gi\|1510142\|dbj\|D87071.1D87071 Human | 1.7E−178 |
| | | | | | mRNA for KIAA0233 gene, complete cds | |
| 3159 | M00001363B:C04 | MA14:D03 | | AY007220 | gi\|9945039\|gb\|AY007220.1 Homo sapiens | 1.8E−120 |
| | | | | | S100-type calcium binding protein A14 | |
| | | | | | mRNA, complete cds | |
| 3160 | M00001434D:F08 | MA16:D03 | | NM_000852 | gi\|6552334\|ref\|NM_000852.2 Homo | 1E−300 |
| | | | | | sapiens glutathione S-transferase pi | |
| | | | | | (GSTP1), mRNA | |
| 3161 | M00001435B:A04 | MA16:E03 | | X99920 | gi\|1694827\|emb\|X99920.1HSS100A13 | 1.1E−265 |
| | | | | | H. sapiens mRNA for S100 calcium- | |
| | | | | | binding protein A13 | |
| 3162 | M00001435B:B09 | MA16:F03 | | Y00433 | gi\|31917\|emb\|Y00433.1HSGSHPX Human | 8.4E−226 |
| | | | | | mRNA for glutathione peroxidase (EC | |
| | | | | | 1.11.1.9.) | |
| 3163 | M00001435C:F08 | MA16:H03 | | BC006498 | gi\|13676331\|gb\|BC006498.1BC006498 | 1E−300 |
| | | | | | Homo sapiens, ribonucleotide reductase | |
| | | | | | M1 polypeptide, clone MGC: 2326 | |
| | | | | | IMAGE: 2989344, mRNA, comple | |
| 3164 | M00001381A:F03 | MA14:A09 | | BC007590 | gi\|14043203\|gb\|BC007590.1BC007590 | 4.8E−246 |
| | | | | | Homo sapiens, ribosomal protein, large, | |
| | | | | | P1, clone MGC: 15616 IMAGE: 3343021, | |
| | | | | | mRNA, complete cds | |
| 3165 | M00001453B:E11 | MA16:B09 | | BC001182 | gi\|12654686\|gb\|BC001182.1BC001182 | 1E−300 |
| | | | | | Homo sapiens, clone MGC: 2616 | |
| | | | | | IMAGE: 3357266, mRNA, complete cds | |
| 3166 | M00001453C:D02 | MA16:D09 | | BC007435 | gi\|13938568\|gb\|BC007435.1BC007435 | 1E−300 |
| | | | | | Homo sapiens, RNA binding motif protein, | |
| | | | | | X chromosome, clone MGC: 4146 | |
| | | | | | IMAGE: 3010123, mRNA, comple | |
| 3167 | M00007121D:A05 | MA243:A03 | | BC012816 | gi\|15215444\|gb\|BC012816.1BC012816 | 1E−300 |
| | | | | | Homo sapiens, TGFB-induced factor 2 | |
| | | | | | (TALE family homeobox), clone | |
| | | | | | MGC: 4139 IMAGE: 2964507, mRNA, c | |
| 3168 | M00007122C:F03 | MA243:B03 | | BC001866 | gi\|12804840\|gb\|BC001866.1BC001866 | 6.4E−227 |
| | | | | | Homo sapiens, replication factor C | |
| | | | | | (activator 1) 5 (36.5 kD), clone MGC: 1155 | |
| | | | | | IMAGE: 3544137, mRNA, | |
| 3169 | M00006638A:G02 | MA241:C03 | | J05036 | gi\|181193\|gb\|J05036.1HUMCTSE Human | 6.7E−153 |
| | | | | | cathepsin E mRNA, complete cds | |
| 3170 | M00006639B:H09 | MA241:F03 | 0.36075 | BC014188 | gi\|15559664\|gb\|BC014188.1BC014188 | 5.6E−135 |
| | | | | | Homo sapiens, Similar to golgi | |
| | | | | | autoantigen, golgin subfamily a, 2, clone | |
| | | | | | MGC: 20672 IMAGE: 4644480, | |
| 3171 | M00007127C:C11 | MA243:H03 | | AB020718 | gi\|4240310\|dbj\|AB020718.1AB020718 | 0 |
| | | | | | Homo sapiens mRNA for KIAA0911 | |
| | | | | | protein, complete cds | |
| 3172 | M00006720D:C11 | MA241:E09 | | AF242773 | gi\|7638246\|gb\|AF242773.1AF242773 | 1.2E−218 |
| | | | | | Homo sapiens mesenchymal stem cell | |
| | | | | | protein DSCD75 mRNA, complete cds | |
| 3173 | M00006728C:E07 | MA241:F09 | | L05093 | gi\|401844\|gb\|L05093.1HUMRIBPROD | 0 |
| | | | | | Homo sapiens ribosomal protein L18a | |
| | | | | | mRNA, complete cds | |
| 3174 | M00026931D:E08 | MA40:F04 | | AK056187 | gi\|16551522\|dbj\|AK056187.1AK056187 | 2.9E−275 |
| | | | | | Homo sapiens cDNA FLJ31625 fis, clone | |
| | | | | | NT2RI2003304 | |
| 3175 | M00026932D:B08 | MA40:G04 | | NM_022553 | gi\|15022812\|ref\|NM_022553.2 Homo | 1E−300 |
| | | | | | sapiens SAC2 (suppressor of actin | |
| | | | | | mutations 2, yeast, homolog)-like | |
| | | | | | (SACM2L), mRNA | |
| 3176 | M00026969D:D02 | MA40:D10 | 0.05447 | AK027681 | gi\|14042541\|dbj\|AK027681.1AK027681 | 6.5E−159 |
| | | | | | Homo sapiens cDNA FLJ14775 fis, clone | |
| | | | | | NT2RP4000185 | |
| 3177 | M00023393B:E02 | MA37:E10 | | BC001449 | gi\|12655184\|gb\|BC001449.1BC001449 | 9.4E−157 |
| | | | | | Homo sapiens, heterogeneous nuclear | |
| | | | | | ribonucleoprotein R, clone MGC: 2039 | |
| | | | | | IMAGE: 3139052, mRNA, comp | |
| 3178 | M00003782D:D06 | MA244:E04 | | BC000705 | gi\|12653832\|gb\|BC000705.1BC000705 | 1.6E−295 |
| | | | | | Homo sapiens, clone MGC: 861 | |
| | | | | | IMAGE: 3349507, mRNA, complete cds | |
| 3179 | M00004105D:B04 | MA244:G04 | | AK056461 | gi\|16551872\|dbj\|AK056461.1AK056461 | 1E−300 |
| | | | | | Homo sapiens cDNA FLJ31899 fis, clone | |
| | | | | | NT2RP7004173 | |
| 3180 | M00001556D:B11 | MA244:D10 | 0.46689 | | | |
| 3181 | M00021664B:G03 | MA31:E10 | 0.87158 | | | |
| 3182 | M00004078A:A07 | | 0.47872 | | | |
| 3183 | M00001561A:B03 | MA23:D10 | | AF090935 | gi\|6690235\|gb\|AF090935.1AF090935 | 3.4E−256 |
| | | | | | Homo sapiens clone HQ0569 | |
| 3184 | M00008023C:A06 | MA29:F07 | | U79296 | gi\|1710278\|gb\|U79296.1HSU79296 | 2.2E−257 |
| | | | | | Human dihydrolipoamide acetyl | |
| | | | | | transferase mRNA, partial cds | |
| 3185 | M00008024C:F02 | MA29:G07 | 0.26504 | AF092737 | gi\|4741762\|gb\|AF092737.1AF092737 | 3.5E−170 |
| | | | | | Homo sapiens ubiquitously expressed | |
| | | | | | transcript (UXT) mRNA, complete cds | |
| 3186 | M00008024C:G06 | MA29:H07 | | BC017335 | gi\|16878274\|gb\|BC017335.1BC017335 | 1E−300 |
| | | | | | Homo sapiens, clone MGC: 29782 | |
| | | | | | IMAGE: 4642600, mRNA, complete cds | |
| 3187 | M00022057C:H10 | MA33:B07 | | AK027629 | gi\|14042438\|dbj\|AK027629.1AK027629 | 6.8E−79 |
| | | | | | Homo sapiens cDNA FLJ14723 fis, clone | |
| | | | | | NT2RP3001708, weakly similar to | |
| | | | | | TWISTED GASTRULATION PROTE | |
| 3188 | M00022059B:B06 | MA33:C07 | | BC005267 | gi\|14710008\|gb\|BC005267.1BC005267 | 1E−300 |
| | | | | | Homo sapiens, clone IMAGE: 3683864, | |
| | | | | | mRNA | |
| 3189 | M00026902B:F10 | MA39:B10 | | L15203 | gi\|402482\|gb\|L15203.1HUMP1BX Human | 4.8E−249 |
| | | | | | secretory protein (P1.B) mRNA, complete | |
| | | | | | cds | |
| 3190 | M00001394D:B08 | MA15:C04 | | U58773 | gi\|6502504\|gb\|U58773.1HSU58773 | 1E−300 |
| | | | | | Human calcium binding protein mRNA, | |
| | | | | | complete cds | |
| 3191 | M00001415A:G05 | MA15:A10 | | BC006337 | gi\|3623468\|gb\|BC006337.1BC006337 | 1.5E−205 |
| | | | | | Homo sapiens, clone MGC: 12798 | |
| | | | | | IMAGE: 4304127, mRNA, complete cds | |
| 3192 | M00001416B:E03 | MA15:B10 | | X57198 | gi\|37071\|emb\|X57198.1HSTFIIS Human | 0 |
| | | | | | TFIIS mRNA for transcription elongation | |
| | | | | | factor | |
| 3193 | M00001421B:B12 | MA15:H10 | | AF083246 | gi\|5106786\|gb\|AF083246.1HSPC028 | 0 |
| | | | | | Homo sapiens HSPC028 mRNA, complete | |
| | | | | | cds | |
| 3194 | M00005528C:E02 | MA242:G04 | | AK054675 | gi\|16549267\|dbj\|AK054675.1AK054675 | 1.5E−286 |
| | | | | | Homo sapiens cDNA FLJ30113 fis, clone | |
| | | | | | BNGH42000474 | |
| 3195 | M00023312D:F10 | MA36:A10 | 0.47266 | | | |
| 3196 | M00022157A:C06 | MA35:C04 | 0.05831 | | | |
| 3197 | M00022165A:A11 | MA35:H04 | | AK000084 | gi\|7019941\|dbj\|AK000084.1AK000084 | 0 |
| | | | | | Homo sapiens cDNA FLJ20077 fis, clone | |
| | | | | | COL02904 | |
| 3198 | M00022206A:B10 | MA35:D10 | | AL137546 | gi\|6808228\|emb\|AL137546.1HSM802283 | 1E−293 |
| | | | | | Homo sapiens mRNA; cDNA | |
| | | | | | DKFZp434A1920 (from clone | |
| | | | | | DKFZp434A1920); partial cds | |
| 3199 | M00003811B:F09 | | | BC009470 | gi\|14495716\|gb\|BC009470.1BC009470 | 0 |
| | | | | | Homo sapiens, protein kinase, interferon- | |
| | | | | | inducible double stranded RNA dependent | |
| | | | | | activator, clone | |
| 3200 | M00003812D:A11 | | | AK026526 | gi\|10439403\|dbj\|AK026526.1AK026526 | 7.6E−137 |
| | | | | | Homo sapiens cDNA: FLJ22873 fis, clone | |
| | | | | | KAT02673, highly similar to HUML12A | |
| | | | | | Human ribosomal prote | |
| 3201 | M00022088D:C10 | MA34:G04 | | | | |
| 3202 | M00003910B:C12 | | | AF132945 | gi\|4680660\|gb\|AF132945.1AF132945 | 0 |
| | | | | | Homo sapiens CGI-11 protein mRNA, | |
| | | | | | complete cds | |
| 3203 | M00001366A:F06 | MA14:A04 | | U24704 | gi\|2078477\|gb\|U24704.1HSU24704 | 0 |
| | | | | | Human antisecretory factor-1 mRNA, | |
| | | | | | complete cds | |
| 3204 | M00001435C:F12 | MA16:B04 | | BC003576 | gi\|13097755\|gb\|BC003576.1BC003576 | 1E−300 |
| | | | | | Homo sapiens, actinin, alpha 1, clone | |
| | | | | | MGC: 2358 IMAGE: 3547017, mRNA, | |
| | | | | | complete cds | |
| 3205 | M00001436B:E11 | MA16:C04 | | BC003573 | gi\|13097746\|gb\|BC003573.1BC003573 | 0 |
| | | | | | Homo sapiens, farnesyl-diphosphate | |
| | | | | | farnesyltransferase 1, clone MGC: 2200 | |
| | | | | | IMAGE: 3538137, mRNA, com | |
| 3206 | M00001366B:E01 | MA14:D04 | | AK000609 | gi\|7020817\|dbj\|AK000609.1AK000609 | 1E−300 |
| | | | | | Homo sapiens cDNA FLJ20602 fis, clone | |
| | | | | | KAT07189 | |
| 3207 | M00001436C:C03 | MA16:D04 | | Z37986 | gi\|780262\|emb\|Z37986.1HSPHBIPRM | 1E−300 |
| | | | | | H. sapiens mRNA for phenylalkylamine | |
| | | | | | binding protein | |
| 3208 | M00001437A:B01 | MA16:F04 | | NM_000994 | gi\|15812220\|ref\|NM_000994.2 Homo | 4.1E−240 |
| | | | | | sapiens ribosomal protein L32 (RPL32), | |
| | | | | | mRNA | |
| 3209 | M00001437B:B08 | MA16:G04 | | AF095287 | gi\|3766235\|gb\|AF095287.1AF095287 | 2.5E−294 |
| | | | | | Homo sapiens pituitary tumor transforming | |
| | | | | | gene protein 1 (PTTG1) mRNA, complete | |
| | | | | | cds | |
| 3210 | M00001467B:H05 | | | J04456 | gi\|187109\|gb\|J04456.1HUMLEC Human | 1.9E−273 |
| | | | | | 14 kd lectin mRNA, complete cds | |
| 3211 | M00001468A:D02 | MA16:F10 | | U71213 | gi\|1621431\|gb\|U71213.1HSMIGST04 | 5.7E−127 |
| | | | | | Homo sapiens microsomal glutathione s- | |
| | | | | | transferase gene, exon 4, alternatively | |
| | | | | | spliced transcripts, | |
| 3212 | M00007131B:B11 | MA243:B04 | | BC017931 | gi\|17389843\|gb\|BC017931.1BC017931 | 0 |
| | | | | | Homo sapiens, Similar to RIKEN cDNA | |
| | | | | | 1110055A02 gene, clone MGC: 23962 | |
| | | | | | IMAGE: 4669658, mRNA, complet | |
| 3213 | M00006650A:A10 | MA241:E04 | | | | |
| 3214 | M00006653C:B09 | MA241:G04 | 0.0956 | M17885 | gi\|190231\|gb\|M17885.1HUMPPARP0 | 2.6E−186 |
| | | | | | Human acidic ribosomal phosphoprotein | |
| | | | | | P0 mRNA, complete cds | |
| 3215 | M00007154B:H08 | MA243:G04 | | BC016367 | gi\|16741029\|gb\|BC016367.1BC016367 | 1E−300 |
| | | | | | Homo sapiens, retinal short-chain | |
| | | | | | dehydrogenase/reductase retSDR2, clone | |
| | | | | | MGC: 24582 IMAGE: 4133318, | |
| 3216 | M00006740A:E02 | MA241:A10 | | | | |
| 3217 | M00021621A:D04 | MA243:A10 | | NM_003137 | gi\|15834623\|ref\|NM_003137.2 Homo | 2.3E−285 |
| | | | | | sapiens SFRS protein kinase 1 (SRPK1), | |
| | | | | | mRNA | |
| 3218 | M00006740B:F11 | MA241:B10 | | AK022929 | gi\|10434601\|dbj\|AK022929.1AK022929 | 4.9E−277 |
| | | | | | Homo sapiens cDNA FLJ12867 fis, clone | |
| | | | | | NT2RP2003702, highly similar to Homo | |
| | | | | | sapiens 17 beta-hydro | |
| 3219 | M00006741C:A01 | MA241:C10 | | AF201939 | gi\|9295181\|gb\|AF201939.1AF201939 | 7.6E−183 |
| | | | | | Homo sapiens DC5 (DC5) mRNA, | |
| | | | | | complete cds | |
| 3220 | M00022171C:A04 | MA243:F10 | | BC000793 | gb\|12653990\|gb\|BC000793.1BC000793 | 0 |
| | | | | | Homo sapiens, eukaryotic translation | |
| | | | | | initiation factor 1A, clone MGC: 5131 | |
| | | | | | IMAGE: 3451631, mRNA, co | |
| 3221 | M00026937C:B08 | MA40:E05 | | AF151534 | gi\|8099341\|gb\|AF151534.1AF151534 | 9.5E−177 |
| | | | | | Homo sapiens core histone macroH2A2.2 | |
| | | | | | (MACROH2A2) mRNA, complete cds | |
| 3222 | M00023367A:H06 | MA37:G05 | 0.04244 | BC015958 | gi\|16358989\|gb\|BC015958.1BC015958 | 2.6E−257 |
| | | | | | Homo sapiens, clone MGC: 15290 | |
| | | | | | IMAGE: 3940309, mRNA, complete cds | |
| 3223 | M00026985C:E12 | MA40:F11 | | BC000927 | gi\|12654216\|gb\|BC000927.1BC000927 | 0 |
| | | | | | Homo sapiens, Similar to poly (A) | |
| | | | | | polymerase, clone MGC: 5378 | |
| | | | | | IMAGE: 3445706, mRNA, complete cds | |
| 3224 | M00008100A:A07 | MA31:B05 | | AF247820 | gi\|13186200\|gb\|AF247820.3AF247820 | 4.1E−237 |
| | | | | | Homo sapiens NAG22 protein mRNA, | |
| | | | | | complete cds | |
| 3225 | M00007936B:H07 | MA27:E05 | | BC001929 | gi\|12804952\|gb\|BC001929.1BC001929 | 8.4E−145 |
| | | | | | Homo sapiens, clone MGC: 3993 | |
| | | | | | IMAGE: 2819500, mRNA, complete cds | |
| 3226 | M00008100C:E05 | MA31:F05 | 0.05241 | AF395203 | gi\|15028449\|gb\|AF395203.1AF395203 | 6.5E−156 |
| | | | | | Cercopithecus aethiops DnaJ-like protein | |
| | | | | | (dj2) mRNA, complete cds | |
| 3227 | M00007947B:B02 | MA27:E11 | | | | |
| 3228 | M00004105A:C09 | MA25:F05 | | BC010042 | gi\|14603152\|gb\|BC010042.1BC010042 | 1.6E−202 |
| | | | | | Homo sapiens, clone MGC: 19606 | |
| | | | | | IMAGE: 3629513, mRNA, complete cds | |
| 3229 | M00001433C:D09 | MA23:G05 | | U23070 | gi\|1262172\|gb\|U23070.1HSU23070 | 0 |
| | | | | | Human putative transmembrane protein | |
| | | | | | (nma) mRNA, complete cds | |
| 3230 | M00008027B:D09 | MA29:B09 | | M33132 | gi\|189423\|gb\|M33132.1HUMP12AA | 4.8E−165 |
| | | | | | Human proliferating cell nucleolar protein | |
| | | | | | P120 gene, exons 1-15 | |
| 3231 | M00008028D:B01 | MA29:D09 | | AB014595 | gi\|3327203\|dbj\|AB014595.1AB014595 | 1E−300 |
| | | | | | Homo sapiens mRNA for KIAA0695 | |
| | | | | | protein, complete cds | |
| 3232 | M00008039A:C09 | MA29:F09 | 0.04 | BC013869 | gi\|17105403\|gb\|BC013869.1BC013869 | 2.6E−291 |
| | | | | | Homo sapiens, clone IMAGE: 3831740, | |
| | | | | | mRNA | |
| 3233 | M00026905A:A10 | MA39:A11 | | AF069073 | gi\|3202003\|gb\|AF069073.1AF069073 | 0 |
| | | | | | Homo sapiens P8 protein mRNA, complete | |
| | | | | | cds | |
| 3234 | M00026905D:C05 | MA39:C11 | | BC010631 | gi\|14714946\|gb\|BC010631.1BC010631 | 3.3E−281 |
| | | | | | Homo sapiens, clone IMAGE: 3867552, | |
| | | | | | mRNA | |
| 3235 | M00001401B:A06 | MA15:G05 | | U90313 | gi\|2393721\|gb\|U90313.1HSU90313 | 0 |
| | | | | | Human glutathione-S-transferase homolog | |
| | | | | | mRNA, complete cds | |
| 3236 | M00001402A:A08 | MA15:H05 | 0.03584 | X74215 | gi\|414045\|emb\|X74215.1HSLON | 7E−181 |
| | | | | | H. sapiens mRNA for Lon protease-like | |
| | | | | | protein | |
| 3237 | M00005534C:E12 | MA242:A05 | 0.55385 | | | |
| 3238 | M00005542A:D09 | MA242:D05 | | NM_001428 | gi\|16507965\|ref\|NM_001428.2 Homo | 1.1E−218 |
| | | | | | sapiens enolase 1, (alpha) (ENO1), mRNA | |
| 3239 | M00007031D:E02 | MA240:F11 | | NM_005463 | gi\|14110410\|ref\|NM_005463.2 Homo | 2.8E−186 |
| | | | | | sapiens heterogeneous nuclear | |
| | | | | | ribonucleoprotein D-like (HNRPDL), | |
| | | | | | transcript variant 1, mRNA | |
| 3240 | M00007032A:D04 | MA240:G11 | | D89678 | gi\|3218539\|dbj\|D89678.1D89678 Homo | 5.2E−225 |
| | | | | | sapiens mRNA for A+U-rich element RNA | |
| | | | | | binding factor, complete cds | |
| 3241 | M00005813C:F12 | MA242:H11 | | BC000659 | gi\|12653746\|gb\|BC000659.1BC000659 | 1.8E−245 |
| | | | | | Homo sapiens, clone MGC: 1004 | |
| | | | | | IMAGE: 3347423, mRNA, complete cds | |
| 3242 | SL163 | MA248:B05 | 0.82548 | | | |
| 3243 | SL164 | MA248:C05 | 0.43491 | AF415175 | gi\|16589063\|gb\|AF415175.1AF415175 | 4.9E−102 |
| | | | | | Homo sapiens putative SH3 domain- | |
| | | | | | containing guanine exchange factor SGEF | |
| | | | | | (SGEF) mRNA, complete cd | |
| 3244 | SL167 | MA248:F05 | 0.13452 | AK025140 | gi\|10437598\|dbj\|AK025140.1AK025140 | 5.5E−159 |
| | | | | | Homo sapiens cDNA: FLJ21487 fis, clone | |
| | | | | | COL05419 | |
| 3245 | SL168 | MA248:G05 | 0.72115 | | | |
| 3246 | SL169 | MA248:H05 | | | | |
| 3247 | M00023320B:A03 | MA36:H11 | | BC006428 | gi\|13623618\|gb\|BC006428.1BC006428 | 6.8E−298 |
| | | | | | Homo sapiens, hypothetical protein, clone | |
| | | | | | MGC: 12969 IMAGE: 3343683, mRNA, | |
| | | | | | complete cds | |
| 3248 | M00005350B:F10 | MA246:C05 | | BC014191 | gi\|15559670\|gb\|BC014191.1BC014191 | 4.7E−218 |
| | | | | | Homo sapiens, clone MGC: 20633 | |
| | | | | | IMAGE: 4761663, mRNA, complete cds | |
| 3249 | M00008069D:F01 | MA30:B05 | 0.09317 | | | |
| 3250 | M00022165B:C08 | MA35:B05 | | BC012585 | gi\|15214891\|gb\|BC012585.1BC012585 | 5.4E−199 |
| | | | | | Homo sapiens, clone IMAGE: 4332982, | |
| | | | | | mRNA | |
| 3251 | M00022165C:E12 | MA35:D05 | | NM_001024 | gi\|14670385\|ref\|NM_001024.2 Homo | 4E−184 |
| | | | | | sapiens ribosomal protein S21 (RPS21), | |
| | | | | | mRNA | |
| 3252 | M00022166C:E07 | MA35:E05 | | D87717 | gi\|1663709\|dbj\|D87717.1D87717 Human | 1.8E−139 |
| | | | | | mRNA for KIAA0013 gene, complete cds | |
| 3253 | M00008072D:E12 | MA30:F05 | | BC007581 | gi\|14043186\|gb\|BC007581.1BC007581 | 6.5E−264 |
| | | | | | Homo sapiens, aldehyde dehydrogenase 4 | |
| | | | | | family, member A1, clone MGC: 15564 | |
| | | | | | IMAGE: 3139944, mRNA, co | |
| 3254 | M00022211B:D05 | MA35:A11 | | AK025494 | gi\|10438028\|dbj\|AK025494.1AK025494 | 2.3E−226 |
| | | | | | Homo sapiens cDNA: FLJ21841 fis, clone | |
| | | | | | HEP01831 | |
| 3255 | M00008089A:E09 | MA30:G11 | | AB050577 | gi\|14317901\|dbj\|AB050577.1AB050577 | 1.1E−231 |
| | | | | | Homo sapiens NUF2 mRNA for | |
| | | | | | kinetochore protein Nuf2, complete cds | |
| 3256 | M00003974D:E04 | MA24:C11 | | AF136185 | gi\|6625654\|gb\|AF136185.1AF136185 | 3.5E−228 |
| | | | | | Homo sapiens collagen type XVII | |
| | | | | | (COL17A1) gene, 3' UTR, long form | |
| 3257 | M00003980D:F10 | MA24:F11 | | AF150100 | gi\|5107187\|gb\|AF150100.1AF150100 | 5E−252 |
| | | | | | Homo sapiens small zinc finger-like | |
| | | | | | protein (TIM9a) mRNA, complete cds | |
| 3258 | M00003984D:C08 | MA24:H11 | | AL133560 | gi\|6599130\|emb\|AL133560.1HSM801406 | 0 |
| | | | | | Homo sapiens mRNA; cDNA | |
| | | | | | DKFZp434M1414 (from clone | |
| | | | | | DKFZp434M1414); partial cds | |
| 3259 | M00023373D:A01 | MA22:E05 | | AK023875 | gi\|10435944\|dbj\|AK023875.1AK023875 | 2.2E−201 |
| | | | | | Homo sapiens cDNA FLJ13813 fis, clone | |
| | | | | | THYRO1000358, moderately similar to | |
| | | | | | SELENIUM-BINDING LIVER | |
| 3260 | M00023396D:D01 | MA22:H05 | 0.48026 | | | |
| 3261 | M00001437D:E12 | MA16:A05 | | M30684 | gi\|177064\|gb\|M30684.1GORMHCBAA | 2.3E−260 |
| | | | | | Gorilla gorilla beta-2-microglobulin | |
| | | | | | mRNA (GOGOB2M) | |
| 3262 | M00001438A:B09 | MA16:B05 | | BC005230 | gi\|13528857\|gb\|BC005230.1BC005230 | 3.6E−259 |
| | | | | | Homo sapiens, ubiquinol-cytochrome c | |
| | | | | | reductase binding protein, clone | |
| | | | | | MGC: 12253 IMAGE: 3961169, mR | |
| 3263 | M00001369A:C07 | MA14:E05 | | AF097514 | gi\|4808600\|gb\|AF097514.1AF097514 | 2.2E−229 |
| | | | | | Homo sapiens stearoyl-CoA desaturase | |
| | | | | | (SCD) mRNA, complete cds | |
| 3264 | M00001439C:A07 | MA16:F05 | | BC017270 | gi\|16878126\|gb\|BC017270.1BC017270 | 3.7E−106 |
| | | | | | Homo sapiens, homolog of yeast long | |
| | | | | | chain polyunsaturated fatty acid elongation | |
| | | | | | enzyme 2, clone M | |
| 3265 | M00001369C:A05 | MA14:H05 | | AF190167 | gi\|6456117\|gb\|AF190167.1AF190167 | 1E−300 |
| | | | | | Homo sapiens membrane associated | |
| | | | | | protein SLP-2 (HUSLP2) mRNA, | |
| | | | | | complete cds | |
| 3266 | M00001468D:B11 | MA16:A11 | | BC008442 | gi\|14250074\|gb\|BC008442.1BC008442 | 5.3E−149 |
| | | | | | Homo sapiens, Similar to transmembrane 4 | |
| | | | | | superfamily member 1, clone MGC: 14656 | |
| | | | | | IMAGE: 4101110, mRN | |
| 3267 | M00001386B:F08 | MA14:B11 | | AF132818 | gi\|6580834\|gb\|AF132818.1AF132818 | 3E−169 |
| | | | | | Homo sapiens colon Kruppel-like factor | |
| | | | | | (CKLF) mRNA, complete cds | |
| 3268 | M00001387A:A08 | MA14:F11 | | NM_022551 | gi\|14165467\|ref\|NM_022551.2 Homo | 7E−298 |
| | | | | | sapiens ribosomal protein S18 (RPS18), | |
| | | | | | mRNA | |
| 3269 | M00007163A:B10 | MA243:B05 | | D29013 | gi\|517113\|dbj\|D29013.1HUMLNCAP | 1.5E−178 |
| | | | | | Human mRNA for DNA polymerase beta, | |
| | | | | | complete cds | |
| 3270 | M00006675C:A06 | MA241:E05 | | BC009534 | gi\|16306927\|gb\|BC009534.1BC009534 | 3.1E−250 |
| | | | | | Homo sapiens, clone IMAGE: 3891886, | |
| | | | | | mRNA, partial cds | |
| 3271 | M00007191C:A06 | MA243:G05 | | BC001765 | gi\|12804678\|gb\|BC001765.1BC001765 | 1.7E−295 |
| | | | | | Homo sapiens, Similar to stromal antigen | |
| | | | | | 2, clone MGC: 1282 IMAGE: 3352347, | |
| | | | | | mRNA, complete cds | |
| 3272 | M00006678A:D02 | MA241:H05 | | NM_002475 | gi\|17986280\|ref\|NM_002475.2 Homo | 1E−240 |
| | | | | | sapiens myosin light chain 1 slow a | |
| | | | | | (MLC1SA), mRNA | |
| 3273 | M00026941C:A12 | MA40:E06 | | BC018910 | gi\|17511916\|gb\|BC018910.1BC018910 | 2.6E−149 |
| | | | | | Homo sapiens, clone MGC: 10643 | |
| | | | | | IMAGE: 3959973, mRNA, complete cds | |
| 3274 | M00026996A:E01 | MA40:E12 | 0.05985 | AF238079 | gi\|7542489\|gb\|AF238079.1AF238079 | 0 |
| | | | | | Homo sapiens FK506 binding protein | |
| | | | | | precursor (FKBP19) mRNA, complete cds | |
| 3275 | M00023401B:E06 | MA37:G12 | 0.71373 | | | |
| 3276 | M00027005B:D03 | MA40:H12 | | AL137626 | gi\|6808422\|emb\|AL137626.1HSM802390 | 5.8E−289 |
| | | | | | Homo sapiens mRNA; cDNA | |
| | | | | | DKFZp434O0712 (from clone | |
| | | | | | DKFZp434O0712); partial cds | |
| 3277 | M00007937B:A02 | MA27:C06 | | Z18948 | gi\|396712\|emb\|Z18948.1HSS100E | 1.3E−174 |
| | | | | | H. sapiens mRNA for S100E calcium | |
| | | | | | binding protein | |
| 3278 | M00021612C:E11 | MA31:C06 | 0.60788 | AB032969 | gi\|6329965\|dbj\|AB032969.1AB032969 | 1.2E−92 |
| | | | | | Homo sapiens mRNA for KIAA1143 | |
| | | | | | protein, partial cds | |
| 3279 | M00007938C:C12 | MA27:G06 | | BC002360 | gi\|12803112\|gb\|BC002360.1BC002360 | 3.1E−122 |
| | | | | | Homo sapiens, U5 snRNP-specific protein, | |
| | | | | | 116 kD, clone MGC: 8581 | |
| | | | | | IMAGE: 2960986, mRNA, complete cds | |
| 3280 | M00001623C:A06 | MA23:F12 | | BC000629 | gi\|12653688\|gb\|BC000629.1BC000629 | 9.9E−238 |
| | | | | | Homo sapiens, Similar to aspartyl-tRNA | |
| | | | | | synthetase, clone MGC: 1562 | |
| | | | | | IMAGE: 3344322, mRNA, complete c | |
| 3281 | M00001630D:A11 | MA23:G12 | | AF179626 | gi\|6457296\|gb\|AF179626.1AF179626 | 1.7E−298 |
| | | | | | Expression vector pGP100, complete | |
| | | | | | sequence | |
| 3282 | M00008044B:E11 | MA29:A11 | | AF083420 | gi\|5326765\|gb\|AF083420.1AF083420 | 4.5E−268 |
| | | | | | Homo sapiens brain-specific STE20-like | |
| | | | | | protein kinase 3 (STK3) mRNA, complete | |
| | | | | | cds | |
| 3283 | M00008044C:C10 | MA29:B11 | | AF224759 | gi\|12043739\|gb\|AF224759.1AF224759 | 1.3E−277 |
| | | | | | Homo sapiens adenocarcinoma antigen | |
| | | | | | ART1/P17 mRNA, complete cds | |
| 3284 | M00008044D:B08 | MA29:C11 | 0.82704 | BC019356 | gi\|17939588\|gb\|BC019356.1BC019356 | 5.4E−27 |
| | | | | | Homo sapiens, clone IMAGE: 3503646, | |
| | | | | | mRNA | |
| 3285 | M00008044D:C05 | MA29:D11 | | M23161 | gi\|339899\|gb\|M23161.1HUMTRANSC | 5.4E−160 |
| | | | | | Human transposon-like element mRNA | |
| 3286 | M00022074C:A04 | MA33:E11 | | | | |
| 3287 | M00026910C:D12 | MA39:E12 | | J03037 | gi\|179771\|gb\|J03037.1HUMCAIIA Human | 2.4E−263 |
| | | | | | carbonic anhydrase II mRNA, complete | |
| | | | | | cds | |
| 3288 | M00026913A:D06 | MA39:G12 | | AK058163 | gi\|16554226\|dbj\|AK058163.1AK058163 | 2.9E−275 |
| | | | | | Homo sapiens cDNA FLJ25434 fis, clone | |
| | | | | | TST06728, highly similar to | |
| | | | | | ELONGATION FACTOR 1-ALPHA 1 | |
| 3289 | M00001402C:H08 | MA15:D06 | | BC000461 | gi\|12653382\|gb\|BC000461.1BC000461 | 0 |
| | | | | | Homo sapiens, eukaryotic translation | |
| | | | | | initiation factor 2, subunit 2 (beta, 38 kD), | |
| | | | | | clone MGC: 8508 | |
| 3290 | M00001404C:C11 | MA15:F06 | | BC001497 | gi\|16306642\|gb\|BC001497.1BC001497 | 1.4E−286 |
| | | | | | Homo sapiens, clone MGC: 2068 | |
| | | | | | IMAGE: 2823581, mRNA, complete cds | |
| 3291 | M00005587B:G05 | MA242:C06 | | BC001566 | gi\|16306756\|gb\|BC001566.1BC001566 | 8.5E−282 |
| | | | | | Homo sapiens, clone IMAGE: 3451980, | |
| | | | | | mRNA, partial cds | |
| 3292 | M00006934D:D10 | MA240:C06 | | D63861 | gi\|1769811\|dbj\|D63861.1D63861 Homo | 7.5E−142 |
| | | | | | sapiens DNA for cyclophilin 40, complete | |
| | | | | | cds | |
| 3293 | SL176 | MA248:G06 | | | | |
| 3294 | M00023295D:E05 | MA36:A06 | | M16957 | gi\|188249\|gb\|M16957.1HUMMHDRA2D | 5.2E−227 |
| | | | | | Human MHC class II HLA-DR2 (Dw2) b- | |
| | | | | | associated glycoprotein beta-chain mRNA, | |
| | | | | | 3′ end | |
| 3295 | M00023320B:C02 | MA36:A12 | | | | |
| 3296 | M00005401B:F12 | MA246:B12 | | U47742 | gi\|1517913\|gb\|U47742.1HSU47742 | 4.4E−54 |
| | | | | | Human monocytic leukaemia zinc finger | |
| | | | | | protein (MOZ) mRNA, complete cds | |
| 3297 | M00008074D:C05 | MA30:F06 | | AF035289 | gi\|2661043\|gb\|AF035289.1AF035289 | 3.3E−197 |
| | | | | | Homo sapiens clone 23969 mRNA | |
| | | | | | sequence | |
| 3298 | M00022175B:F06 | MA35:G06 | | U81002 | gi\|4580010\|gb\|U81002.1HSU81002 Homo | 1.1E−212 |
| | | | | | sapiens TRAF4 associated factor 1 mRNA, | |
| | | | | | partial cds | |
| 3299 | M00022230B:C10 | MA35:G12 | | BC019061 | gi\|17512149\|gb\|BC019061.1BC019061 | 7.5E−149 |
| | | | | | Homo sapiens, Similar to RIKEN cDNA | |
| | | | | | 1500019E20 gene, clone | |
| | | | | | IMAGE: 5089739, mRNA | |
| 3300 | M00022093C:C08 | MA34:C06 | | AB061831 | gi\|17932955\|dbj\|AB061831.1AB061831 | 1.1E−184 |
| | | | | | Homo sapiens RPL32 gene for ribosomal | |
| | | | | | protein L32, complete cds and sequence | |
| 3301 | M00022093C:C12 | MA34:D06 | | BC009401 | gi\|14424786\|gb\|BC009401.1BC009401 | 9.9E−294 |
| | | | | | Homo sapiens, natural killer cell transcript | |
| | | | | | 4, clone MGC: 15353 IMAGE: 4300407, | |
| | | | | | mRNA, complete cds | |
| 3302 | M00022132A:H07 | MA34:F12 | | BC015557 | gi\|15990394\|gb\|BC015557.1BC015557 | 1E−300 |
| | | | | | Homo sapiens, clone MGC: 1567 | |
| | | | | | IMAGE: 3050731, mRNA, complete cds | |
| 3303 | M00023397B:D04 | MA22:A06 | | AF083441 | gi\|5813822\|gb\|AF083441.1AF083441 | 1E−300 |
| | | | | | Homo sapiens SUI1 isolog mRNA, | |
| | | | | | complete cds | |
| 3304 | M00023399D:G04 | MA22:E06 | | BC004450 | gi\|13325265\|gb\|BC004450.1BC004450 | 1E−300 |
| | | | | | Homo sapiens, hypothetical protein | |
| | | | | | MGC2650, clone MGC: 4188 | |
| | | | | | IMAGE: 2820830, mRNA, complete cds | |
| 3305 | M00001439D:C09 | MA16:A06 | | BC002446 | gi\|12803262\|gb\|BC002446.1BC002446 | 0 |
| | | | | | Homo sapiens, MRJ gene for a member of | |
| | | | | | the DNAJ protein family, clone MGC: 1152 | |
| | | | | | IMAGE: 3346070, mRN | |
| 3306 | M00001441A:A09 | MA16:B06 | | M57710 | gi\|179530\|gb\|M57710.1HUMBPIGE | 1.7E−295 |
| | | | | | Human IgE-binding protein (epsilon-BP) | |
| | | | | | mRNA, complete cds | |
| 3307 | M00001369D:E02 | MA14:C06 | | AF034546 | gi\|3127052\|gb\|AF034546.1AF034546 | 1.9E−195 |
| | | | | | Homo sapiens sorting nexin 3 (SNX3) | |
| | | | | | mRNA, complete cds | |
| 3308 | M00001371D:H10 | MA14:E06 | | | | |
| 3309 | M00001372A:D01 | MA14:F06 | | AF151872 | gi\|4929696\|gb\|AF151872.1AF151872 | 0 |
| | | | | | Homo sapiens CGI-114 protein mRNA, | |
| | | | | | complete cds | |
| 3310 | M00001444C:F03 | MA16:G06 | | AL359678 | gi\|15215911\|emb\|AL359678.15AL359678 | 0 |
| | | | | | Human DNA sequence from clone RP11- | |
| | | | | | 550J21 on chromosome 9, complete | |
| | | | | | sequence [Homo sapiens] | |
| 3311 | M00001445A:B02 | | | BC003401 | gi\|13097293\|gb\|BC003401.1BC003401 | 9.7E−291 |
| | | | | | Homo sapiens, ribosomal protein S14, | |
| | | | | | clone MGC: 5429 IMAGE: 3448752, | |
| | | | | | mRNA, complete cds | |
| 3312 | M00001388D:F11 | MA14:D12 | | BC002609 | gi\|12803554\|gb\|BC002609.1BC002609 | 0 |
| | | | | | Homo sapiens, chromobox homolog 1 | |
| | | | | | (Drosophila HP1 beta), clone MGC: 1267 | |
| | | | | | IMAGE: 3140815, mRNA, comp | |
| 3313 | M00001481C:A12 | MA16:F12 | | AB033007 | gi\|6330242\|dbj\|AB033007.1AB033007 | 2.9E−88 |
| | | | | | Homo sapiens mRNA for KIAA1181 | |
| | | | | | protein, partial cds | |
| 3314 | M00001389B:B05 | MA14:G12 | | BC013858 | gi\|15426627\|gb\|BC013858.1BC013858 | 2E−239 |
| | | | | | Homo sapiens, clone IMAGE: 3869909, | |
| | | | | | mRNA | |
| 3315 | M00001389C:G01 | MA14:H12 | 0.07529 | AY004872 | gi\|9508996\|gb\|AY004872.1 Homo sapiens | 4.6E−175 |
| | | | | | thioredoxin (TXN) mRNA, complete cds | |
| 3316 | M00001482D:D11 | MA16:H12 | 0.07738 | BC009982 | gi\|14602997\|gb\|BC009982.1BC009982 | 5.1E−169 |
| | | | | | Homo sapiens, clone IMAGE: 4121355, | |
| | | | | | mRNA, partial cds | |
| 3317 | M00006809B:F04 | MA241:D12 | 0.62333 | | | |
| 3318 | I:3325119:07A01:A01 | MA127:A01 | | U21936 | gi\|717118\|gb\|U21936.1HSU21936 Human | 1.4E−149 |
| | | | | | peptide transporter (HPEPT1) mRNA, | |
| | | | | | complete cds | |
| 3319 | I:3033345:07A01:C01 | MA127:C01 | | BC004982 | gi\|13436412\|gb\|BC004982.1BC004982 | 9E−229 |
| | | | | | Homo sapiens, glucose phosphate | |
| | | | | | isomerase, clone MGC: 3935 | |
| | | | | | IMAGE: 2906270, mRNA, complete cds | |
| 3320 | I:3176222:07A01:E07 | MA127:E07 | | U09413 | gi\|488554\|gb\|U09413.1HSU09413 Human | 1.9E−264 |
| | | | | | zinc finger protein ZNF135 mRNA, | |
| | | | | | complete cds | |
| 3321 | I:2510627:07B01:G07 | MA129:G07 | | BC002803 | gi\|12803912\|gb\|BC002803.1BC002803 | 1E−300 |
| | | | | | Homo sapiens, hypothetical protein, clone | |
| | | | | | MGC: 3402 IMAGE: 3636703, mRNA, | |
| | | | | | complete cds | |
| 3322 | I:1705208:06B01:A01 | MA125:A01 | | X52541 | gi\|31129\|emp\|X52541.1HSEGR1 Human | 0 |
| | | | | | mRNA for early growth response protein 1 | |
| | | | | | (hEGR1) | |
| 3323 | I:1672781:06B01:C07 | MA125:C07 | | BC010042 | gi\|14603152\|gb\|BC010042.1BC010042 | 1E−300 |
| | | | | | Homo sapiens, clone MGC: 19606 | |
| | | | | | IMAGE: 3629513, mRNA, complete cds | |
| 3324 | I:1712888:06B01:D07 | MA125:D07 | | AL137469 | gi\|6808076\|emb\|AL137469.1HSM802187 | 1E−300 |
| | | | | | Homo sapiens mRNA; cDNA | |
| | | | | | DKFZp434P2422 (from clone | |
| | | | | | DKFZp434P2422); partial cds | |
| 3325 | I:1696224:06B01:E07 | MA125:E07 | | NM_005346 | gi\|5579470\|ref\|NM_005346.2 Homo | 1E−300 |
| | | | | | sapiens heat shock 70 kD protein 1B | |
| | | | | | (HSPA1B), mRNA | |
| 3326 | I:3935034:06B01:H07 | MA125:H07 | | BC007616 | gi\|14043251\|gb\|BC007616.1BC007616 | 1.2E−249 |
| | | | | | Homo sapiens, clone MGC: 15728 | |
| | | | | | IMAGE: 3354330, mRNA, complete cds | |
| 3327 | I:1800114:03A01:E01 | MA111:E01 | | M24559 | gi\|514365\|gb\|M24559.1HUMIGRPOLY | 1.5E−205 |
| | | | | | Human poly-Ig receptor transmembrane | |
| | | | | | secretory component mRNA, 3′ end | |
| 3328 | I:1976029:03A01:D07 | MA111:D07 | | BC000629 | gi\|12653688\|gb\|BC000629.1BC000629 | 1.1E−299 |
| | | | | | Homo sapiens, Similar to aspartyl-tRNA | |
| | | | | | synthetase, clone MGC: 1562 | |
| | | | | | IMAGE: 3344322, mRNA, complete c | |
| 3329 | I:1439934:03B01:E07 | MA113:E07 | 0.17464 | M64788 | gi\|190855\|gb\|M64788.1HUMRAP1GAP | 5.9E−184 |
| | | | | | Human GTPase activating protein | |
| | | | | | (rap1GAP) mRNA, complete cds | |
| 3330 | I:2512879:01A01:C01 | MA103:C01 | | M12271 | gi\|178091\|gb\|M12271.1HUMADH1CB | 3.7E−290 |
| | | | | | Homo sapiens class I alcohol | |
| | | | | | dehydrogenase (ADH1) alpha subunit | |
| | | | | | mRNA, complete cds | |
| 3331 | I:2900277:01B01:B07 | MA105:B07 | | BC015492 | gi\|15930098\|gb\|BC015492.1BC015492 | 1E−300 |
| | | | | | Homo sapiens, clone MGC: 8967 | |
| | | | | | IMAGE: 3915505, mRNA, complete cds | |
| 3332 | I:1479255:01A01:C07 | MA103:C07 | | NM_002245 | gi\|15451900\|ref\|NM_002245.2 Homo | 1E−300 |
| | | | | | sapiens potassium channel, subfamily K, | |
| | | | | | member 1 (TWIK-1) (KCNK1), mRNA | |
| 3333 | I:2648612:04B01:A01 | MA117:A01 | | NM_006013 | gi\|15718685\|ref\|NM_006013.2 Homo | 1E−300 |
| | | | | | sapiens ribosomal protein L10 (RPL10), | |
| | | | | | mRNA | |
| 3334 | I:1889867:04A01:C01 | MA115:C01 | | AF004563 | gi\|3041874\|gb\|AF004563.1AF004563 | 8.2E−148 |
| | | | | | Homo sapiens hUNC18b alternatively- | |
| | | | | | spliced mRNA, complete cds | |
| 3335 | I:1858905:04A01:D01 | MA115:D01 | | BC015520 | gi\|15930171\|gb\|BC015520.1BC015520 | 1.8E−211 |
| | | | | | Homo sapiens, ribonuclease, RNase A | |
| | | | | | family, 4, clone MGC: 9306 | |
| | | | | | IMAGE: 3905439, mRNA, complete cds | |
| 3336 | I:2591494:04B01:H01 | MA117:H01 | | BC009084 | gi\|14290606\|gb\|BC009084.1BC009084 | 0 |
| | | | | | Homo sapiens, Similar to selenium binding | |
| | | | | | protein 1, clone MGC: 9270 | |
| | | | | | IMAGE: 3853674, mRNA, complete | |
| 3337 | I:2916261:04B01:A07 | MA117:A07 | | BC016855 | gi\|16877177\|gb\|BC016855.1BC016855 | 5.9E−289 |
| | | | | | Homo sapiens, clone MGC: 17066 | |
| | | | | | IMAGE: 3850361, mRNA, complete cds | |
| 3338 | I:2397815:04B01:B07 | MA117:B07 | | BC007888 | gi\|14043894\|gb\|BC007888.1BC007888 | 3.3E−253 |
| | | | | | Homo sapiens, eukaryotic translation | |
| | | | | | initiation factor 2, subunit 2 (beta, 38 kD), | |
| | | | | | clone MGC: 1417 | |
| 3339 | I:2182095:04B01:D07 | MA117:D07 | | NM_002580 | gi\|4505604\|ref\|NM_002580.1 Homo | 5.8E−289 |
| | | | | | sapiens pancreatitis-associated protein | |
| | | | | | (PAP), mRNA | |
| 3340 | I:2506194:02A01:A01 | MA107:A01 | | U36601 | gi\|1036798\|gb\|U36601.1HSU36601 Homo | 1.3E−240 |
| | | | | | sapiens heparan N-deacetylase/N- | |
| | | | | | sulfotransferase-2 mRNA, complete cds | |
| 3341 | I:1806219:02A01:C01 | MA107:C01 | | U34279 | gi\|1236798\|gb\|U34279.1HSU34279 | 5.4E−202 |
| | | | | | Human uroguanylin mRNA, complete cds | |
| 3342 | I:1729724:02A01:G07 | MA107:G07 | | NM_002487 | gi\|10800414\|ref\|NM_002487.2 Homo | 3.1E−169 |
| | | | | | sapiens necdin homolog (mouse) (NDN), | |
| | | | | | mRNA | |
| 3343 | I:1886842:05A02:G01 | MA120:G01 | | BC010578 | gi\|14714852\|gb\|BC010578.1BC010578 | 1.5E−292 |
| | | | | | Homo sapiens, clone MGC: 9344 | |
| | | | | | IMAGE: 3458845, mRNA, complete cds | |
| 3344 | I:1352669:05A02:B07 | MA120:B07 | 0.10093 | BC016752 | gi\|16876952\|gb\|BC016752.1BC016752 | 1.4E−169 |
| | | | | | Homo sapiens, clone IMAGE: 2959721, | |
| | | | | | mRNA | |
| 3345 | I:1755847:05B02:C07 | MA122:C07 | | U51095 | gi\|1777771\|gb\|U51095.1HSUS1095 | 5.9E−230 |
| | | | | | Human homeobox protein Cdx1 mRNA, | |
| | | | | | complete cds | |
| 3346 | I:1803418:05B02:D07 | MA122:D07 | | BC006168 | gi\|13544071\|gb\|1BC006168.1BC006168 | 0 |
| | | | | | Homo sapiens, clone IMAGE: 3960207, | |
| | | | | | mRNA, partial cds | |
| 3347 | I:1568725:05B02:F07 | MA122:F07 | 0.36394 | D49410 | gi\|684968\|dbj\|D49410.1HUMIL3RA12 | 7.7E−187 |
| | | | | | Homo sapiens gene for interleukin 3 | |
| | | | | | receptor alpha subunit, exon 12 and partial | |
| | | | | | cds | |
| 3348 | I:1857708:05A02:G07 | MA120:G07 | | U43381 | gi\|1155348\|gb\|U43381.1HSU43381 | 1.3E−283 |
| | | | | | Human Down Syndrome region of | |
| | | | | | chromosome 21 DNA | |
| 3349 | I:1687060:05B02:G07 | MA122:G07 | | U57645 | gi\|1816511\|gb\|U57645.1HSU57645 | 3.3E−281 |
| | | | | | Human helix-loop-helix proteins Id-1 (ID- | |
| | | | | | 1) and Id-1′ (ID-1) genes, complete cds | |
| 3350 | I:3407289:07A02:A07 | MA128:A07 | 0.21116 | AB011135 | gi\|3043649\|dbj\|AB011135.1AB011135 | 1.7E−68 |
| | | | | | Homo sapiens mRNA for KIAA0563 | |
| | | | | | protein, complete cds | |
| 3351 | I:1235535:07A02:B07 | MA128:B07 | | NM_001012 | gi\|4506742\|ref\|NM_001012.1 Homo | 3.8E−156 |
| | | | | | sapiens ribosomal protein S8 (RPS8), | |
| | | | | | mRNA | |
| 3352 | I:1525795:03B02:D07 | MA114:D07 | | X05360 | gi\|29838\|emb\|X05360.1HSCDC2 Human | 1.5E−289 |
| | | | | | CDC2 gene involved in cell cycle control | |
| 3353 | I:3744592:03A02:H07 | MA112:H07 | | S76992 | gi\|913345\|gb\|S76992.1S76992 | 1E−194 |
| | | | | | VAV2 = VAV oncogene homolog [human, | |
| | | | | | fetal brain, mRNA Partial, 2753 nt] | |
| 3354 | I:1485817:01A02:B01 | MA104:B01 | | L14787 | gi\|292930\|gb\|L14787.1HUMZFPA Human | 3.4E−247 |
| | | | | | DNA-binding protein mRNA, 3′end | |
| 3355 | I:2365149:01B02:B01 | MA106:B01 | | U58917 | gi\|2826475\|gb\|U58917.1HSU58917 Homo | 9E−208 |
| | | | | | sapiens IL-17 receptor mRNA, complete | |
| | | | | | cds | |
| 3356 | I:1439677:01A02:D01 | MA104:D01 | | AL096780 | gi\|5420184\|emb\|AL096780.1HS384D86A | 1.8E−146 |
| | | | | | Novel human gene mapping to chomosome | |
| | | | | | 22p13.33 similar to mouse | |
| | | | | | Choline/Ethanolamine Kinase (O55 | |
| 3357 | I:2372275:01B02:G01 | MA106:G01 | | BC019252 | gi\|17939418\|gb\|BC019252.BC019252 | 1E−300 |
| | | | | | Homo sapiens, clone MGC: 1111 | |
| | | | | | IMAGE: 3503549, mRNA, complete cds | |
| 3358 | I:3211615:01B02:H01 | MA106:H01 | | BC013808 | gi\|15489437\|gb\|BC013808.1BC013808 | 2E−230 |
| | | | | | Homo sapiens, TATA box binding protein | |
| | | | | | (TBP)-associated factor, RNA polymerase | |
| | | | | | I, A, 48 kD, clone | |
| 3359 | I:2368282:01B02:B07 | MA106:B07 | | AK056794 | gi\|16552300\|dbj\|AK056794.1AK056794 | 5.8E−209 |
| | | | | | Homo sapiens cDNA FLJ32232 fis, clone | |
| | | | | | PLACE6004578, highly similar to | |
| | | | | | CYTOCHROME P450 11A1, MITO | |
| 3360 | I:1737833:04A02:D01 | MA116:D01 | | D26598 | gi\|565646\|dbj\|D26598.1HUMPSH1 | 1E−300 |
| | | | | | Human mRNA for proteasome subunit | |
| | | | | | HsC10-II, complete cds | |
| 3361 | I:2382192:04B02:F01 | MA118:F01 | | Y12653 | gi\|2546963\|emb\|Y12653.1HSDIUBIQU | 1.6E−264 |
| | | | | | H. sapiens mRNA for diubiquitin | |
| 3362 | I:1958902:04A02:D07 | MA116:D07 | | D87258 | gi\|1513058\|dbj\|D87258.1D87258 Homo | 0 |
| | | | | | sapiens mRNA for serin protease with | |
| | | | | | IGF-binding motif, complete cds | |
| 3363 | I:1704472:04B02:G07 | MA118:G07 | | U66871 | gi\|1519518\|gb\|U66871.1HSU66871 | 7E−161 |
| | | | | | Human enhancer of rudimentary homolog | |
| | | | | | mRNA, complete cds | |
| 3364 | I:1903767:04A02:H07 | MA116:H07 | | AF025304 | gi\|2739055\|gb\|AF025304.1AF025304 | 1E−300 |
| | | | | | Homo sapiens protein-tyrosine kinase | |
| | | | | | EPHB2v (EPHB2) mRNA, complete cds | |
| 3365 | I:1268080:02A02:C01 | MA108:C01 | | AB006631 | gi\|14133200\|dbj\|AB006631.2AB006631 | 0 |
| | | | | | Homo sapiens mRNA for KIAA0293 gene, | |
| | | | | | partial cds | |
| 3366 | I:1347384:02A02:C07 | MA108:C07 | | U78579 | gi\|1743878\|gb\|U78579.1HSU78579 | 0 |
| | | | | | Human type I phosphatidylinositol-4- | |
| | | | | | phosphate 5-kinase beta (STM7) mRNA, | |
| | | | | | partial cds | |
| 3367 | I:2344817:08B01:H02 | MA133:H02 | | | | |
| 3368 | I:3236109:08A01:B08 | MA131:B08 | 0.46441 | | | |
| 3369 | I:2832506:07A01:H08 | MA127:H08 | | BC000851 | gi\|12654082\|gb\|BC000851.1BC000851 | 8.5E−282 |
| | | | | | Homo sapiens, ribosomal protein L13, | |
| | | | | | clone IMAGE: 3458439, mRNA | |
| 3370 | I:1673876:06B01:B02 | MA125:B02 | | V00568 | gi\|34815\|emb\|V00568.1HSMYC1 Human | 1E−300 |
| | | | | | mRNA encoding the c-myc oncogene | |
| 3371 | I:3686211:06B01:E02 | MA125:E02 | | X59960 | gi\|402620\|emb\|X59960.1HSSPMYEL | 1E−300 |
| | | | | | H. sapiens mRNA for sphingomyelinase | |
| 3372 | I:2449837:06B01:H02 | MA125:H02 | | BC000070 | gi\|2652644\|gb\|BC000070.1BC000070 | 3E−219 |
| | | | | | Homo sapiens, small nuclear | |
| | | | | | ribonucleoprotein polypeptide G, clone | |
| | | | | | MGC: 1614 IMAGE: 3503973, mRNA, | |
| 3373 | I:1613874:06B01:C08 | MA125:C08 | | AF019952 | gi\|2655036\|gb\|AF019952.1AF019952 | 0 |
| | | | | | Homo sapiens tumor suppressing STF | |
| | | | | | cDNA 1 (TSSC1) mRNA, complete cds | |
| 3374 | I:1813409:03A01:C02 | MA111:C02 | | BC009244 | gi\|14328061\|gb\|BC009244.1BC009244 | 1E−300 |
| | | | | | Homo sapiens, isocitrate dehydrogenase 2 | |
| | | | | | (NADP+), mitochondrial, clone | |
| | | | | | MGC: 3700 IMAGE: 2959540, mR | |
| 3375 | I:1975514:03A01:A08 | MA111:A08 | | S52873 | gi\|263656\|gb\|S52873.1S52873 cytidine | 5.7E−286 |
| | | | | | deaminase [human, monocytoid cell line | |
| | | | | | U937, mRNA Partial, 736 nt] | |
| 3376 | I:1403294:01A01:B02 | MA103:B02 | 0.13199 | | | |
| 3377 | I:2414624:01B01:D02 | MA105:D02 | | U31278 | gi\|950198\|gb\|U31278.1HSU31278 Homo | 0 |
| | | | | | sapiens mitotic feedback control protein | |
| | | | | | Madp2 homolog mRNA, complete cds | |
| 3378 | I:2901811:01B01:H02 | MA105:H02 | | BC013081 | gi\|15341817\|gb\|BC013081.1BC013081 | 2.6E−213 |
| | | | | | Homo sapiens, Similar to metallothionein 3 | |
| | | | | | (growth inhibitory factor (neurotrophic)), | |
| | | | | | clone MGC: 1 | |
| 3379 | I:2683564:01B01:B08 | MA105:B08 | | V00522 | gi\|32122\|emb\|V00522.1HSHL01 Human | 2.5E−294 |
| | | | | | mRNA encoding major histocompatibility | |
| | | | | | complex gene HLA-DR beta-I | |
| 3380 | I:2725511:01B01:C08 | MA105:C08 | | AF004849 | gi\|2627330\|gb\|AF004849.1AF004849 | 1.4E−177 |
| | | | | | Homo sapiens PKY protein kinase mRNA, | |
| | | | | | complete cds | |
| 3381 | I:1431273:04A01:A02 | MA115:A02 | | M82962 | gi\|535474\|gb\|M82962.1HUMPPH Human | 1E−268 |
| | | | | | N-benzoyl-L-tyrosyl-p-amino-benzoic acid | |
| | | | | | hydrolase alpha subunit (PPH alpha) | |
| | | | | | mRNA, complete cds | |
| 3382 | I:1636639:04B01:A02 | MA117:A02 | | AF055009 | gi\|3005731\|gb\|AF055009.1AF055009 | 0 |
| | | | | | Homo sapiens clone 24747 mRNA | |
| | | | | | sequence | |
| 3383 | I:2455617:04B01:D02 | MA117:D02 | | BC008281 | gi\|14249818\|gb\|BC008281.1BC008281 | 3.2E−281 |
| | | | | | Homo sapiens, guanosine monophosphate | |
| | | | | | reductase, clone MGC: 10464 | |
| | | | | | IMAGE: 3635871, mRNA, complete cd | |
| 3384 | I:2952504:04B01:F02 | MA117:F02 | | U72849 | gi\|4097996\|gb\|U72849.1HSAPEVPL7 | 1E−300 |
| | | | | | Homo sapiens envoplakin (EVPL) gene, | |
| | | | | | exon 22 and complete cds | |
| 3385 | I:1483847:04A01:A08 | MA115:A08 | | AF026293 | gi\|2559011\|gb\|AF026293.1AF026293 | 4E−93 |
| | | | | | Homo sapiens chaperonin containing t- | |
| | | | | | complex polypeptide 1, beta subunit (Cctb) | |
| | | | | | mRNA, complete cds | |
| 3386 | I:2923150:04B01:B08 | MA117:B08 | | M18963 | gi\|190978\|gb\|M18963.1HUMREGA | 1.2E−237 |
| | | | | | Human islet of Langerhans regenerating | |
| | | | | | protein (reg) mRNA, complete cds | |
| 3387 | I:1813133:04A01:F08 | MA115:F08 | | X12597 | gi\|32326\|emb\|X12597.1HSHMG1 Human | 1.3E−255 |
| | | | | | mRNA for high mobility group-1 protein | |
| | | | | | (HMG-1) | |
| 3388 | I:2510171:04B01:H08 | MA117:H08 | 0.15344 | X04503 | gi\|36490\|emb\|X04503.1HSSLIPR Human | 1.1E−259 |
| | | | | | SLPI mRNA fragment for secretory | |
| | | | | | leucocyte protease inhibitor | |
| 3389 | I:2190284:02A01:H02 | MA107:H02 | | D84107 | gi\|1669546\|dbj\|D84107.1D84107 Homo | 0 |
| | | | | | sapiens mRNA for RBP-MS/type 1, | |
| | | | | | complete cds | |
| 3390 | I:1522716:05B02:B02 | MA122:B02 | | X56134 | gi\|37849\|emb\|X56134.1HSVIMENT | 0 |
| | | | | | Human mRNA for vimentin | |
| 3391 | I:1901271:05A02:G02 | MA120:G02 | | U90916 | gi\|1913897\|gb\|U90916.1HSU90916 | 9E−288 |
| | | | | | Human clone 23815 mRNA sequence | |
| 3392 | I:1820522:05B02:H02 | MA122:H02 | | BC002806 | gi\|12803918\|gb\|BC002806.1BC002806 | 1.1E−299 |
| | | | | | Homo sapiens, phosphatidic acid | |
| | | | | | phosphatase type 2C, clone MGC: 3813 | |
| | | | | | IMAGE: 3659728, mRNA, complete | |
| 3393 | I:2365295:05A02:A08 | MA120:A08 | | BC015460 | gi\|15930032\|gb\|BC015460.1BC015460 | 3.8E−26 |
| | | | | | Homo sapiens, Similar to glutaminyl- | |
| | | | | | peptide cyclotransferase (glutaminyl | |
| | | | | | cyclase), clone IMAGE: 39 | |
| 3394 | I:1335140:05A02:C08 | MA120:C08 | | X02152 | gi\|34312\|emb\|X02152.1HSLDHAR | 0 |
| | | | | | Human mRNA for lactate dehydrogenase- | |
| | | | | | A (LDH-A, EC 1.1.1.27) | |
| 3395 | I:1822577:05B02:D08 | MA122:D08 | | BC001941 | gi\|12804976\|gb\|BC001941.1BC001941 | 1.7E−270 |
| | | | | | Homo sapiens, tissue specific | |
| | | | | | transplantation antigen P35B, clone | |
| | | | | | MGC: 4302 IMAGE: 2819332, mRNA, c | |
| 3396 | I:1306814:06B02:A08 | MA126:A08 | | AK026649 | gi\|10439547\|dbj\|AK026649.1AK026649 | 9.8E−135 |
| | | | | | Homo sapiens cDNA: FLJ22996 fis, clone | |
| | | | | | KAT11938 | |
| 3397 | I:3034694:06B02:D08 | MA126:D08 | | BC008935 | gi\|14286273\|gb\|BC008935.1BC008935 | 4.6E−299 |
| | | | | | Homo sapiens, Similar to solute carrier | |
| | | | | | family 25 (mitochondrial carrier; adenine | |
| | | | | | nucleotide tran | |
| 3398 | I:1453049:03B02:A02 | MA114:A02 | | X76180 | gi\|452649\|emb\|X76180.1HSLASNA | 2.7E−269 |
| | | | | | H. sapiens mRNA for lung amiloride | |
| | | | | | sensitive Na+ channel protein | |
| 3399 | I:1453748:03B02:D02 | MA114:D02 | | BC013579 | gi\|15488897\|gb\|BC013579.1BC013579 | 2.6E−135 |
| | | | | | Homo sapiens, Similar to calpastatin, clone | |
| | | | | | MGC: 9402 IMAGE: 3878564, mRNA, | |
| | | | | | complete cds | |
| 3400 | I:3001492:03A02:G02 | MA112:G02 | | X75042 | gi\|402648\|emb\|X75042.1HSRNAREL | 1.6E−295 |
| | | | | | H. sapiens rel proto-oncogene mRNA | |
| 3401 | I:3876715:03A02:C08 | MA112:C08 | | BC000373 | gi\|12653210\|gb\|BC000373.1BC000373 | 6.4E−161 |
| | | | | | Homo sapiens, Similar to amyloid beta | |
| | | | | | (A4) precursor-like protein 2, clone | |
| | | | | | MGC: 8371 IMAGE: 2820109 | |
| 3402 | I:2992851:03A02:D08 | MA112:D08 | | AF190637 | gi\|10441643\|gb\|AF190637.1AF190637 | 1.5E−286 |
| | | | | | Homo sapiens nephrin mRNA, complete | |
| | | | | | cds | |
| 3403 | I:1500649:03B02:G08 | MA114:G08 | | AB008430 | gi\|2766164\|dbj\|AB008430.1AB008430 | 1E−234 |
| | | | | | Homo sapiens mRNA for CDEP, complete | |
| | | | | | cds | |
| 3404 | I:1512943:01A02:B02 | MA104:B02 | | AJ005036 | gi\|3059108\|emb\|AJ005036.1HSAJ5036 | 9.1E−288 |
| | | | | | Homo sapiens mRNA for | |
| | | | | | phosphodiesterase 3A (from corpus | |
| | | | | | cavernosum) | |
| 3405 | I:1467565:01A02:D02 | MA104:D02 | | BC014991 | gi\|15929072\|gb\|BC014991.1BC014991 | 3.7E−262 |
| | | | | | Homo sapiens, clone MGC: 23226 | |
| | | | | | IMAGE: 4909112, mRNA, complete cds | |
| 3406 | I:2455118:01B02:D08 | MA106:D08 | | X16396 | gi\|35070\|emb\|X16396.1HSNMTDC | 0 |
| | | | | | Human mRNA for NAD-dependent | |
| | | | | | methylene tetrahydrofolate dehydrogenase | |
| | | | | | cyclohydrolase (EC 1.5.1.15) | |
| 3407 | I:2840251:01B02:E08 | MA106:E08 | | U52513 | gi\|1777781\|gb\|U52513.1HSU52513 | 0 |
| | | | | | Human RIG-G mRNA, complete cds | |
| 3408 | I:2911347:10B02:E02 | MA67:E02 | 0.28302 | | | |
| 3409 | I:1812030:10B02:G08 | MA67:G08 | | AB049758 | gi\|10800085\|dbj\|AB049758.1AB049758 | 3.6E−200 |
| | | | | | Homo sapiens mawbp mRNA for MAWD | |
| | | | | | binding protein, complete cds | |
| 3410 | I:2663606:04B02:F08 | MA118:F08 | | U37690 | gi\|1017824\|gb\|U37690.1HSU37690 | 5.2E−196 |
| | | | | | Human RNA polymerase II subunit | |
| | | | | | (hsRPB10) mRNA, complete cds | |
| 3411 | I:1308333:02A02:E02 | MA108:E02 | | BC017338 | gi\|16878283\|gb\|BC017338.1BC017338 | 1.4E−286 |
| | | | | | Homo sapiens, fucosidase, alpha-L-1, | |
| | | | | | tissue, clone MGC: 29579 | |
| | | | | | IMAGE: 4871788, mRNA, complete cds | |
| 3412 | I:1578941:02B02:E02 | MA110:E02 | | AK058013 | gi\|16554011\|dbj\|AK058013.1AK058013 | 1.2E−246 |
| | | | | | Homo sapiens cDNA FLJ25284 fis, clone | |
| | | | | | STM06787, highly similar to 15- | |
| | | | | | HYDROXYPROSTAGLANDIN | |
| | | | | | DEHYDR | |
| 3413 | I:1535439:02A02:D08 | MA108:D08 | | M83363 | gi\|190096\|gb\|M83363.1HUMPMCA | 3.1E−250 |
| | | | | | Human plasma membrane calcium- | |
| | | | | | pumping ATPase (PMCA4) mRNA, | |
| | | | | | complete cds | |
| 3414 | I:1857475:02B02:H08 | MA110:H08 | | AF009203 | gi\|2454508\|gb\|AF009203.1AF009203 | 1.5E−292 |
| | | | | | Homo sapiens YAC clone 377A1 unknown | |
| | | | | | mRNA, 3′untranslated region | |
| 3415 | I:2908878:08B01:F09 | MA133:F09 | 0.46085 | | | |
| 3416 | I:2830575:07A01:C03 | MA127:C03 | 0.06365 | D16431 | gi\|598955\|dbj\|D16431.1HUMHDGF | 1.7E−289 |
| | | | | | Human mRNA for hepatoma-derived | |
| | | | | | growth factor, complete cds | |
| 3417 | I:1557906:07B01:G03 | MA129:G03 | | AK057477 | gi\|16553199\|dbj\|AK057477.1AK057477 | 5.8E−230 |
| | | | | | Homo sapiens cDNA FLJ32915 fis, clone | |
| | | | | | TESTI2006425 | |
| 3418 | I:2200604:06B01:F03 | MA125:F03 | | U47105 | gi\|4457236\|gb\|U47105.2HSU47105 Homo | 0 |
| | | | | | sapiens H105e3 (H105e3) mRNA, | |
| | | | | | complete cds | |
| 3419 | I:1653326:06A01:C09 | MA123:C09 | | BC01888 | gi\|17403014\|gb\|BC018881.1BC018881 | 1E−296 |
| | | | | | Homo sapiens, clone IMAGE: 3617364, | |
| | | | | | mRNA | |
| 3420 | I:1720149:06A01:G09 | MA123:G09 | | U48959 | gi\|7239695\|gb\|U48959.2HSU48959 Homo | 2.4E−291 |
| | | | | | sapiens myosin light chain kinase (MLCK) | |
| | | | | | mRNA, complete cds | |
| 3421 | I:1560987:03B01:G03 | MA113:G03 | | U17077 | gi\|1000711\|gb\|U17077.1HSU17077 | 2.3E−92 |
| | | | | | Human BENE mRNA, partial cds | |
| 3422 | I:1510714:03B01:G09 | MA113:G09 | | NM_000240 | gi\|4557734\|ref\|NM_000240.1 Homo | 6.3E−264 |
| | | | | | sapiens monoamine oxidase A (MAOA), | |
| | | | | | nuclear gene encoding mitochondrial | |
| | | | | | protein, mRNA | |
| 3423 | I:2501484:01B01:A03 | MA105:A03 | | AB002438 | gi\|2943813\|dbj\|AB002438.1AB002438 | 1.1E−268 |
| | | | | | Homo sapiens mRNA from chromosome | |
| | | | | | 5q21-22, clone: FBR89 | |
| 3424 | I:1379063:01A01:B03 | MA103:B03 | | U28055 | gi\|1141776\|gb\|U28055.1HSU28055 Homo | 0 |
| | | | | | sapiens hepatocyte growth factor-like | |
| | | | | | protein homolog mRNA, partial cds | |
| 3425 | I:2797902:01B01:C03 | MA105:C03 | 0.07692 | BC019038 | gi\|17512114\|gb\|BC019038.1BC019038 | 6.6E−289 |
| | | | | | Homo sapiens, small nuclear RNA | |
| | | | | | activating complex, polypeptide 1, 43 kD, | |
| | | | | | clone MGC: 20773 IMAGE: 45 | |
| 3426 | I:1805613:01B01:G03 | MA105:G03 | | U79725 | gi\|1814276\|gb\|U79725.1HSU79725 | 5.4E−202 |
| | | | | | Human A33 antigen precursor mRNA, | |
| | | | | | complete cds | |
| 3427 | I:1524885:01A01:H03 | MA103:H03 | | Y12065 | gi\|2230877\|emb\|Y12065.1HSNOP56 | 0 |
| | | | | | Homo sapiens mRNA for nucleolar protein | |
| | | | | | hNop56 | |
| 3428 | I:2888464:01B01:H03 | MA105:H03 | | S73591 | gi\|688296\|gb\|S73591.1S73591 Homo | 1.7E−267 |
| | | | | | sapiens brain-expressed HHCPA78 | |
| | | | | | homolog VDUP1 (Gene) mRNA, complete | |
| | | | | | cds | |
| 3429 | I:1992788:04B01:B03 | MA117:B03 | | AL161985 | gi\|7328121\|emb\|AL161985.1HSM802609 | 0 |
| | | | | | Homo sapiens mRNA; cDNA | |
| | | | | | DKFZp761J1810 (from clone | |
| | | | | | DKFZp761J1810) | |
| 3430 | I:1413451:04A01:F03 | MA115:F03 | | D88648 | gi\|2653566\|dbj\|D88648.1D88648 Homo | 4.1E−184 |
| | | | | | sapiens mRNA for B-FABP, complete cds | |
| 3431 | I:2779515:04B01:C09 | MA117:C09 | | AL136543 | gi\|6807646\|emb\|AL136543.1HSM801517 | 2.2E−285 |
| | | | | | Homo sapiens mRNA; cDNA | |
| | | | | | DKFZp761K0511 (from clone | |
| | | | | | DKFZp761K0511); partial cds | |
| 3432 | I:1583076:02B01:G09 | MA109:G09 | | NM_000669 | gi\|11496888\|ref\|NM_000669.2 Homo | 6E−261 |
| | | | | | sapiens alcohol dehydrogenase 1C (class | |
| | | | | | I), gamma polypeptide (ADH1C), mRNA | |
| 3433 | I:3070110:05A02:B03 | MA120:B03 | | AF061016 | gi\|3127126\|gb\|AF061016.1AF061016 | 6.4E−295 |
| | | | | | Homo sapiens UDP-glucose | |
| | | | | | dehydrogenase (UGDH) mRNA, complete | |
| | | | | | cds | |
| 3434 | I:1904493:05A02:H03 | MA120:H03 | | Z22555 | gi\|397606\|emb\|Z22555.1HSCLA1GNA | 9.7E−229 |
| | | | | | H. sapiens encoding CLA-1 mRNA | |
| 3435 | I:2860815:05A02:A09 | MA120:A09 | | AF067420 | gi\|3201899\|gb\|AF067420.1AF067420 | 1.7E−100 |
| | | | | | Homo sapiens SNC73 protein (SNC73) | |
| | | | | | mRNA, complete cds | |
| 3436 | I:1930135:07A02:G03 | MA128:G03 | | | | |
| 3437 | I:3747901:06B02:G03 | MA126:G03 | | BC004979 | gi\|13436403\|gb\|BC004979.1BC004979 | 1.6E−289 |
| | | | | | Homo sapiens, clone MGC: 3855 | |
| | | | | | IMAGE: 2905681, mRNA, complete cds | |
| 3438 | I:1720946:06A02:A09 | MA124:A09 | | BC010733 | gi\|14789594\|gb\|BC010733.1BC010733 | 1.1E−296 |
| | | | | | Homo sapiens, clone IMAGE: 3897044, | |
| | | | | | mRNA, partial cds | |
| 3439 | I:2877413:06B02:D09 | MA126:D09 | | BC000700 | gi\|12653822\|gb\|BC000700.1BC000700 | 5.5E−255 |
| | | | | | Homo sapiens, clone MGC: 3101 | |
| | | | | | IMAGE: 3350198, mRNA, complete cds | |
| 3440 | I:3035279:06B02:E09 | MA126:E09 | | BC001125 | gi\|12654578\|gb\|BC001125.1BC001125 | 2E−276 |
| | | | | | Homo sapiens, peptidylprolyl isomerase B | |
| | | | | | (cyclophilin B), clone MGC: 2224 | |
| | | | | | IMAGE: 2966791, mRNA, com | |
| 3441 | I:2503913:03A02:E09 | MA112:E09 | | BC010952 | gi\|15012094\|gb\|BC010952.1BC010952 | 1.5E−261 |
| | | | | | Homo sapiens, Similar to protease inhibitor | |
| | | | | | 3, skin-derived (SKALP), clone | |
| | | | | | MGC: 13613 IMAGE: 408315 | |
| 3442 | I:1517380:01A02:B03 | MA104:B03 | | AB033032 | gi\|6330486\|dbj\|AB033032.1AB033032 | 1.2E−277 |
| | | | | | Homo sapiens mRNA for KIAA1206 | |
| | | | | | protein, partial cds | |
| 3443 | I:3138128:01B02:C03 | MA106:C03 | | D31887 | gi\|505101\|dbj\|D31887.1HUMORFKG1P | 1E−300 |
| | | | | | Human mRNA for KIAA0062 gene, partial | |
| | | | | | cds | |
| 3444 | I:2453722:01A02:E03 | MA104:E03 | | BC003582 | gi\|13097770\|gb\|BC003582.1BC003582 | 1E−300 |
| | | | | | Homo sapiens, polymerase (RNA) II | |
| | | | | | (DNA directed) polypeptide F, clone | |
| | | | | | MGC: 2669 IMAGE: 3546712, mRN | |
| 3445 | I:1414260:01A02:A09 | MA104:A09 | | AB002318 | gi\|2224580\|dbj\|AB002318.1AB002318 | 3.4E−284 |
| | | | | | Human mRNA for KIAA0320 gene, partial | |
| | | | | | cds | |
| 3446 | I:2891247:01B02:A09 | MA106:A09 | | D43638 | gi\|940399\|dbj\|D43638.1HUMMTG8AP | 8.4E−151 |
| | | | | | Human mRNA for MTG8a protein, | |
| | | | | | complete cds | |
| 3447 | I:1682176:01A02:F09 | MA104:F09 | | U78556 | gi\|1688306\|gb\|U78556.1HSU78556 | 1E−293 |
| | | | | | Human cisplatin resistance associated | |
| | | | | | alpha protein (hCRA alpha) mRNA, | |
| | | | | | complete cds | |
| 3448 | I:2739076:04A02:D03 | MA116:D03 | | NM_001023 | gi\|14591915\|ref\|NM_001023.2 Homo | 2.1E−248 |
| | | | | | sapiens ribosomal protein S20 (RPS20), | |
| | | | | | mRNA | |
| 3449 | I:1900378:04B02:F03 | MA118:F03 | | AB002363 | gi\|2224670\|dbj\|AB002363.1AB002363 | 3.1E−275 |
| | | | | | Human mRNA for KIAA0365 gene, partial | |
| | | | | | cds | |
| 3450 | I:1603391:04A02:G03 | MA116:G03 | | AF036874 | gi\|9738910\|gb\|AF036874.1AF036874 | 3.7E−275 |
| | | | | | Homo sapiens multiple endocrine | |
| | | | | | neoplasia type 1 candidate protein number | |
| | | | | | 18 (HSPF2) mRNA, complet | |
| 3451 | I:2018222:04A02:C09 | MA116:C09 | | BC008795 | gi\|14250659\|gb\|BC008795.1BC008795 | 2E−192 |
| | | | | | Homo sapiens, proteasome (prosome, | |
| | | | | | macropain) subunit, beta type, 9 (large | |
| | | | | | multifunctional protea | |
| 3452 | I:1327263:04A02:F09 | MA116:F09 | | M25629 | gi\|186652\|gb\|M25629.1HUMKALX | 1.4E−283 |
| | | | | | Human kallikrein mRNA, complete cds, | |
| | | | | | clone clone phKK25 | |
| 3453 | I:1734393:02A02:B09 | MA108:B09 | | X73502 | gi\|406853\|emb\|X73502.1HSENCY20 H. Sapiens | 0 |
| | | | | | mRNA for cytokeratin 20 | |
| 3454 | I:2190607:02A02:E09 | MA108:E09 | | BC008012 | gi\|14124971\|gb\|BC008012.1BC008012 | 3.5E−244 |
| | | | | | Homo sapiens, eukaryotic translation | |
| | | | | | elongation factor 1 delta (guanine | |
| | | | | | nucleotide exchange prote | |
| 3455 | I:2447969:08A01:E04 | MA131:E04 | 0.16896 | | | |
| 3456 | I:1753033:08B01:H10 | MA133:H10 | | AL359055 | gi\|8518180\|emb\|AL359055.1IR2344436 | 9.6E−24 |
| | | | | | Homo sapiens mRNA full length insert | |
| | | | | | cDNA clone EUROIMAGE 2344436 | |
| 3457 | I:2456393:07B01:E10 | MA129:E10 | | BC005029 | gi\|13477142\|gb\|BC005029.1BC005029 | 3.6E−259 |
| | | | | | Homo sapiens, hypothetical protein | |
| | | | | | FLJ10718, clone MGC: 12594 | |
| | | | | | IMAGE: 4040181, mRNA, complete cds | |
| 3458 | I:1719920:06B01:A04 | MA125:A04 | 0.13978 | BC001903 | gi\|12804902\|gb\|BC001903.1BC001903 | 1.4E−274 |
| | | | | | Homo sapiens, Similar to interleukin 10 | |
| | | | | | receptor, beta, clone MGC: 2210 | |
| | | | | | IMAGE: 3544611, mRNA, compl | |
| 3459 | I:2927362:06B01:H04 | MA125:H04 | | BC019336 | gi\|17939560\|gb\|BC019336.1BC019336 | 0 |
| | | | | | Homo sapiens, clone IMAGE: 3617778, | |
| | | | | | mRNA, partial cds | |
| 3460 | I:4082816:06B01:F10 | MA125:F10 | | BC001365 | gi\|12655034\|gb\|BC001365.1BC001365 | 6.1E−230 |
| | | | | | Homo sapiens, ribosomal protein L4, clone | |
| | | | | | MGC: 2201 IMAGE: 3051487, mRNA, | |
| | | | | | complete cds | |
| 3461 | I:1803446:03A01:A04 | MA111:A04 | | BC000062 | gi\|12652632\|gb\|BC000062.1BC000062 | 1E−300 |
| | | | | | Homo sapiens, solute carrier family 1 | |
| | | | | | (neutral amino acid transporter), member | |
| | | | | | 5, clone MGC: 1387 | |
| 3462 | I:1557490:03A01:C04 | MA111:C04 | | BC003560 | gi\|13097707\|gb\|BC003560.1BC003560 | 0 |
| | | | | | Homo sapiens, ribophorin II, clone | |
| | | | | | MGC: 1817 IMAGE: 3546673, mRNA, | |
| | | | | | complete cds | |
| 3463 | I:1445895:03B01:E10 | MA113:E10 | | BC009196 | gi\|14327943\|gb\|BC009196.1BC009196 | 3.6E−131 |
| | | | | | Homo sapiens, phosphatidic acid | |
| | | | | | phosphatase type 2B, clone MGC: 15306 | |
| | | | | | IMAGE: 3960223, mRNA, complet | |
| 3464 | I:1336836:01A01:H04 | MA103:H04 | | M32215 | gi\|307524\|gb\|M32215.1HUMTSHRX | 1E−300 |
| | | | | | Human thyroid stimulatory hormone | |
| | | | | | receptor (TSHR) mRNA, complete cds | |
| 3465 | I:1802745:01B01:E10 | MA105:E10 | | D42087 | gi\|576555\|dbj\|D42087.1HUMHA0793A | 8.4E−279 |
| | | | | | Human mRNA for KIAA0118 gene, partial | |
| | | | | | cds | |
| 3466 | I:2503003:01B01:H10 | MA105:H10 | | AF020352 | gi\|2655054\|gb\|AF020352.1AF020352 | 1.4E−255 |
| | | | | | Homo sapiens NADH: ubiquinone | |
| | | | | | oxidoreductase 15 kDa IP subunit mRNA, | |
| | | | | | nuclear gene encoding mitochon | |
| 3467 | I:1655377:10A01:F04 | MA64:F04 | | AK000706 | gi\|7020960\|dbj\|AK000706.1AK000706 | 2.7E−210 |
| | | | | | Homo sapiens cDNA FLJ20699 fis, clone | |
| | | | | | KAIA2372 | |
| 3468 | I:1430662:04A01:A04 | MA115:A04 | | AF078035 | gi\|4322303\|gb\|AF078035.1AF078035 | 3.9E−262 |
| | | | | | Homo sapiens translation initiation factor | |
| | | | | | IF2 mRNA, complete cds | |
| 3469 | I:3335055:04A01:G04 | MA115:G04 | | BC004390 | gi\|13325149\|gb\|BC004390.1BC004390 | 3.7E−181 |
| | | | | | Homo sapiens, phosphatidylserine synthase | |
| | | | | | 1, clone MGC: 10968 IMAGE: 3634879, | |
| | | | | | mRNA, complete cds | |
| 3470 | I:2457671:04B01:B10 | MA117:B10 | | BC000469 | gi\|12653398\|gb\|BC000469.1BC000469 | 4.3E−299 |
| | | | | | Homo sapiens, eukaryotic translation | |
| | | | | | initiation factor 3, subunit 7 (zeta, | |
| | | | | | 66/67 kD), clone MGC: 85 | |
| 3471 | I:1641421:02A01:C10 | MA107:C10 | | S69369 | gi\|545844\|gb\|S69369.1S69369 | 1.5E−180 |
| | | | | | PAX3A = transcription factor [human, adult | |
| | | | | | cerebellum, mRNA, 1248 nt] | |
| 3472 | I:1655225:02B01:E10 | MA109:E10 | | AB002331 | gi\|2224606\|dbj\|AB002331.1AB002331 | 7.1E−273 |
| | | | | | Human mRNA for KIAA0333 gene, partial | |
| | | | | | cds | |
| 3473 | I:1313325:05A02:B04 | MA120:B04 | | U09550 | gi\|1184036\|gb\|U09550.1HSU09550 | 5.2E−283 |
| | | | | | Human oviductal glycoprotein mRNA, | |
| | | | | | complete cds | |
| 3474 | I:1558081:05B02:A10 | MA122:A10 | | NM_004530 | gi\|11342665\|ref\|NM_004530.1 Homo | 0 |
| | | | | | sapiens matrix metalloproteinase 2 | |
| | | | | | (gelatinase A, 72 kD gelatinase, 72 kD type | |
| | | | | | IV collagenase) (MMP2 | |
| 3475 | I:1889191:05A02:H10 | MA120:H10 | | BC001619 | gi\|12804426\|gb\|BC001619.1BC001619 | 1.1E−299 |
| | | | | | Homo sapiens, Similar to aldehyde | |
| | | | | | dehydrogenase 5, clone MGC: 2230 | |
| | | | | | IMAGE: 3356389, mRNA, complete c | |
| 3476 | I:3495906:07A02:C10 | MA128:C10 | | U19251 | gi\|2642132\|gb\|U19251.1HSU19251 Homo | 0 |
| | | | | | sapiens neuronal apoptosis inhibitory | |
| | | | | | protein mRNA, complete cds | |
| 3477 | I:3704132:03A02:D10 | MA112:D10 | | Z49194 | gi\|974830\|emb\|Z49194.1HSOBF1 | 1.3E−102 |
| | | | | | H. sapiens mRNA for oct-binding factor | |
| 3478 | I:1636553:03B02:F10 | MA114:F10 | | AB001895 | gi\|2588990\|dbj\|AB001895.1AB001895 | 2.8E−130 |
| | | | | | Homo sapiens mRNA for B120, complete | |
| | | | | | cds | |
| 3479 | I:1402228:03B02:H10 | MA114:H10 | | BC008588 | gi\|14250316\|gb\|BC008588.1BC008588 | 7.8E−170 |
| | | | | | Homo sapiens, Similar to plastin 3 (T | |
| | | | | | isoform), clone IMAGE: 3447893, mRNA, | |
| | | | | | partial cds | |
| 3480 | I:1361963:01A02:B04 | MA104:B04 | | L13616 | gi\|439874\|gb\|L13616.1HUMFAKX | 2.4E−291 |
| | | | | | Human focal adhesion kinase (FAK) | |
| | | | | | mRNA, complete cds | |
| 3481 | I:1510424:01A02:D04 | MA104:D04 | | X04481 | gi\|34627\|emb\|X04481.1HSMH3C2R | 1E−300 |
| | | | | | Human mRNA for complement component | |
| | | | | | C2 | |
| 3482 | I:2918558:01B02:D04 | MA106:D04 | | AF000994 | gi\|2580573\|gb\|AF000994.1HSAF000994 | 8.8E−285 |
| | | | | | Homo sapiens ubiquitous TPR motif, Y | |
| | | | | | isoform (UTY) mRNA, alternative | |
| | | | | | transcript 3, complete cds | |
| 3483 | I:1731061:01A02:D10 | MA104:D10 | | BC000418 | gi\|12653298\|gb\|BC000418.1BC000418 | 1E−300 |
| | | | | | Homo sapiens, ectodermal-neural cortex | |
| | | | | | (with BTB-like domain), clone MGC: 8659 | |
| | | | | | IMAGE: 2964376, mRNA | |
| 3484 | I:2579602:04A02:A04 | MA116:A04 | | BC005128 | gi\|13477308\|gb\|BC005128.1BC005128 | 1E−300 |
| | | | | | Homo sapiens, ribosomal protein L7a, | |
| | | | | | clone MGC: 10607 IMAGE: 3938260, | |
| | | | | | mRNA, complete cds | |
| 3485 | I:2824181:04B02:A04 | MA118:A04 | | BC004900 | gi\|13436172\|gb\|BC004900.1BC004900 | 1E−300 |
| | | | | | Homo sapiens, ribosomal protein L13a, | |
| | | | | | clone IMAGE: 3545758, mRNA, partial | |
| | | | | | cds | |
| 3486 | I:2123183:04A02:B04 | MA116:B04 | | BC001164 | gi\|12654652\|gb\|BC001164.1BC001164 | 2.1E−198 |
| | | | | | Homo sapiens, proteasome (prosome, | |
| | | | | | macropain) 26S subunit, non-ATPase, 8, | |
| | | | | | clone MGC: 1660 IMAGE: 35 | |
| 3487 | I:1958560:04A02:C10 | MA116:C10 | 0.0522 | BC016147 | gi\|16359382\|gb\|BC016147.1BC016147 | 1.5E−277 |
| | | | | | Homo sapiens, clone MGC: 9485 | |
| | | | | | IMAGE: 3921259, mRNA, complete cds | |
| 3488 | I:1447903:04A02:G10 | MA116:G10 | | AK056274 | gi\|16551627\|dbj\|AK056274.1AK056274 | 2.2E−48 |
| | | | | | Homo sapiens cDNA FLJ31712 fis, clone | |
| | | | | | NT2RI2006445, moderately similar to | |
| | | | | | INSULIN-LIKE GROWTH FA | |
| 3489 | I:1875576:02A02:E10 | MA108:E10 | | U04897 | gi\|451563\|gb\|U04897.1HSU04897 Human | 1.1E−140 |
| | | | | | orphan hormone nuclear receptor | |
| | | | | | RORalpha1 mRNA, complete cds | |
| 3490 | I:1709457:02B02:G10 | MA110:G10 | | X65873 | gi\|34082\|emb\|X65873.1HSKHCMR | 0 |
| | | | | | H. sapiens mRNA for kinesin (heavy chain) | |
| 3491 | I:2155675:08B01:G05 | MA133:G05 | 0.83871 | | | |
| 3492 | I:1635069:07A01:A05 | MA127:A05 | | D15049 | gi\|475003\|dbj\|D15049.1HUMSAP1C | 3.5E−197 |
| | | | | | Homo sapiens mRNA for protein tyrosine | |
| | | | | | phosphatase precursor, complete cds | |
| 3493 | I:1453445:07A01:G05 | MA127:G05 | 0.07788 | BC001784 | gi\|13937607\|gb\|BC001784.1BC001784 | 1.2E−265 |
| | | | | | Homo sapiens, Similar to acidic 82 kDa | |
| | | | | | protein mRNA, clone IMAGE: 3542384, | |
| | | | | | mRNA | |
| 3494 | I:3002566:07A01:D11 | MA127:D11 | | D26350 | gi\|450468\|dbj\|D26350.1HUMHT2I Human | 0 |
| | | | | | mRNA for type 2 inositol 1,4,5- | |
| | | | | | trisphosphate receptor, complete cds | |
| 3495 | I:1631511:06A01:C05 | MA123:C05 | | BC001454 | gi\|12655192\|gb\|BC001454.1BC001454 | 0 |
| | | | | | Homo sapiens, phosphoenolpyruvate | |
| | | | | | carboxykinase 2 (mitochondrial), clone | |
| | | | | | MGC: 1492 IMAGE: 3138368, | |
| 3496 | I:1610523:06A01:H05 | MA123:H05 | | L19183 | gi\|307154\|gb\|L19183.1HUMMAC30X | 0 |
| | | | | | Human MAC30 mRNA, 3′ end | |
| 3497 | I:3297656:06B01:E11 | MA125:E11 | | D14530 | gi\|414348\|dbj\|D14530.1HUMRSPT | 5E−277 |
| | | | | | Human homolog of yeast ribosomal | |
| | | | | | protein S28, complete cds | |
| 3498 | I:2509730:06B01:H11 | MA125:H11 | | X91788 | gi\|1001874\|emb\|X91788.1HSICLNGEN | 0 |
| | | | | | H. sapiens mRNA for Icln protein | |
| 3499 | I:2121863:03B01:D05 | MA113:D05 | | BC002738 | gi\|12803796\|gb\|BC002738.1BC002738 | 6.9E−47 |
| | | | | | Homo sapiens, cysteine-rich protein 1 | |
| | | | | | (intestinal), clone MGC: 3888 | |
| | | | | | IMAGE: 3631097, mRNA, complete | |
| 3500 | I:1413704:03B01:E05 | MA113:E05 | | NM_003903 | gi\|14110370\|ref\|NM_003903.2 Homo | 8.5E−254 |
| | | | | | sapiens CDC16 cell division cycle 16 | |
| | | | | | homolog (S. cerevisiae) (CDC16), mRNA | |
| 3501 | I:1626232:03A01:A11 | MA111:A11 | | AF048700 | gi\|2935439\|gb\|AF048700.1AF048700 | 3.5E−203 |
| | | | | | Homo sapiens gastrointestinal peptide | |
| | | | | | (PEC-60) mRNA, complete cds | |
| 3502 | I:2354446:01B01:B05 | MA105:B05 | | AF131913 | gi\|4928275\|gb\|AF131913.1AF131913 | 1.2E−218 |
| | | | | | Homo sapiens alpha-(1,3/1,4)- | |
| | | | | | fucosyltransferase (FT3B) mRNA, | |
| | | | | | complete cds | |
| 3503 | I:2916753:01B01:E05 | MA105:E05 | | X62534 | gi\|32332\|emb\|X62534.1HSHMG2 | 3.9E−179 |
| | | | | | H. sapiens HMG-2 mRNA | |
| 3504 | I:2555034:01A01:A11 | MA103:A11 | 0.09272 | U39196 | gi\|1055027\|gb\|U39196.1HSU39196 | 9.4E−151 |
| | | | | | Human clone hGIRK1 G-protein coupled | |
| | | | | | inwardly rectifying potassium channel | |
| | | | | | mRNA, complete cds | |
| 3505 | I:2804190:01B01:D11 | MA105:D11 | | BC004300 | gi\|13279166\|gb\|BC004300.1BC004300 | 2.8E−166 |
| | | | | | Homo sapiens, Similar to villin-like, clone | |
| | | | | | MGC: 10896 IMAGE: 3622951, mRNA, | |
| | | | | | complete cds | |
| 3506 | I:1814488:01A01:E11 | MA103:E11 | | AF044773 | gi\|3002950\|gb\|AF044773.1AF044773 | 8.8E−208 |
| | | | | | Homo sapiens breakpoint cluster region | |
| | | | | | protein 1 (BCRG1) mRNA, complete cds | |
| 3507 | I:2474163:01B01:E11 | MA105:E11 | | J03037 | gi\|179771\|gb\|J03037.1HUMCAIIA Human | 1.2E−143 |
| | | | | | carbonic anhydrase II mRNA, complete | |
| | | | | | cds | |
| 3508 | I:1402967:01A01:G11 | MA103:G11 | | Y00651 | gi\|34504\|emb\|Y00651.1HSMCP Human | 1.5E−227 |
| | | | | | mRNA for membrane cofactor protein | |
| 3509 | I:2821541:10A01:D11 | MA64:D11 | 0.356 | | | |
| 3510 | I:2888814:04B01:A05 | MA117:A05 | | Y10806 | gi\|1808645\|emb\|Y10806.1HSY10806 | 1E−300 |
| | | | | | H. sapiens mRNA for arginine | |
| | | | | | methyltransferase, splice variant, 1316 bp | |
| 3511 | I:1451005:04A01:C05 | MA115:C05 | | BC001771 | gi\|12804688\|gb\|BC001771.1BC001771 | 3.3E−200 |
| | | | | | Homo sapiens, general transcription factor | |
| | | | | | IIF, polypeptide 2 (30 kD subunit), clone | |
| | | | | | MGC: 1502 IMAG | |
| 3512 | I:1457726:04A01:H05 | MA115:H05 | | AK001686 | gi\|7023098\|dbj\|AK001686.1AK001686 | 3.9E−209 |
| | | | | | Homo sapiens cDNA FLJ10824 fis, clone | |
| | | | | | NT2RP4001086 | |
| 3513 | I:2883195:04B01:H05 | MA117:H05 | | BC000672 | gi\|12653772\|gb\|BC000672.1BC000672 | 1E−290 |
| | | | | | Homo sapiens, guanine nucleotide binding | |
| | | | | | protein (G protein), beta polypeptide 2-like | |
| | | | | | 1, clone MG | |
| 3514 | I:1603605:04A01:G11 | MA115:G11 | 0.04363 | D38305 | gi\|1580723\|dbj\|D38305.1HUMTOB | 1.3E−268 |
| | | | | | Human mRNA for Tob, complete cds | |
| 3515 | I:2832224:04A01:H11 | MA115:H11 | | L09604 | gi\|177899\|gb\|L09604.1HUMA4 Homo | 0 |
| | | | | | sapiens differentiation-dependent A4 | |
| | | | | | protein mRNA, complete cds | |
| 3516 | I:2231364:02A01:A05 | MA107:A05 | | D87469 | gi\|1665820\|dbj\|D87469.1D87469 Human | 0 |
| | | | | | mRNA for KIAA0279 gene, partial cds | |
| 3517 | I:1595081:02B01:F11 | MA109:F11 | | S36219 | gi\|249623\|gb\|S36219.1S36219 | 1E−300 |
| | | | | | prostaglandin G/H synthase {alternative | |
| | | | | | splicing product} [human, lung fibroblast, | |
| | | | | | clone HCO-T9, mRNA, | |
| 3518 | I:1877913:05B02:C05 | MA122:C05 | | U51903 | gi\|1262925\|gb\|U51903.1HSU51903 | 1E−300 |
| | | | | | Human RasGAP-related protein (IQGAP2) | |
| | | | | | mRNA, complete cds | |
| 3519 | I:1666130:05B02:F05 | MA122:F05 | | X05790 | gi\|28535\|emb\|X05790.1HSAGALAR | 0 |
| | | | | | Human mRNA for alpha-galactosidase A | |
| | | | | | (EC 3.2.1-22) | |
| 3520 | I:1709995:05B02:H05 | MA122:H05 | | U78525 | gi\|2558667\|gb\|U78525.1HSU78525 Homo | 8.3E−279 |
| | | | | | sapiens eukaryotic translation initiation | |
| | | | | | factor (eIF3) mRNA, complete cds | |
| 3521 | I:3872557:07A02:B05 | MA128:B05 | | NM_000518 | gi\|13788565\|ref\|NM_000518.3 Homo | 0 |
| | | | | | sapiens hemoglobin, beta (HBB), mRNA | |
| 3522 | I:2734906:07A02:E11 | MA128:E11 | | NM_001997 | gi\|17981709\|ref\|NM_001997.2 Homo | 1.3E−277 |
| | | | | | sapiens Finkel-Biskis-Reilly murine | |
| | | | | | sarcoma virus (FBR-MuSV) ubiquitously | |
| | | | | | expressed (fox derived); | |
| 3523 | I:1798585:06A02:B05 | MA124:B05 | | BC008767 | gi\|14250615\|gb\|BC008767.1BC008767 | 0 |
| | | | | | Homo sapiens, Similar to acyl-Coenzyme | |
| | | | | | A oxidase 1, palmitoyl, clone MGC: 1198 | |
| | | | | | IMAGE: 3051501, mRNA | |
| 3524 | I:1683389:06A02:F05 | MA124:F05 | | BC015335 | gi\|15929831\|gb\|BC015335.1BC015335 | 0 |
| | | | | | Homo sapiens, immature colon carcinoma | |
| | | | | | transcript 1, clone MGC: 21251 | |
| | | | | | IMAGE: 4418983, mRNA, complet | |
| 3525 | I:1704517:06A02:G05 | MA124:G05 | | BC005820 | gi\|14710649\|gb\|BC005820.1BC005820 | 0 |
| | | | | | Homo sapiens, clone IMAGE: 3937549, | |
| | | | | | mRNA | |
| 3526 | I:2792982:06B02:H05 | MA126:H05 | | X71345 | gi\|405755\|emb\|X71345.1HSTRYIVB | 0 |
| | | | | | H. sapiens mRNA for trypsinogen IV b- | |
| | | | | | form | |
| 3527 | I:3511355:06B02:D11 | MA126:D11 | | NM_001002 | gi\|16933547\|ref\|NM_001002.2 Homo | 1E−300 |
| | | | | | sapiens ribosomal protein, large, P0 | |
| | | | | | (RPLP0), transcript variant 1, mRNA | |
| 3528 | I:1738060:03A02:A05 | MA112:A05 | | BC000508 | gi\|12653472\|gb\|BC000508.1BC000508 | 1.1E−243 |
| | | | | | Homo sapiens, proteasome (prosome, | |
| | | | | | macropain) subunit, beta type, 1, clone | |
| | | | | | MGC: 8505 IMAGE: 2822268 | |
| 3529 | I:1810821:03B02:B05 | MA114:B05 | | BC016956 | gi\|16877417\|gb\|BC016956.1BC016956 | 7E−217 |
| | | | | | Homo sapiens, clone MGC: 21520 | |
| | | | | | IMAGE: 3900854, mRNA, complete cds | |
| 3530 | I:2451279:03A02:E05 | MA112:E05 | | BC009868 | gi\|14602690\|gb\|BC009868.1BC009868 | 1.8E−167 |
| | | | | | Homo sapiens, replication protein A3 | |
| | | | | | (14 kD), clone MGC: 16404 | |
| | | | | | IMAGE: 3940438, mRNA, complete cds | |
| 3531 | I:1431166:03B02:E05 | MA114:E05 | | BC010444 | gi\|14714612\|gb\|BC010444.1BC010444 | 5.5E−230 |
| | | | | | Homo sapiens, matrilin 2, clone | |
| | | | | | MGC: 17281 IMAGE: 4215380, mRNA, | |
| | | | | | complete cds | |
| 3532 | I:2949427:03B02:A11 | MA114:A11 | | BC006794 | gi\|13905021\|gb\|BC006794.1BC006794 | 3.2E−225 |
| | | | | | Homo sapiens, Similar to interferon | |
| | | | | | induced transmembrane protein 3 (1-8U), | |
| | | | | | clone MGC: 5225 IMAGE: | |
| 3533 | I:1458366:03B02:E11 | MA114:E11 | | AF009202 | gi\|2454507\|gb\|AF009202.1AF009202 | 3.7E−290 |
| | | | | | Homo sapiens YAC clone 136A2 unknown | |
| | | | | | mRNA, 3′untranslated region | |
| 3534 | I:1525881:03B02:G11 | MA114:G11 | | AF368463 | gi\|14583005\|gb\|AF368463.1AF368463 | 8.5E−176 |
| | | | | | Homo sapiens carboxypeptidase M | |
| | | | | | mRNA, complete cds | |
| 3535 | I:2071473:01A02:E05 | MA104:E05 | | X17567 | gi\|36512\|emb\|X17567.1HSSNRNPB | 0 |
| | | | | | H. sapiens RNA for snRNP protein B | |
| 3536 | I:2481012:01A02:C11 | MA104:C11 | | BC001625 | gi\|12804436\|gb\|BC001625.1BC001625 | 1.6E−236 |
| | | | | | Homo sapiens, Similar to for protein | |
| | | | | | disulfide isomerase-related, clone | |
| | | | | | MGC: 1259 IMAGE: 3537659, m | |
| 3537 | I:2816931:01B02:C11 | MA106:C11 | | D88827 | gi\|2342505\|dbj\|D88827.1D88827 Homo | 4.2E−159 |
| | | | | | sapiens mRNA for zinc finger protein | |
| | | | | | FPM315, complete cds | |
| 3538 | I:1806769:01B02:F11 | MA106:F11 | | NM_005971 | gi\|11612675\|ref\|NM_005971.2 Homo | 8.8E−242 |
| | | | | | sapiens FXYD domain-containing ion | |
| | | | | | transport regulator 3 (FXYD3), transcript | |
| | | | | | variant 1, mRNA | |
| 3539 | I:2636634:04B02:A11 | MA118:A11 | | L32137 | gi\|602449\|gb\|L32137.1HUMCOMP | 2.5E−210 |
| | | | | | Human germline oligomeric matrix protein | |
| | | | | | (COMP) mRNA, complete cds | |
| 3540 | I:1649959:02B02:E11 | MA110:E11 | | BC002700 | gi\|12803726\|gb\|BC002700.1BC002700 | 2.5E−254 |
| | | | | | Homo sapiens, Similar to keratin 7, clone | |
| | | | | | MGC: 3625 IMAGE: 3610347, mRNA, | |
| | | | | | complete cds | |
| 3541 | I:1633719:02B02:F11 | MA110:F11 | | J05428 | gi\|340079\|gb\|J05428.1HUMUDPGTA | 3.8E−290 |
| | | | | | Human 3,4-catechol estrogen UDP- | |
| | | | | | glucuronosyltransferase mRNA, complete | |
| | | | | | cds | |
| 3542 | I:1901035:02B02:G11 | MA110:G11 | | AF081513 | gi\|5725637\|gb\|AF081513.1AF081513 | 1.2E−143 |
| | | | | | Homo sapiens TGF-beta type secreted | |
| | | | | | signaling protein LEFTYA mRNA, | |
| | | | | | complete cds | |
| 3543 | I:2503879:08B01:C12 | MA133:C12 | | AF150733 | gi\|7688664\|gb\|AF150733.1AF150733 | 3.9E−237 |
| | | | | | Homo sapiens AD-014 protein mRNA, | |
| | | | | | complete cds | |
| 3544 | I:2383065:07B01:B06 | MA129:B06 | | AJ335311 | gi\|15879729\|emb\|AJ335311.1HSA335311 | 3.7E−50 |
| | | | | | Homo sapiens genomic sequence | |
| | | | | | surrounding NotI site, clone NR1-WB8C | |
| 3545 | I:3357245:07A01:F06 | MA127:F06 | | X95073 | gi\|2879814\|emb\|X95073.1HSTRAXGEN | 0 |
| | | | | | H. sapiens mRNA for translin associated | |
| | | | | | protein X | |
| 3546 | I:2832314:07A01:G06 | MA127:G06 | | M26252 | gi\|338826\|gb\|M26252.1HUMTCBA | 7.8E−279 |
| | | | | | Human TCB gene encoding cytosolic | |
| | | | | | thyroid hormone-binding protein, complete | |
| | | | | | cds | |
| 3547 | I:3667096:07A01:D12 | MA127:D12 | | BC003412 | gi\|13097323\|gb\|BC003412.1BC003412 | 1E−300 |
| | | | | | Homo sapiens, cyclophilin, clone | |
| | | | | | MGC: 5016 IMAGE: 3451034, mRNA, | |
| | | | | | complete cds | |
| 3548 | I:1798283:06A01:D06 | MA123:D06 | | BC016835 | gi\|16877126\|gb\|BC016835.1BC016835 | 1E−300 |
| | | | | | Homo sapiens, Similar to synaptophysin- | |
| | | | | | like protein, clone MGC: 10011 | |
| | | | | | IMAGE: 3883697, mRNA, complet | |
| 3549 | I:1648206:03A01:B06 | MA111:B06 | | AJ420535 | gi\|17066399\|emb\|AJ420535.1HSA420535 | 6.2E−264 |
| | | | | | Homo sapiens mRNA full length insert | |
| | | | | | cDNA clone EUROIMAGE 993611 | |
| 3550 | I:3360476:03B01:B12 | MA113:B12 | | Y08768 | gi\|1877211\|emb\|Y08768.1HSIL13 | 1.4E−177 |
| | | | | | H. sapiens mRNA for IL-13 receptor | |
| 3551 | I:2500511:03B01:C12 | MA113:C12 | | AJ001531 | gi\|2661423\|emb\|AJ001531.1HSNEUROTR | 3.9E−265 |
| | | | | | Homo sapiens mRNA for neurotrypsin | |
| 3552 | I:1730806:03B01:D12 | MA113:D12 | | AL049705 | gi\|4678821\|emb\|AL049705.1HS262D122 | 7.8E−220 |
| | | | | | Human gene from PAC 262D12, | |
| | | | | | chromosome 1 | |
| 3553 | I:2479074:01B01:C06 | MA105:C06 | | AF096304 | gi\|4191395\|gb\|AF096304.1AF096304 | 0 |
| | | | | | Homo sapiens putative sterol reductase | |
| | | | | | SR-1 (TM7SF2) mRNA, complete cds | |
| 3554 | I:1635004:01B01:E06 | MA105:E06 | | BC003661 | gi\|13177786\|gb\|BC003661.1BC003661 | 4.6E−231 |
| | | | | | Homo sapiens, lectin, galactoside-binding, | |
| | | | | | soluble, 4 (galectin 4), clone MGC: 698 | |
| | | | | | IMAGE: 2967411, | |
| 3555 | I:2378569:01B01:G06 | MA105:G06 | | BC000341 | gi\|12653146\|gb\|BC000341.1BC000341 | 8.7E−236 |
| | | | | | Homo sapiens, signal sequence receptor, | |
| | | | | | beta (translocon-associated protein beta), | |
| | | | | | clone MGC: 8566 | |
| 3556 | I:2207849:01A01:D12 | MA103:D12 | | X65019 | gi\|33792\|emb\|X65019.1HSIL1BRNA | 0 |
| | | | | | H. sapiens mRNA for interleukin-1B | |
| | | | | | converting enzyme | |
| 3557 | I:1504554:01A01:F12 | MA103:F12 | 0.1646 | U43843 | gi\|1532120\|gb\|U43843.1HSU43843 | 4.6E−151 |
| | | | | | Human h-neuro-d4 protein mRNA, | |
| | | | | | complete cds | |
| 3558 | I:2989991:04B01:A06 | MA117:A06 | | AF400442 | gi\|15217078\|gb\|AF400442.1AF400442 | 1E−300 |
| | | | | | Homo sapiens pigment epithelium-derived | |
| | | | | | factor (SERPINF1) mRNA, complete cds | |
| 3559 | I:2852561:04B01:B06 | MA117:B06 | | J02769 | gi\|177206\|gb\|J02769.1HUM4F2A Human | 1.4E−255 |
| | | | | | 4F2 antigen heavy chain mRNA, complete | |
| | | | | | cds | |
| 3560 | I:2832839:04A01:C12 | MA115:C12 | | NM_006399 | gi\|5453562\|ref\|NM_006399.1 Homo | 2.6E−138 |
| | | | | | sapiens basic leucine zipper transcription | |
| | | | | | factor, ATF-like (BATF), mRNA | |
| 3561 | I:2845548:04B01:E12 | MA117:E12 | | AY034482 | gi\|15809587\|gb\|AY034482.1 Homo | 3.1E−278 |
| | | | | | sapiens hnRNP Q2 mRNA, complete cds | |
| 3562 | I:1251819:02B01:B06 | MA109:B06 | | X78669 | gi\|469884\|emb\|X78669.1HSERC55R | 9.1E−288 |
| | | | | | H. sapiens ERC-55 mRNA | |
| 3563 | I:1672930:02B01:D06 | MA109:D06 | | X83617 | gi\|620082\|emb\|X83617.1HSRANBP1 | 4.7E−274 |
| | | | | | H. sapiens mRNA for RanBP1 | |
| 3564 | I:2122820:02B01:E06 | MA109:E06 | | BC001738 | gi\|12804628\|gb\|BC001738.1BC001738 | 3.9E−234 |
| | | | | | Homo sapiens, Similar to ubiquitin- | |
| | | | | | conjugating enzyme E2G 2 (homologous | |
| | | | | | to yeast UBC7), clone MGC | |
| 3565 | I:2174920:02A01:H06 | MA107:H06 | | BC006230 | gi\|13623260\|gb\|BC006230.1BC006230 | 9.5E−260 |
| | | | | | Homo sapiens, lysophospholipase-like, | |
| | | | | | clone MGC: 10338 IMAGE: 3945191, | |
| | | | | | mRNA, complete cds | |
| 3566 | I:1875994:05B02:E06 | MA122:E06 | | BC002638 | gi\|12803606\|gb\|BC002638.1BC002638 | 2.2E−217 |
| | | | | | Homo sapiens, hypothetical protein, clone | |
| | | | | | MGC: 3365 IMAGE: 3608062, mRNA, | |
| | | | | | complete cds | |
| 3567 | I:1858644:05A02:G06 | MA120:G06 | | M55268 | gi\|177837\|gb\|M55268.1HUMA1CKII | 3.4E−284 |
| | | | | | Human casein kinase 11 alpha' subunit | |
| | | | | | mRNA, complete cds | |
| 3568 | I:1700047:06A02:E06 | MA124:E06 | | BC000405 | gi\|12653272\|gb\|BC000405.1BC000405 | 1.4E−224 |
| | | | | | Homo sapiens, small nuclear | |
| | | | | | ribonucleoprotein polypeptide A, clone | |
| | | | | | MGC: 8567 IMAGE: 2822987, mRNA, | |
| 3569 | I:1718257:06B02:E06 | MA126:E06 | | AF020760 | gi\|5870864\|gb\|AF020760.2AF020760 | 0 |
| | | | | | Homo sapiens serine protease (OMI) | |
| | | | | | mRNA, complete cds | |
| 3570 | I:1612306:06A02:F06 | MA124:F06 | | BC002594 | gi\|12803530\|gb\|BC002594.1BC002594 | 4.5E−271 |
| | | | | | Homo sapiens, dolichyl- | |
| | | | | | diphosphooligosaccharide-protein | |
| | | | | | glycosyltransferase, clone MGC: 2191 | |
| | | | | | IMAGE | |
| 3571 | I:1637427:06A02:F12 | MA124:F12 | | U31659 | gi\|1136305\|gb\|U31659.1HSU31659 | 7.5E−217 |
| | | | | | Human TBP-associated factor TAFII80 | |
| | | | | | mRNA, complete cds | |
| 3572 | I:2513883:03A02:B12 | MA112:B12 | | X76717 | gi\|435674\|emb\|X76717.1HSMT1L | 2.1E−142 |
| | | | | | H. sapiens MT-11 mRNA | |
| 3573 | I:2645840:01A02:G06 | MA104:G06 | | X97795 | gi\|1495482\|emb\|X97795.1HSRAD54 | 1.7E−295 |
| | | | | | H. sapiens mRNA homologous to S. cerevisiae | |
| | | | | | RAD54 | |
| 3574 | I:1737403:01A02:A12 | MA104:A12 | | Z29067 | gi\|479172\|emb\|Z29067.1HSNEK3R | 0 |
| | | | | | H. sapiens nek3 mRNA for protein kinase | |
| 3575 | I:1733522:01B02:H12 | MA106:H12 | | BC017880 | gi\|17389723\|gb\|BC017880.1BC017880 | 7.7E−95 |
| | | | | | Homo sapiens, clone MGC: 22754 | |
| | | | | | IMAGE: 4277855, mRNA, complete cds | |
| 3576 | RG:160664:10006:E07 | MA155:E07 | | NM_020975 | gi\|10862702\|ref\|NM_020975.1 Homo | 1.7E−298 |
| | | | | | sapiens ret proto-oncogene (multiple | |
| | | | | | endocrine neoplasia and medullary thyroid | |
| | | | | | carcinoma 1, Hirsch | |
| 3577 | I:747335:16A01:E01 | MA87:E01 | | NM_000985 | gi\|14591906\|ref\|NM_000985.2 Homo | 3.1E−272 |
| | | | | | sapiens ribosomal protein L17 (RPL17), | |
| | | | | | mRNA | |
| 3578 | I:2085191:16A01:H01 | MA87:H01 | | M22612 | gi\|521215\|gb\|M22612.1HUMTRPSGNA | 1E−287 |
| | | | | | Human pancreatic trypsin 1 (TRY1) | |
| | | | | | mRNA, complete cds | |
| 3579 | I:1211126:16A01:E07 | MA87:E07 | | Y13901 | gi\|2832349\|emb\|Y13901.1HSFGFR4G | 1E−300 |
| | | | | | Homo sapiens FGFR-4 gene | |
| 3580 | RG:669310:10010:C01 | MA159:C01 | | BC000833 | gi\|12654054\|gb\|BC000833.1BC000833 | 0 |
| | | | | | Homo sapiens, clone IMAGE: 3455871, | |
| | | | | | mRNA, partial cds | |
| 3581 | RG:730402:10010:H01 | MA159:H01 | 0.225 | BC000633 | gi\|12653696\|gb\|BC000633.1BC000633 | 2.1E−38 |
| | | | | | Homo sapiens, TTK protein kinase, clone | |
| | | | | | MGC: 865 IMAGE: 3343925, mRNA, | |
| | | | | | complete cds | |
| 3582 | RG:1047541:10012:C07 | MA161:C07 | | AF156965 | gi\|5731112\|gb\|AF156965.1AF156965 | 0 |
| | | | | | Homo sapiens translocon-associated | |
| | | | | | protein alpha subunit mRNA, complete cds | |
| 3583 | RG:1161753:10012:E07 | MA161:E07 | | X12883 | gi\|30310\|emb\|X12883.1HSCYKT18 | 0 |
| | | | | | Human mRNA for cytokeratin 18 | |
| 3584 | I:1218464:17B01:E01 | MA93:E01 | 0.47248 | | | |
| 3585 | I:958633:17B01:G07 | MA93:G07 | | AF267862 | gi\|12006050\|gb\|AF267862.1AF267862 | 1.8E−180 |
| | | | | | Homo sapiens DC44 mRNA, complete cds | |
| 3586 | I:1602726:09B01:B07 | MA137:B07 | 0.45675 | | | |
| 3587 | RG:205212:10007:B01 | MA156:B01 | | AF069747 | gi\|4106379\|gb\|AF069747.1AF069747 | 6.1E−227 |
| | | | | | Homo sapiens MTG8-like protein | |
| | | | | | MTGR1a mRNA, complete cds | |
| 3588 | RG:207395:10007:B07 | MA156:B07 | | Z74616 | gi\|1418929\|emb\|Z74616.1HSPPA2ICO | 0 |
| | | | | | H. sapiens mRNA for prepro-alpha2(I) | |
| | | | | | collagen | |
| 3589 | I:349535:16B02:G01 | MA90:G01 | 0.19957 | | | |
| 3590 | I:2323525:16A02:H01 | MA88:H01 | 0.30114 | | | |
| 3591 | I:1965049:16B02:D07 | MA90:D07 | | AF113007 | gi\|6642737\|gb\|AF113007.1AF113007 | 4.1E−162 |
| | | | | | Homo sapiens PRO0066 mRNA, complete | |
| | | | | | cds | |
| 3592 | I:2054436:16A02:G07 | MA88:G07 | 0.15978 | | | |
| 3593 | RG:1506197:10013:F01 | MA162:F01 | | NM_052841 | gi\|17017992\|ref\|NM_052841.2 Homo | 2E−137 |
| | | | | | sapiens serine/threonine kinase 22C | |
| | | | | | (spermiogenesis associated) (STK22C), | |
| | | | | | mRNA | |
| 3594 | RG:1871436:10015:G01 | MA164:G01 | | X60489 | gi\|31099\|emb\|X60489.1HSEF1B Human | 0 |
| | | | | | mRNA for elongation factor-1-beta | |
| 3595 | RG:1705470:10015:B07 | MA164:B07 | | L38734 | gi\|769675\|gb\|L38734.1HUMHTK Homo | 2.1E−282 |
| | | | | | sapiens hepatoma transmembrane kinase | |
| | | | | | ligand (HTK ligand) mRNA, complete cds | |
| 3596 | I:546910:17B02:B07 | MA94:B07 | | AK002212 | gi\|7023953\|dbj\|AK002212.1AK002212 | 3.3E−97 |
| | | | | | Homo sapiens cDNA FLJ11350 fis, clone | |
| | | | | | Y79AA1001647 | |
| 3597 | I:1799023:09B02:F01 | MA138:F01 | | AK023003 | gi\|10434717\|dbj\|AK023003.1AK023003 | 2.5E−164 |
| | | | | | Homo sapiens cDNA FLJ12941 fis, clone | |
| | | | | | NT2RP2005116, moderately similar to | |
| | | | | | PUTATIVE EUKARYOTIC TR | |
| 3598 | I:2380380:09B02:H01 | MA138:H01 | | AF268037 | gi\|8745546\|gb\|AF268037.1AF268037 | 0 |
| | | | | | Homo sapiens C8ORF4 protein (C8ORF4) | |
| | | | | | mRNA, complete cds | |
| 3599 | I:2319269:18A01:F02 | MA95:F02 | | AK022882 | gi\|10434533\|dbj\|AK022882.1AK022882 | 1.1E−206 |
| | | | | | Homo sapiens cDNA FLJ12820 fis, clone | |
| | | | | | NT2RP2002736 | |
| 3600 | I:2296344:18A01:D08 | MA95:D08 | | AJ387747 | gi\|6562532\|emb\|AJ387747.1HSA387747 | 3.6E−225 |
| | | | | | Homo sapiens mRNA for sialin | |
| 3601 | RG:155066:10006:E02 | MA155:E02 | | BC018851 | gi\|17402989\|gb\|BC018851.1BC018851 | 2.2E−279 |
| | | | | | Homo sapiens, clone IMAGE: 3141444, | |
| | | | | | mRNA | |
| 3602 | RG:180135:10006:G02 | MA155:G02 | | L37043 | gi\|852056\|gb\|L37043.1HUMCSNK1E | 0 |
| | | | | | Homo sapiens casein kinase I epsilon | |
| | | | | | mRNA, complete cds | |
| 3603 | RG:178093:10006:F08 | MA155:F08 | | AL117430 | gi\|5911865\|emb\|AL117430.1HSM800939 | 0 |
| | | | | | Homo sapiens mRNA; cDNA | |
| | | | | | DKFZp434D156 (from clone | |
| | | | | | DKFZp434D156); partial cds | |
| 3604 | RG:184042:10006:G08 | MA155:G08 | | BC017459 | gi\|16907188\|gb\|BC017459.1BC017459 | 5.3E−240 |
| | | | | | Homo sapiens, clone IMAGE: 4645230, | |
| | | | | | mRNA | |
| 3605 | I:1741643:16A01:A02 | MA87:A02 | | D38551 | gi\|1531549\|dbj\|D38551.1HUMORF005 | 1.1E−209 |
| | | | | | Human mRNA for KIAA0078 gene, | |
| | | | | | complete cds | |
| 3606 | RG:928026:10012:B02 | MA161:B02 | | AL050147 | gi\|4884153\|emb\|AL050147.1HSM800223 | 1.3E−218 |
| | | | | | Homo sapiens mRNA; cDNA | |
| | | | | | DKFZp586E0820 (from clone | |
| | | | | | DKFZp586E0820); partial cds | |
| 3607 | RG:1032969:10012:C02 | MA161:C02 | | AF261717 | gi\|8926204\|gb\|AF261717.1AF261717 | 0 |
| | | | | | Homo sapiens SAR1 (SAR1) mRNA, | |
| | | | | | complete cds | |
| 3608 | RG:1322660:10012:H02 | MA161:H02 | | L05144 | gi\|189944\|gb\|L05144.1HUMPHOCAR | 5.3E−283 |
| | | | | | Homo sapiens (clone lamda-hPEC-3) | |
| | | | | | phosphoenolpyruvate carboxykinase | |
| | | | | | (PCK1) mRNA, complete cds | |
| 3609 | RG:968474:10012:B08 | MA161:B08 | | Y11339 | gi\|7576275\|emb\|Y11339.2HSY11339 | 1.7E−227 |
| | | | | | Homo sapiens mRNA for GalNAc alpha-2, | |
| | | | | | 6-sialyltransferase I, long form | |
| 3610 | RG:1047592:10012:C08 | MA161:C08 | | X05803 | gi\|34080\|emb\|X05803.1HSKERUV | 1E−300 |
| | | | | | Human radiated keratinocyte mRNA 266 | |
| | | | | | (keratin-related protein) | |
| 3611 | I:617750:17B01:E08 | MA93:E08 | 0.19395 | | | |
| 3612 | I:2808775:09B01:G02 | MA137:G02 | 0.40171 | | | |
| 3613 | I:966692:18A02:B08 | MA96:B08 | 0.32029 | AK055949 | gi\|16550804\|dbj\|AK055949.1AK055949 | 3.7E−123 |
| | | | | | Homo sapiens cDNA FLJ31387 fis, clone | |
| | | | | | NT2NE1000018, weakly similar to | |
| | | | | | SUPPRESSOR PROTEIN SRP40 | |
| 3614 | RG:209240:10007:C02 | MA156:C02 | | BC001737 | gi\|12804626\|gb\|BC001737.1BC001737 | 3E−192 |
| | | | | | Homo sapiens, clone IMAGE: 3354010, | |
| | | | | | mRNA, partial cds | |
| 3615 | RG:223355:10007:D02 | MA156:D02 | | Z11696 | gi\|23882\|emb\|Z11696.1HS44KDAP | 5.4E−252 |
| | | | | | H. sapiens 44 kDa protein kinase related to | |
| | | | | | rat ERK1 | |
| 3616 | RG:267629:10007:H02 | MA156:H02 | | U73824 | gi\|1857236\|gb\|U73824.1HSU73824 | 3.2E−269 |
| | | | | | Human p97 mRNA, complete cds | |
| 3617 | I:2246234:16B02:C08 | MA90:C08 | | | | |
| 3618 | RG:1696513:10015:B02 | MA164:B02 | 0.07275 | AF377330 | gi\|14278713\|gb\|AF377330.2AF377330 | 0 |
| | | | | | Homo sapiens urokinase-type plasminogen | |
| | | | | | activator (PLAU) gene, complete cds | |
| 3619 | RG:1733895:10015:D02 | MA164:D02 | | BC009470 | gi\|14495716\|gb\|BC009470.1BC009470 | 0 |
| | | | | | Homo sapiens, protein kinase, interferon- | |
| | | | | | inducible double stranded RNA dependent | |
| | | | | | activator, clone | |
| 3620 | RG:1353930:10013:A08 | MA162:A08 | | U86453 | gi\|2317893\|gb\|U86453.1HSU86453 | 6.4E−295 |
| | | | | | Human phosphatidylinositol 3-kinase | |
| | | | | | catalytic subunit p110delta mRNA, | |
| | | | | | complete cds | |
| 3621 | RG:1881947:10015:G08 | MA164:G08 | | BC005858 | gi\|13543399\|gb\|BC005858.1BC005858 | 0 |
| | | | | | Homo sapiens, clone MGC: 3255 | |
| | | | | | IMAGE: 3506187, mRNA, complete cds | |
| 3622 | RG:166575:10006:F03 | MA155:F03 | | AK057849 | gi\|16553810\|dbj\|AK057849.1AK057849 | 1E−300 |
| | | | | | Homo sapiens cDNA FLJ25120 fis, clone | |
| | | | | | CBR06020 | |
| 3623 | I:1998994:16A01:A03 | MA87:A03 | | J04205 | gi\|178686\|gb\|J04205.1HUMANTLAA | 1.6E−258 |
| | | | | | Human La protein mRNA, complete cds | |
| 3624 | I:1953051:16A01:D03 | MA87:D03 | | BC004138 | gi\|13278716\|gb\|BC004138.1BC004138 | 2E−276 |
| | | | | | Homo sapiens, ribosomal protein L6, clone | |
| | | | | | MGC: 1635 IMAGE: 2823733, mRNA, | |
| | | | | | complete cds | |
| 3625 | I:518826:16A01:E03 | MA87:E03 | | BC007771 | gi\|14043585\|gb\|BC007771.1BC007771 | 2.8E−266 |
| | | | | | Homo sapiens, dual specificity | |
| | | | | | phosphatase 2, clone MGC: 12703 | |
| | | | | | IMAGE: 4297852, mRNA, complete cds | |
| 3626 | I:81490:16A01:B09 | MA87:B09 | | BC007942 | gi\|14044027\|gb\|BC007942.1BC007942 | 1.9E−270 |
| | | | | | Homo sapiens, nucleolar autoantigen | |
| | | | | | (55 kD) similar to rat synaptonemal | |
| | | | | | complex protein, clone MGC | |
| 3627 | RG:1256163:10012:F03 | MA161:F03 | | M36501 | gi\|177871\|gb\|M36501.1HUMA2MGL | 1E−300 |
| | | | | | Human alpha-2-macroglobulin mRNA, 3′ | |
| | | | | | end | |
| 3628 | RG:1132085:10012:D09 | MA161:D09 | | BC006510 | gi\|13676353\|gb\|BC006510.1BC006510 | 0 |
| | | | | | Homo sapiens, Similar to cyclin B1, | |
| | | | | | related sequence 1, clone MGC: 2548 | |
| | | | | | IMAGE: 2963100, mRNA, compl | |
| 3629 | I:2132717:17B01:C09 | MA93:C09 | | AB058749 | gi\|14017908\|dbj\|AB058749.1AB058749 | 3.8E−256 |
| | | | | | Homo sapiens mRNA for KIAA1846 | |
| | | | | | protein, partial cds | |
| 3630 | I:1998428:17B01:F09 | MA93:F09 | | AF115926 | gi\|17998664\|gb\|AF115926.1AF115926 | 6.9E−208 |
| | | | | | Homo sapiens XAG-2 homolog long | |
| | | | | | protein (HPC8) mRNA, complete cds | |
| 3631 | RG:206694:10007:B03 | MA156:B03 | | X00588 | gi\|31113\|emb\|X00588.1HSEGFPRE | 1E−300 |
| | | | | | Human mRNA for precursor of epidermal | |
| | | | | | growth factor receptor | |
| 3632 | RG:261714:10007:F09 | MA156:F09 | | AF116618 | gi\|7959738\|gb\|AF116618.1AF116618 | 0 |
| | | | | | Homo sapiens PRO1038 mRNA, complete | |
| | | | | | cds | |
| 3633 | I:1461515:16A02:C03 | MA88:C03 | 0.3525 | | | |
| 3634 | I:338859:16A02:H03 | MA88:H03 | 0.27273 | | | |
| 3635 | I:1425861:16A02:G09 | MA88:G09 | 0.4929 | | | |
| 3636 | I:1928644:16B02:H09 | MA90:H09 | 0.34967 | AK055711 | gi\|16550506\|dbj\|AK055711.1AK055711 | 7.1E−131 |
| | | | | | Homo sapiens cDNA FLJ31149 fis, clone | |
| | | | | | IMR322001491, moderately similar to | |
| | | | | | Rattus norvegicus tric | |
| 3637 | RG:1404414:10013:C03 | MA162:C03 | | U01038 | gi\|393016\|gb\|U01038.1HSU01038 Human | 6.5E−277 |
| | | | | | pLK mRNA, complete cds | |
| 3638 | RG:1415437:10013:D03 | MA162:D03 | | BG001190 | gi\|12654700\|gb\|BC001190.1BC001190 | 0 |
| | | | | | Homo sapiens, Similar to creatine kinase, | |
| | | | | | brain, clone MGC: 3160 IMAGE: 3354679, | |
| | | | | | mRNA, complete cds | |
| 3639 | RG:1734353:10015:D03 | MA164:D03 | | BC002555 | gi\|12803460\|gb\|BC002555.1BC002555 | 0 |
| | | | | | Homo sapiens, CDC-like kinase 3, clone | |
| | | | | | MGC: 1777 IMAGE: 3138580, mRNA, | |
| | | | | | complete cds | |
| 3640 | RG:1872251:10015:G03 | MA164:G03 | | Y17151 | gi\|4826562\|emb\|Y17151.2HSY17151 | 1.7E−31 |
| | | | | | Homo sapiens mRNA for multidrug | |
| | | | | | resistance protein 3 (ABCC3) | |
| 3641 | RG:1354408:10013:A09 | MA162:A09 | | AF257466 | gi\|8453155\|gb\|AF257466.1AF257466 | 3.7E−290 |
| | | | | | Homo sapiens N-acetylneuraminic acid | |
| | | | | | phosphate synthase mRNA, complete cds | |
| 3642 | RG:1690198:10015:A09 | MA164:A09 | | X90563 | gi\|1480099\|emb\|X90563.1HSPPARGAM | 0 |
| | | | | | H. sapiens mRNA for peroxisome | |
| | | | | | proliferactor activated receptor gamma | |
| 3643 | RG:1476452:10013:E09 | MA162:E09 | | BC007276 | gi\|13938296\|gb\|BC007276.1BC007276 | 1E−300 |
| | | | | | Homo sapiens, Similar to heat shock | |
| | | | | | cognate 71-kd protein, clone MGC: 15597 | |
| | | | | | IMAGE: 3162067, mRNA, c | |
| 3644 | I:2069305:09B02:F03 | MA138:F03 | | BC015139 | gi\|15929410\|gb\|BC015139.1BC015139 | 0 |
| | | | | | Homo sapiens, clone IMAGE: 4040789, | |
| | | | | | mRNA, partial cds | |
| 3645 | I:1966067:18B01:H04 | MA97:H04 | | AF062916 | gi\|3941523\|gb\|AF062916.1AF062916 | 3.6E−22 |
| | | | | | Arabidopsis thaliana putative transcription | |
| | | | | | factor (MYB92) mRNA, complete cds | |
| 3646 | I:2128547:18B01:A10 | MA97:A10 | | AF151839 | gi\|4929630\|gb\|AF151839.1AF151839 | 4.6E−268 |
| | | | | | Homo sapiens CGI-81 protein mRNA, | |
| | | | | | complete cds | |
| 3647 | RG:149960:10006:D04 | MA155:D04 | | BC017483 | gi\|17028354\|gb\|BC017483.1BC017483 | 3.9E−237 |
| | | | | | Homo sapiens, clone IMAGE: 3506553, | |
| | | | | | mRNA | |
| 3648 | RG:171569:10006:F04 | MA155:F04 | | M64174 | gi\|190734\|gb\|M64174.1HUMPTKJAK1 | 1E−300 |
| | | | | | Human protein-tyrosine kinase (JAK1) | |
| | | | | | mRNA, complete cds | |
| 3649 | RG:178638:10006:F10 | MA155:F10 | | BC004408 | gi\|13325179\|gb\|BC004408.1BC004408 | 1.1E−225 |
| | | | | | Homo sapiens, Similar to high-mobility | |
| | | | | | group 20B, clone MGC: 11001 | |
| | | | | | IMAGE: 3638942, mRNA, complete c | |
| 3650 | RG:195122:10006:H10 | MA155:H10 | | Z11695 | gi\|23878\|emb\|Z11695.1HS40KDAP | 4.3E−271 |
| | | | | | H. sapiens 40 kDa protein kinase related to | |
| | | | | | rat ERK2 | |
| 3651 | I:814216:16A01:F10 | MA87:F10 | | BC006395 | gi\|13623564\|gb\|BC006395.1BC006395 | 9.3E−254 |
| | | | | | Homo sapiens, cell division cycle 25B, | |
| | | | | | clone MGC: 12797 IMAGE: 4135465, | |
| | | | | | mRNA, complete cds | |
| 3652 | RG:491163:10010:A04 | MA159:A04 | | BC008767 | gi\|14250615\|gb\|BC008767.1BC008767 | 9.3E−232 |
| | | | | | Homo sapiens, Similar to acyl-Coenzyme | |
| | | | | | A oxidase 1, palmitoyl, clone MGC: 1198 | |
| | | | | | IMAGE: 3051501, mRNA | |
| 3653 | RG:827185:10012:A04 | MA161:A04 | | AK055642 | gi\|16550422\|dbj\|AK055642.1AK055642 | 2.5E−251 |
| | | | | | Homo sapiens cDNA FLJ31080 fis, clone | |
| | | | | | HSYRA2001615, highly similar to Sus | |
| | | | | | scrofa calcium/calmodu | |
| 3654 | RG:1129102:10012:D04 | MA161:D04 | | NM_000975 | gi\|15431289\|ref\|NM_000975.2 Homo | 1E−300 |
| | | | | | sapiens ribosomal protein L11 (RPL11), | |
| | | | | | mRNA | |
| 3655 | RG:730938:10010:H04 | MA159:H04 | | BC000580 | gi\|12653606\|gb\|BC000580.1BC000580 | 2.1E−254 |
| | | | | | Homo sapiens, clone IMAGE: 3162218, | |
| | | | | | mRNA, partial cds | |
| 3656 | RG:925984:10012:A10 | MA161:A10 | | J03358 | gi\|339714\|gb\|J03358.1HUMTKFER | 1.2E−246 |
| | | | | | Human tyrosine kinase (FER) mRNA, | |
| | | | | | complete cds | |
| 3657 | RG:668442:10010:B10 | MA159:B10 | | X74764 | gi\|433337\|emb\|X74764.1HSRPTK | 0 |
| | | | | | H. sapiens mRNA for receptor protein | |
| | | | | | tyrosine kinase | |
| 3658 | RG:1028911:10012:B10 | MA161:B10 | | U88666 | gi\|1857943\|gb\|U88666.1HSU88666 Homo | 1E−300 |
| | | | | | sapiens serine kinase SRPK2 mRNA, | |
| | | | | | complete cds | |
| 3659 | RG:684866:10010:C10 | MA159:C10 | | X51521 | gi\|31282\|emb\|X51521.1HSEZRIN Human | 1E−293 |
| | | | | | mRNA for ezrin | |
| 3660 | RG:1283076:10012:F10 | MA161:F10 | | BC007888 | gi\|14043894\|gb\|BC007888.1BC007888 | 0 |
| | | | | | Homo sapiens, eukaryotic translation | |
| | | | | | initiation factor 2, subunit 2 (beta, 38 kD), | |
| | | | | | clone MGC: 1417 | |
| 3661 | I:627654:17A01:G04 | MA91:G04 | | AF081192 | gi\|3420798\|gb\|AF081192.1AF081192 | 0 |
| | | | | | Homo sapiens histone H2A.F/Z variant | |
| | | | | | (H2AV) mRNA, complete cds | |
| 3662 | I:1833801:17A01:D10 | MA91:D10 | | BC009836 | gi\|14602636\|gb\|BC009836.1BC009836 | 1.9E−270 |
| | | | | | Homo sapiens, clone MGC: 15133 | |
| | | | | | IMAGE: 4098463, mRNA, complete cds | |
| 3663 | I:961473:17B01:H10 | MA93:H10 | 0.20615 | AK024678 | gi\|10437017\|dbj\|AK024678.1AK024678 | 2.7E−117 |
| | | | | | Homo sapiens cDNA: FLJ21025 fis, clone | |
| | | | | | CAE06758 | |
| 3664 | I:2556708:09B01:B10 | MA137:B10 | | BC018807 | gi\|17402954\|gb\|BC018807.1BC018807 | 1.6E−55 |
| | | | | | Homo sapiens, clone IMAGE: 4861487, | |
| | | | | | mRNA | |
| 3665 | RG:243565:10007:D10 | MA156:D10 | | AF015254 | gi\|4090840\|gb\|AF015254.1AF015254 | 8.4E−186 |
| | | | | | Homo sapiens serine/threonine kinase | |
| | | | | | (STK-1) mRNA, complete cds | |
| 3666 | RG:266649:10007:G10 | MA156:G10 | | AB034951 | gi\|11526572\|dbj\|A8034951.1AB034951 | 1E−300 |
| | | | | | Homo sapiens HSC54 mRNA for heat | |
| | | | | | shock cognate protein 54, complete cds | |
| 3667 | I:2013513:16B02:B04 | MA90:B04 | | AF155913 | gi\|6435129\|gb\|AF155913.1AF155913 Mus | 3.7E−51 |
| | | | | | musculus putative E1-E2 ATPase mRNA, | |
| | | | | | complete cds | |
| 3668 | I:2312442:16A02:B10 | MA88:B10 | 0.38737 | AK021945 | gi\|10433249\|dbj\|AK021945.1AK021945 | 1.9E−131 |
| | | | | | Homo sapiens cDNA FLJ11883 fis, clone | |
| | | | | | HEMBA1007178 | |
| 3669 | I:2060626:16A02:D10 | MA88:D10 | | AK055800 | gi\|16550622\|dbj\|AK055800.1AK055800 | 1.1E−191 |
| | | | | | Homo sapiens cDNA FLJ31238 fis, clone | |
| | | | | | KIDNE2004864 | |
| 3670 | RG:1415858:10013:D04 | MA162:D04 | | D85759 | gi\|1526445\|dbj\|D85759.1D85759 Homo | 4.8E−271 |
| | | | | | sapiens mRNA for MNB protein kinase, | |
| | | | | | complete cds | |
| 3671 | RG:1517435:10013:F04 | MA162:F04 | | X13546 | gi\|32328\|emb\|X13546.1HSHMG17G | 6.7E−292 |
| | | | | | Human HMG-17 gene for non-histone | |
| | | | | | chromosomal protein HMG-17 | |
| 3672 | RG:1914716:10015:H04 | MA164:H04 | | X13697 | gi\|36414\|emb\|X13697.1HSSBLA Human | 1E−300 |
| | | | | | mRNA for ribonucleoprotein SS-B/La | |
| 3673 | RG:1354528:10013:A10 | MA162:A10 | | AF197898 | gi\|6166494\|gb\|AF197898.1AF197898 | 6.7E−298 |
| | | | | | Homo sapiens nemo-like kinase mRNA, | |
| | | | | | complete cds | |
| 3674 | RG:1706414:10015:B10 | MA164:B10 | | M36501 | gi\|177871\|gb\|M36501.1HUMA2MGL | 0 |
| | | | | | Human alpha-2-macroglobulin mRNA, 3′ | |
| | | | | | end | |
| 3675 | I:1998510:17A02:C04 | MA92:C04 | | BC004872 | gi\|13436100\|gb\|BC004872.1BC004872 | 1.4E−252 |
| | | | | | Homo sapiens, clone MGC: 11034 | |
| | | | | | IMAGE: 3677618, mRNA, complete cds | |
| 3676 | I:899118:17B02:G10 | MA94:G10 | | AK055564 | gi\|16550323\|dbj\|AK055564.1AK0555.64 | 4E−159 |
| | | | | | Homo sapiens cDNA FLJ31002 fis, clone | |
| | | | | | HLUNG2000004 | |
| 3677 | I:2680168:09B02:B04 | MA138:B04 | | AL050071 | gi\|4884302\|emb\|AL050071.1HSM800396 | 0 |
| | | | | | Homo sapiens mRNA; cDNA | |
| | | | | | DKFZp566B0846 (from clone | |
| | | | | | DKFZp566B0846); partial cds | |
| 3678 | I:1354558:09B02:E04 | MA138:E04 | | AK054675 | gi\|16549267\|dbj\|AK054675.1AK054675 | 1E−156 |
| | | | | | Homo sapiens cDNA FLJ30113 fis, clone | |
| | | | | | BNGH42000474 | |
| 3679 | I:1665871:09B02:F10 | MA138:F10 | | AF288394 | gi\|12620197\|gb\|AF288394.1AF288394 | 0 |
| | | | | | Homo sapiens Clorf19 mRNA, partial cds | |
| 3680 | I:1922084:18B01:C05 | MA97:C05 | | AK000057 | gi\|7019894\|dbj\|AK000057.1AK000057 | 1.3E−246 |
| | | | | | Homo sapiens cDNA FLJ20050 fis, clone | |
| | | | | | COL00688 | |
| 3681 | I:2307946:18A01:B11 | MA95:B11 | | BC016150 | gi\|16740553\|gb\|BC016150.1BC016150 | 8.9E−226 |
| | | | | | Homo sapiens, Similar to CAP-binding | |
| | | | | | protein complex interacting protein 2, | |
| | | | | | clone IMAGE: 3637027, | |
| 3682 | I:1923572:18B01:C11 | MA97:C11 | | AL049959 | gi\|4884211\|emb\|AL049959.1HSM800304 | 2.3E−154 |
| | | | | | Homo sapiens mRNA; cDNA | |
| | | | | | DKFZp564K1023 (from clone | |
| | | | | | DKFZp564K1023) | |
| 3683 | RG:171993:10006:F05 | MA155:F05 | 0.31835 | AK057735 | gi\|16553657\|dbj\|AK057735.1AK057735 | 3.9E−142 |
| | | | | | Homo sapiens cDNA FLJ25006 fis, clone | |
| | | | | | CBL00989 | |
| 3684 | RG:129317:10006:B11 | MA155:B11 | | AF103796 | gi\|4185795\|gb\|AF103796.1AF103796 | 1E−300 |
| | | | | | Homo sapiens placenta-specific ATP- | |
| | | | | | binding cassette transporter (ABCP) | |
| | | | | | mRNA, complete cds | |
| 3685 | RG:153244:10006:D11 | MA155:D11 | | L06139 | gi\|292823\|gb\|L06139.1HUMTEKRPTK | 1.1E−299 |
| | | | | | Homo sapiens receptor protein-tyrosine | |
| | | | | | kinase (TEK) mRNA, complete cds | |
| 3686 | RG:196236:10006:H11 | MA155:H11 | | AF359246 | gi\|13991617\|gb\|AF359246.1AF359246 | 5E−249 |
| | | | | | Homo sapiens fibroblast growth factor | |
| | | | | | receptor 4 variant mRNA, complete cds | |
| 3687 | I:557538:16A01:C11 | MA87:C11 | | BC013142 | gi\|15341912\|gb\|BC013142.1BC013142 | 1.1E−240 |
| | | | | | Homo sapiens, interleukin 1, alpha, clone | |
| | | | | | MGC: 9225 IMAGE: 3875617, mRNA, | |
| | | | | | complete cds | |
| 3688 | I:782235:16A01:F11 | MA87:F11 | | K01228 | gi\|180391\|gb\|K01228.1HUMCG1PA1 | 9E−251 |
| | | | | | Human proalpha 1 (I) chain of type I | |
| | | | | | procollagen mRNA (partial) | |
| 3689 | RG:1257341:10012:F05 | MA161:F05 | | BC007952 | gi\|14044057\|gb\|BC007952.1BC007952 | 1E−300 |
| | | | | | Homo sapiens, pyruvate kinase, muscle, | |
| | | | | | clone MGC: 14360 IMAGE: 4299213, | |
| | | | | | mRNA, complete cds | |
| 3690 | RG:727387:10010:G05 | MA159:G05 | | BC001413 | gi\|13937593\|gb\|BC001413.1BC001413 | 0 |
| | | | | | Homo sapiens, clone IMAGE: 3140866, | |
| | | | | | mRNA | |
| 3691 | RG:1145235:10012:D11 | MA161:D11 | | BC007540 | gi\|14043108\|gb\|BC007540.1BC007540 | 3.4E−71 |
| | | | | | Homo sapiens, clone IMAGE: 3609337, | |
| | | | | | mRNA, partial cds | |
| 3692 | RG:725145:10010:F11 | MA159:F11 | | AJ000512 | gi\|2463200\|emb\|AJ000512.1HSSGK | 8.4E−264 |
| | | | | | Homo sapiens sgk gene | |
| 3693 | RG:740079:10010:H11 | MA159:H11 | | M14505 | gi\|456426\|gb\|M14505.1HUMCDPK | 0 |
| | | | | | Human (clone PSK-J3) cyclin-dependent | |
| | | | | | protein kinase mRNA, complete cds., | |
| 3694 | I:1873176:09B01:E05 | MA137:E05 | | BC001909 | gi\|12804912\|gb\|BC001909.1BC001909 | 0 |
| | | | | | Homo sapiens, clone IMAGE: 3537447, | |
| | | | | | mRNA, partial cds | |
| 3695 | I:2081974:09B01:D11 | MA137:D11 | | AK057078 | gi\|16552660\|dbj\|AK057078.1AK057078 | 0 |
| | | | | | Homo sapiens cDNA FLJ32516 fis, clone | |
| | | | | | SMINT1000103, highly similar to Homo | |
| | | | | | sapiens ankyrin repea | |
| 3696 | I:2107723:18A02:G05 | MA96:G05 | | AK000193 | gi\|7020116\|dbj\|AK000193.1AK000193 | 1.2E−265 |
| | | | | | Homo sapiens cDNA FLJ20186 fis, clone | |
| | | | | | COLF0428 | |
| 3697 | RG:207777:10007:B11 | MA156:B11 | | X04714 | gi\|28779\|emb\|X04714.1HSAPOB10 | 1E−300 |
| | | | | | Human mRNA for apolipoprotein B-100 | |
| | | | | | (apoB-100) | |
| 3698 | RG:221172:10007:C11 | MA156:C11 | | M14333 | gi\|181171\|gb\|M14333.1HUMCSYNA | 2.2E−97 |
| | | | | | Homo sapiens c-syn protooncogene | |
| | | | | | mRNA, complete cds | |
| 3699 | I:1968436:16B02:C05 | MA90:C05 | 0.33281 | | | |
| 3700 | I:2060973:16A02:G11 | MA88:G11 | | AB035384 | gi\|7619897\|dbj\|AB035384.1AB035384 | 2.6E−291 |
| | | | | | Homo sapiens mRNA for SRp25 nuclear | |
| | | | | | protein, complete cds | |
| 3701 | RG:1369494:10013:B05 | MA162:B05 | | AF008552 | gi\|2979629\|gb\|AF008552.1AF008552 | 1E−300 |
| | | | | | Homo sapiens aurora-related kinase 2 | |
| | | | | | (ARK2) mRNA, complete cds | |
| 3702 | RG:1752177:10015:E05 | MA164:E05 | | | | |
| 3703 | RG:1519327:10013:F05 | MA162:F05 | | X66364 | gi\|36620\|emb\|X66364.1HSSTHPKE | 0 |
| | | | | | H. sapiens mRNA PSSALRE for | |
| | | | | | serine/threonine protein kinase | |
| 3704 | RG:1694569:10015:A11 | MA164:A11 | | X06323 | gi\|34753\|emb\|X06323.1HSMRL3R Human | 0 |
| | | | | | MRL3 mRNA for ribosomal protein L3 | |
| | | | | | homologue (MRL3 = mammalian | |
| | | | | | ribosome L3) | |
| 3705 | RG:1839794:10015:E11 | MA164:E11 | | U28387 | gi\|881950\|gb\|U28387.1HSU28387 Human | 5.2E−175 |
| | | | | | hexokinase II pseudogene, complete cds | |
| 3706 | I:514124:17A02:D05 | MA92:D05 | | AJ420434 | gi\|17066298\|emb\|AJ420434.1HSA420434 | 6.5E−114 |
| | | | | | Homo sapiens mRNA full length insert | |
| | | | | | cDNA clone EUROIMAGE 1499812 | |
| 3707 | I:997782:17A02:G05 | MA92:G05 | | AB018346 | gi\|3882326\|dbj\|AB018346.1AB018346 | 2.8E−185 |
| | | | | | Homo sapiens mRNA for KIAA0803 | |
| | | | | | protein, partial cds | |
| 3708 | I:1709364:09B02:F11 | MA138:F11 | | NM_018440 | gi\|16753228\|ref\|NM_018440.2 Homo | 6.4E−180 |
| | | | | | sapiens phosphoprotein associated with | |
| | | | | | glycosphingolipid-enriched microdomains | |
| | | | | | (PAG), mRNA | |
| 3709 | I:2004896:18A01:C06 | MA95:C06 | | AK023512 | gi\|10435467\|dbj\|AK023512.1AK023512 | 2E−117 |
| | | | | | Homo sapiens cDNA FLJ13450 fis, clone | |
| | | | | | PLACE1003027, highly similar to Homo | |
| | | | | | sapiens mRNA for KIAA | |
| 3710 | RG:172982:10006:F06 | MA155:F06 | | D83492 | gi\|2281007\|dbj\|D83492.1D83492 Homo | 0 |
| | | | | | sapiens mRNA for Eph-family protein, | |
| | | | | | complete cds | |
| 3711 | RG:180978:10006:G06 | MA155:G06 | | D83492 | gi\|2281007\|dbj\|D83492.1D83492 Homo | 0 |
| | | | | | sapiens mRNA for Eph-family protein, | |
| | | | | | complete cds | |
| 3712 | RG:129528:10006:B12 | MA155:B12 | | U00238 | gi\|404860\|gb\|U00238.1U00238 Homo | 1.6E−286 |
| | | | | | sapiens glutamine PRPP amidotransferase | |
| | | | | | (GPAT) mRNA, complete cds | |
| 3713 | RG:186511:10006:G12 | MA155:G12 | | AK000250 | gi\|7020204\|dbj\|AK000250.1AK000250 | 3.4E−204 |
| | | | | | Homo sapiens cDNA FLJ20243 fis, clone | |
| | | | | | COLF6418, highly similar to | |
| | | | | | NUCL_HUMAN NUCLEOLIN | |
| 3714 | I:2005910:16B01:B06 | MA89:B06 | | AJ340058 | gi\|15884476\|emb\|A1340058.1HSA340058 | 2.8E−110 |
| | | | | | Homo sapiens genomic sequence | |
| | | | | | surrounding NotI site, clone NR5-ID23C | |
| 3715 | I:620871:16A01:D06 | MA87:D06 | | BC007422 | gi\|13938544\|gb\|BC007422.1BC007422 | 3.5E−250 |
| | | | | | Homo sapiens, acid phosphatase 1, soluble, | |
| | | | | | clone MGC: 3499 IMAGE: 3027769, | |
| | | | | | mRNA, complete cds | |
| 3716 | I:1920819:16A01:A12 | MA87:A12 | | BC015123 | gi\|15929378\|gb\|BC015123.1BC015123 | 8.2E−276 |
| | | | | | Homo sapiens, Similar to retinoblastoma- | |
| | | | | | binding protein 4, clone IMAGE: 3686783, | |
| | | | | | mRNA, partial cds | |
| 3717 | I:990375:16A01:E12 | MA87:E12 | | M10050 | gi\|182355\|gb\|M10050.1HUMFABPL | 1.8E−267 |
| | | | | | Human liver fatty acid binding protein | |
| | | | | | (FABP) mRNA, complete cds | |
| 3718 | I:690313:16A01:G12 | MA87:G12 | | BC017201 | gi\|16877960\|gb\|BC017201.1BC017201 | 3.8E−200 |
| | | | | | Homo sapiens, insulin-like growth factor | |
| | | | | | binding protein 7, clone MGC: 3699 | |
| | | | | | IMAGE: 3632247, mRNA, c | |
| 3719 | RG:878195:10012:A06 | MA161:A06 | | M83653 | gi\|179635\|gb\|M83653.1HUMC1PHTYR | 0 |
| | | | | | Homo sapiens cytoplasmic phosphotyrosyl | |
| | | | | | protein phosphatase (clone type 1) | |
| | | | | | complete cds | |
| 3720 | RG:687128:10010:D06 | MA159:D06 | | S75546 | gi\|914097\|gb\|S75546.1S75546 protein | 1.7E−38 |
| | | | | | kinase PRK1 [human, fetal brain, mRNA, | |
| | | | | | 3001 nt] | |
| 3721 | I:884855:17B01:D06 | MA93:D06 | | AK055393 | gi\|16550110\|dbj\|AK055393.1AK055393 | 4E−228 |
| | | | | | Homo sapiens cDNA FLJ30831 fis, clone | |
| | | | | | FEBRA2001989 | |
| 3722 | I:1218621:17B01:F06 | MA93:F06 | | | | |
| 3723 | I:620371:17A01:H06 | MAA91:H06 | | BC016472 | gi\|16741273\|gb\|BC016472.1BC016472 | 1E−203 |
| | | | | | Homo sapiens, clone MGC: 17244 | |
| | | | | | IMAGE: 4178911, mRNA, complete cds | |
| 3724 | I:1681610:09B01:D06 | MA137:D06 | | AK055827 | gi\|16550653\|dbj\|AK055827.1AK055827 | 1.3E−124 |
| | | | | | Homo sapiens cDNA FLJ31265 fis, clone | |
| | | | | | KIDNE2006030, moderately similar to | |
| | | | | | Gallus gallus syndesmo | |
| 3725 | RG:265206:10007:G06 | MA156:G06 | | U25975 | gi\|984304\|gb\|U25975.1HSU25975 Human | 1E−231 |
| | | | | | serine kinase (hPAK65) mRNA, partial cds | |
| 3726 | RG:268073:10007:H06 | MA156:H06 | | AF226044 | gi\|9295326\|gb\|AF226044.1AF226044 | 9.8E−118 |
| | | | | | Homo sapiens HSNFRK (HSNFRK) | |
| | | | | | mRNA, complete cds | |
| 3727 | I:2117221:16A02:F06 | MA88:F06 | 0.22151 | AF130089 | gi\|11493482\|gb\|AF130089.1AF130089 | 9.5E−152 |
| | | | | | Homo sapiens clone FLB9440 PRO2550 | |
| | | | | | mRNA, complete cds | |
| 3728 | I:1760693:16B02:G06 | MA90:G06 | | | | |
| 3729 | I:776793:16B02:B12 | MA90:B12 | | AF086524 | gi\|3483869\|gb\|AF086524.1HUMZE04F10 | 1.5E−283 |
| | | | | | Homo sapiens full length insert cDNA | |
| | | | | | clone ZE04F10 | |
| 3730 | RG:1405692:10013:C06 | MA162:C06 | | X60489 | gi\|31099\|emb\|X60489.1HSEF1B Human | 0 |
| | | | | | mRNA for elongation factor-1-beta | |
| 3731 | RG:1707747:10015:B12 | MA164:B12 | | M29536 | gi\|182066\|gb\|M29536.1HUMELF2 Human | 0 |
| | | | | | translational initiation factor 2 beta subunit | |
| | | | | | (elF-2-beta) mRNA, complete cds | |
| 3732 | RG:1722789:l0015:C12 | MA164:C12 | | AF183421 | gi\|9963780\|gb\|AF183421.1AF183421 | 0 |
| | | | | | Homo sapiens small GIP-binding protein | |
| | | | | | rab22b mRNA, complete cds | |
| 3733 | I:2112348:17B02:E06 | MA94:E06 | | AK026529 | gi\|10439407\|dbj\|AK026529.1AK026529 | 1.7E−196 |
| | | | | | Homo sapiens cDNA: FLJ22876 fis, clone | |
| | | | | | KAT02954, highly similar to AF056183 | |
| | | | | | Homo sapiens WS beta | |
| 3734 | I:630458:17A02:F06 | MA92:F06 | | AK025537 | gi\|10438082\|dbj\|AK025537.1AK025537 | 7.2E−211 |
| | | | | | Homo sapiens cDNA: FLJ21884 fis, clone | |
| | | | | | HEP02863 | |
| 3735 | I:901577:17A02:H06 | MA92:H06 | | AK000771 | gi\|7021067\|dbj\|AK000771.1AK00077l | 2.3E−195 |
| | | | | | Homo sapiens cDNA FLJ20764 fis, clone | |
| | | | | | COL08503 | |
| 3736 | I:2298081:17B02:E12 | MA94:E12 | | AL080169 | gi\|5262637\|emb\|AL080169.1HSM800688 | 0 |
| | | | | | Homo sapiens mRNA; cDNA | |
| | | | | | DKFZp434C171 (from clone | |
| | | | | | DKFZp434C171); partial cds | |
| 3737 | I:2718565:09B02:H12 | MA138:H12 | | AF207600 | gi\|9998951\|gb\|AF207600.2AF207600 | 3.2E−253 |
| | | | | | Homo sapiens ethanolamine kinase (EMI1) | |
| | | | | | mRNA, complete cds | |
| 3738 | M00056237C:E03 | MA181:A01 | 0.8773 | U27317 | gi\|9989705\|gb\|U27317.2HSHSD11K1 | 7.9E−23 |
| | | | | | Homo sapiens 11 beta-hydroxysteroid | |
| | | | | | dehydrogenase 2 (HSD11B2) gene, | |
| | | | | | complete cds | |
| 3739 | M00055261C:F04 | MA197:E01 | | NM_033643 | gi\|16117795\|ref\|NM_033643.1 Homo | 8.3E−223 |
| | | | | | sapiens ribosomal protein L36 (RPL36), | |
| | | | | | transcript variant 1, mRNA | |
| 3740 | M00055353D:A04 | MA197:D07 | | BC006794 | gi\|13905021\|gb\|BC006794.1BC006794 | 1.1E−156 |
| | | | | | Homo sapiens, Similar to interferon | |
| | | | | | induced transmembrane protein 3 (1-8U), | |
| | | | | | clone MGC: 5225 IMAGE: | |
| 3741 | M00055357B:B10 | MA197:H07 | | BC006794 | gi\|13905021\|gb\|BC006794.1BC006794 | 3E−275 |
| | | | | | Homo sapiens, Similar to interferon | |
| | | | | | induced transmembrane protein 3 (1-8U), | |
| | | | | | clone MGC: 5225 IMAGE: | |
| 3742 | M00056386D:H12 | MA173:C01 | | BC007700 | gi\|14712760\|gb\|BC007700.1BC007700 | 6.1E−180 |
| | | | | | Homo sapiens, clone IMAGE: 3954272, | |
| | | | | | mRNA | |
| 3743 | M00056394B:B04 | MA173:D01 | | BC006791 | gi\|13905015\|gb\|BC006791.1BC006791 | 1E−175 |
| | | | | | Homo sapiens, ribosomal protein L10a, | |
| | | | | | clone MGC: 5203 IMAGE: 2901249, | |
| | | | | | mRNA, complete cds | |
| 3744 | M00056395A:B04 | MA173:E01 | | BC016835 | gi\|16877126\|gb\|BC016835.1BC016835 | 4.2E−55 |
| | | | | | Homo sapiens, Similar to synaptophysin- | |
| | | | | | like protein, clone MGC: 10011 | |
| | | | | | IMAGE: 3883697, mRNA, complet | |
| 3745 | M00056396B:G05 | MA173:F01 | | AK026171 | gi\|10438934\|dbj\|AK026171.1AK026171 | 2.9E−94 |
| | | | | | Homo sapiens cDNA: FLJ22518 fis, clone | |
| | | | | | HRC12216, highly similar to AF151069 | |
| | | | | | Homo sapiens HSPC235 | |
| 3746 | M00056137A:A05 | MA180:G01 | | | | |
| 3747 | M00056401C:C03 | MA173:H01 | | L20688 | gi\|404044\|gb\|L20688.1HUMLYGDI | 6.4E−267 |
| | | | | | Human GDP-dissociation inhibitor protein | |
| | | | | | (Ly-GDI) mRNA, complete cds | |
| 3748 | M00056484A:F06 | MA173:E07 | | NM_003145 | gi\|6552341\|ref\|NM_003145.2 Homo | 1.3E−252 |
| | | | | | sapiens signal sequence receptor, beta | |
| | | | | | (translocon-associated protein beta) | |
| | | | | | (SSR2), mRNA | |
| 3749 | M00056193B:C11 | MA180:F07 | | AF119905 | gi\|7770246\|gb\|AF119905.1AF119905 | 4.6E−193 |
| | | | | | Homo sapiens PRO2853 mRNA, complete | |
| | | | | | cds | |
| 3750 | M00056484B:B07 | MA173:G07 | | AF203815 | gi\|6979641\|gb\|AF203815.1AF203815 | 6.6E−214 |
| | | | | | Homo sapiens alpha gene sequence | |
| 3751 | M00056193B:D06 | MA180:G07 | | AF004162 | gi\|3046385\|gb\|AF004162.1AF004162 | 8.3E−201 |
| | | | | | Homo sapiens nickel-specific induction | |
| | | | | | protein (Cap43) mRNA, complete cds | |
| 3752 | M00056194B:G06 | MA180:H07 | | BC016834 | gi\|16877123\|gb\|BC016834.1BC016834 | 2.5E−294 |
| | | | | | Homo sapiens, clone IMAGE: 3883264, | |
| | | | | | mRNA, partial cds | |
| 3753 | M00054633D:B07 | MA187:A01 | | BC018210 | gi\|17390469\|gb\|BC018210.1BC018210 | 7.9E−279 |
| | | | | | Homo sapiens, tubulin-specific chaperone | |
| | | | | | a, clone MGC: 9129 IMAGE: 3861138, | |
| | | | | | mRNA, complete cds | |
| 3754 | M00054633D:E06 | MA187:B01 | | X52003 | gi\|311379\|emb\|X52003.1HSPS2MKN | 3E−275 |
| | | | | | H. sapiens pS2 protein gene | |
| 3755 | M000548458A:C03 | MA189:H01 | | NM_001010 | gi\|17158043\|ref\|NM_001010.2 Homo | 3.6E−287 |
| | | | | | sapiens ribosomal protein S6 (RPS6), | |
| | | | | | mRNA | |
| 3756 | M00054882C:C06 | MA189:A07 | | BC000915 | gi\|14705283\|gb\|BC000915.2BC000915 | 5.3E−283 |
| | | | | | Homo sapiens, PDZ and LIM domain 1 | |
| | | | | | (elfin), clone MGC: 5344 | |
| | | | | | IMAGE: 2985229. mRNA, complete cds | |
| 3757 | M00054678D:A03 | MA187:B07 | | BC015564 | gi\|15990405\|gb\|BC015564.1BC015564 | 7.8E−279 |
| | | | | | Homo sapiens, cold shock domain protein | |
| | | | | | A, clone MGC: 12695 IMAGE: 4137643, | |
| | | | | | mRNA, complete cds | |
| 3758 | M00054679B:B03 | MA187:D07 | | BC015642 | gi\|15990506\|gb\|BC015642.1BC015642 | 4.8E−277 |
| | | | | | Homo sapiens, Similar to serine (or | |
| | | | | | cysteine) protemase inhibitor, clade A | |
| | | | | | (alpha-1 antiproteina | |
| 3759 | M00054680B:D06 | MA187:G07 | | BC009623 | gi\|16307089\|gb\|BC009623.1BC009623 | 8.4E−279 |
| | | | | | Homo sapiens, Similar to nucleophosmin | |
| | | | | | (nucleolar phosphoprotein B23, numatrin), | |
| | | | | | clone MGC: 17308 | |
| 3760 | M00054680C:A06 | MA187:H07 | | U28387 | gi\|881950\|gb\|U28387.1HSU28387 Human | 9E−83 |
| | | | | | hexokinase II pseudogene, complete cds | |
| 3761 | M00057176B:F11 | MA193:B01 | | BC000419 | gi\|12653300\|gb\|BC000419.1BC000419 | 1.1E−296 |
| | | | | | Homo sapiens, catechol-O- | |
| | | | | | methyltransferase, clone MGC: 8663 | |
| | | | | | IMAGE: 2964400, mRNA, complete cds | |
| 3762 | M00057181A:D01 | MA193:C01 | | AY008283 | gi\|15192138\|gb\|AY008283.1 Homo | 4.9E−196 |
| | | | | | sapiens porimin mRNA, complete cds | |
| 3763 | M00057219D:B04 | MA193:D07 | | NM_001015 | gi\|14277698\|ref\|NM_001015.2 Homo | 3.4E−175 |
| | | | | | sapiens ribosomal protein S11 (RPS11), | |
| | | | | | mRNA | |
| 3764 | M00042341A:D12 | MA167:A01 | | NM_002153 | gi\|4504502\|ref\|NM_002153.1 Homo | 8.3E−123 |
| | | | | | sapiens hydroxysteroid (17-beta) | |
| | | | | | dehydrogenase 2 (HSD17B2), mRNA | |
| 3765 | M00042433B:G09 | MA171:B01 | | AJ295637 | gi\|9581767\|emb\|AJ295637.1HSA295637 | 1.2E−221 |
| | | | | | Homo sapiens mRNA for URIM protein | |
| 3766 | M00042435A:F08 | MA171:D01 | | BC014048 | gi\|15559357\|gb\|BC014048.1BC014048 | 4.6E−122 |
| | | | | | Homo sapiens, clone IMAGE: 3348134, | |
| | | | | | mRNA, partial cds | |
| 3767 | M00042437B:G03 | MA171:E01 | | X59315 | gi\|33247\|emb\|X59315.1HSIGKL012 | 1.5E−119 |
| | | | | | H. sapiens gene for Ig kappa light chain | |
| | | | | | variable region “012” | |
| 3768 | M00042525D:E07 | MA167:F01 | | BC005982 | gi\|13543665\|gb\|BC005982.1BC005982 | 1.4E−105 |
| | | | | | Homo sapiens, peptidylprolyl isomerase A | |
| | | | | | (cyclophilin A), clone MGC: 14681 | |
| | | | | | IMAGE: 4109260, mRNA, co | |
| 3769 | M00042438B:D01 | MA171:F01 | | NM_004063 | gi\|16507959\|ref\|NM_004063.2 Homo | 6.1E−264 |
| | | | | | sapiens cadherin 17, LI cadherin (liver- | |
| | | | | | intestine) (CDH17), mRNA | |
| 3770 | M00042529C:G07 | MA167:G01 | | L02785 | gi\|291963\|gb\|L02785.1HUMDRA Homo | 5.8E−261 |
| | | | | | sapiens colon mucosa-associated (DRA) | |
| | | | | | mRNA, complete cds | |
| 3771 | M00042529D:B12 | MA167:H01 | 0.07368 | BC007011 | gi\|13937818\|gb\|BC007011.1BC007011 | 2.1E−145 |
| | | | | | Homo sapiens, clone MGC: 12335 | |
| | | | | | IMAGE: 3686576, mRNA, complete cds | |
| 3772 | M00042700A:E05 | MA167:A07 | | U07550 | gi\|469170\|gb\|U07550.1HSU075501Human | 4.1E−212 |
| | | | | | chaperonin 10 mRNA, complete cds | |
| 3773 | M00042777D:G05 | MA171:B07 | | AY007243 | gi\|12621025\|gb\|AY007243.1 Homo | 6.1E−264 |
| | | | | | sapiens regenerating gene type IV mRNA, | |
| | | | | | complete cds | |
| 3774 | M00042781C:F03 | MA171:D07 | | BC016753 | gi\|16876954\|gb\|BC016753.1BC016753 | 3.7E−259 |
| | | | | | Homo sapiens, clone MGC: 1138 | |
| | | | | | IMAGE: 2987963, mRNA, complete cds | |
| 3775 | M00042783C:F10 | MA171:E07 | 0.80366 | | | |
| 3776 | M00042702D:B02 | MA167:F07 | | AJ010446 | gi\|3954892\|emb\|AJ010446.1HSA010446 | 2.8E−154 |
| | | | | | Homo sapiens mRNA for immunoglobulin | |
| | | | | | kappa light chain, anti-RhD, therad 24 | |
| 3777 | M00042785B:F11 | MA171:H07 | | AF254415 | gi\|13897565\|gb\|AF254415.1AF254415 | 3.9E−209 |
| | | | | | Homo sapiens gastrointestinal secretory | |
| | | | | | protein GISP mRNA, complete cds | |
| 3778 | M00056566C:C03 | MA174:A07 | | NM_031901 | gi\|16950594\|ref\|NM_031901.2 Homo | 1.4E−255 |
| | | | | | sapiens mitochondrial ribosomal protein | |
| | | | | | S21 (MRPS21), transcript variant 1, | |
| | | | | | nuclear gene encoding | |
| 3779 | M00056567B:A09 | MA174:C07 | | BC000396 | gi\|12653254\|gb\|BC000396.1BC000396 | 1E−293 |
| | | | | | Homo sapiens, ubiquitin-conjugating | |
| | | | | | enzyme E2N (homologous to yeast | |
| | | | | | UBC13), clone MGC: 8489 IMAGE: | |
| 3780 | M00056569B:D09 | MA174:G07 | | U61267 | gi\|1418285\|gb\|U61267.1HSU61267 Homo | 4.4E−243 |
| | | | | | sapiens putative splice factor transformer2- | |
| | | | | | beta mRNA, complete cds | |
| 3781 | M00056571D:E05 | MA174:H07 | | BC017696 | gi\|17389285\|gb\|BC017696.1BC017696 | 6.6E−239 |
| | | | | | Homo sapiens, Similar to RIKEN cDNA | |
| | | | | | 2410075D05 gene, clone MGC: 21057 | |
| | | | | | IMAGE: 4393374, mRNA, complet | |
| 3782 | RG:376801:10009:C01 | MA158:C01 | | AB017642 | gi\|4519628\|dbj\|AB017642.1AB017642 | 8.9E−282 |
| | | | | | Homo sapiens mRNA for oxidative-stress | |
| | | | | | responsive 1, complete cds | |
| 3783 | RG:365436:10009:B07 | MA158:B07 | | AK022055 | gi\|10433374\|dbj\|AK022055.1AK022055 | 1.1E−290 |
| | | | | | Homo sapiens cDNA FLJ11993 fis, clone | |
| | | | | | HEMBB1001429, highly similar to Homo | |
| | | | | | sapiens leucine amino | |
| 3784 | RG:416839:10009:D07 | MA158:D07 | | AK026432 | gi\|10439295\|dbj\|AK026432.1AK026432 | 0 |
| | | | | | Homo sapiens cDNA: FLJ22779 fis, clone | |
| | | | | | KAIA1741 | |
| 3785 | RG:784224:10011:E07 | MA160:E07 | | L03840 | gi\|182570\|gb\|L03840.1HUMFGFR4X | 7.3E−258 |
| | | | | | Human fibroblast growth factor receptor 4 | |
| | | | | | (FGFR4) mRNA, complete cds | |
| 3786 | RG:796852:10011:G07 | MA160:G07 | | AF087909 | gi\|10121889\|gb\|AF087909.1AF087909 | 4.4E−271 |
| | | | | | Homo sapiens NIMA-related kinase 6 | |
| | | | | | (NEK6) mRNA, complete cds | |
| 3787 | M00043412A:F04 | MA184:E01 | | NM_000993 | gi\|15812219\|ref\|NM_000993.2 Homo | 8.3E−158 |
| | | | | | sapiens ribosomal protein L31 (RPL31), | |
| | | | | | mRNA | |
| 3788 | M00057273B:H10 | MA182:H01 | | AB042820 | gi\|11041627\|dbj\|AB042820.1AB042820 | 5.6E−41 |
| | | | | | Homo sapiens RPL6 gene for ribosomal | |
| | | | | | protein L6, complete cds | |
| 3789 | M00054506C:B10 | MA184:B07 | | NM_001012 | gi\|4506742\|ref\|NM_001012.1 Homo | 2.6E−185 |
| | | | | | sapiens ribosomal protein S8 (RPS8), | |
| | | | | | mRNA | |
| 3790 | M00054507D:G03 | MA184:F07 | | U19765 | gi\|790570\|gb\|U19765.1HSU19765 Human | 1.5E−221 |
| | | | | | nucleic acid binding protein gene, | |
| | | | | | complete cds | |
| 3791 | M00054935B:B03 | MA198:E01 | 0.06563 | NM_001644 | gi\|5921993\|ref\|NM_001644.2 Homo | 1.2E−128 |
| | | | | | sapiens apolipoprotein B mRNA editing | |
| | | | | | enzyme, catalytic polypeptide 1 | |
| | | | | | (APOBEC1), transcript variant | |
| 3792 | M00054935D:C11 | MA198:H01 | | NM_002026 | gi\|16933541\|ref\|NM_002026.1 Homo | 1.1E−190 |
| | | | | | sapiens fibronectin 1 (FN1), transcript | |
| | | | | | variant 1, mRNA | |
| 3793 | M00054976A:E09 | MA198:D07 | | BC017189 | gi\|16877928\|gb\|BC017189.1BC017189 | 2.7E−188 |
| | | | | | Homo sapiens, myo-inositol 1-phosphate | |
| | | | | | synthase A1, clone MGC: 726 | |
| | | | | | IMAGE: 3140452, mRNA, complete c | |
| 3794 | M00055788B:F08 | MA170:C07 | | V00662 | gi\|13003\|emb\|V00662.1MIHSXX | 1.3E−165 |
| | | | | | H. sapiens mitochondrial genome | |
| 3795 | M00055791A:E10 | MA170:G07 | | X01117 | gi\|57149\|emb\|X01117.1RNRRNA06 Rat | 7E−92 |
| | | | | | 18S rRNA sequence | |
| 3796 | M00055224C:H11 | MA196:E07 | | BC008952 | gi\|14286301\|gb\|BC008952.1BC008952 | 5E−171 |
| | | | | | Homo sapiens, lactate dehydrogenase B, | |
| | | | | | clone MGC: 3600 IMAGE: 3028947, | |
| | | | | | mRNA, complete cds | |
| 3797 | M00055932A:C02 | MA179:B01 | | BC019362 | gi\|17939458\|gb\|BC019362.1BC019362 | 2.1E−226 |
| | | | | | Homo sapiens, guanine nucleotide binding | |
| | | | | | protein (G protein), beta polypeptide 2-like | |
| | | | | | 1, clone MG | |
| 3798 | M00056908A:F12 | MA177:C01 | 0.86486 | | | |
| 3799 | M00055935D:B06 | MA179:D01 | | D17041 | gi\|598766\|dbj\|D17041.1HUMD3F06M5 | 3.3E−182 |
| | | | | | Human HepG2 partial cDNA, clone | |
| | | | | | hmd3f06m5 | |
| 3800 | M00056908D:D08 | MA177:E01 | | AK026649 | gi\|10439547\|dbj\|AK026649.1AK026649 | 2.3E−154 |
| | | | | | Homo sapiens cDNA: FLJ22996 fis, clone | |
| | | | | | KAT11938 | |
| 3801 | M00055942B:F08 | MA179:F01 | | X98311 | gi\|1524059\|emb\|X98311.1HSCGM2ANT | 5.9E−196 |
| | | | | | H. sapiens mRNA for carcinoembryonic | |
| | | | | | antigen family member 2, CGM2 | |
| 3802 | M00056910A:B07 | MA177:G01 | | BC009599 | gi\|16307042\|gb\|BC009599.1BC009599 | 8.3E−254 |
| | | | | | Homo sapiens, clone MGC: 14690 | |
| | | | | | IMAGE: 4134557, mRNA, complete cds | |
| 3803 | M00056952B:C08 | MA177:H07 | | Z85181 | gi\|1834892\|emb\|Z85181.1HSZ85181 | 8E−186 |
| | | | | | H. sapiens Ig lambda light chain variable | |
| | | | | | region gene (6-09OIIA61) rearranged; Ig- | |
| | | | | | Light-Lambda; VLam | |
| 3804 | M00054728C:E03 | MA188:A01 | | M34664 | gi\|184411\|gb\|M34664.1HUMHSP60A | 1.3E−283 |
| | | | | | Human chaperonin (HSP60) mRNA, | |
| | | | | | complete cds | |
| 3805 | M00054728D:E06 | MA188:B01 | | X16064 | gi\|37495\|emb\|X16064.1HSTUMP Human | 1E−300 |
| | | | | | mRNA for translationally controlled tumor | |
| | | | | | protein | |
| 3806 | M00054731C:H01 | MA188:H01 | | X73502 | gi\|406853\|emb\|X73502.1HSENCY20 H. Sapiens | 1.9E−267 |
| | | | | | mRNA for cytokeratin 20 | |
| 3807 | M00054778B:A12 | MA188:D07 | | AJ276249 | gi\|7362984\|emb\|AJ276249.1HSA276249 | 2E−91 |
| | | | | | Homo sapiens partial mRNA, clone cl- | |
| | | | | | 10e16 | |
| 3808 | M00054778C:D08 | MA188:F07 | | NM_002137 | gi\|14043073\|ref\|NM_002137.2 Homo | 1.8E−34 |
| | | | | | sapiens heterogeneous nuclear | |
| | | | | | ribonucleoprotein A2/B1 (HNRPA2B1), | |
| | | | | | transcript variant A2, mRNA | |
| 3809 | M00054780A:G06 | MA188:H07 | | BC000035 | gi\|12652584\|gb\|BC000035.1BC000035 | 3.6E−287 |
| | | | | | Homo sapiens, CGI-89 protein, clone | |
| | | | | | MGC: 845 IMAGE: 3506601, mRNA, | |
| | | | | | complete cds | |
| 3810 | M00042899D:D02 | MA168:A01 | | Y00339 | gi\|29586\|emb\|Y0039.1HSCA2 Human | 1.5E−233 |
| | | | | | mRNA for carbonic anhydrase II (EC | |
| | | | | | 4.2.1.1) | |
| 3811 | M00042831B:G10 | MA172:C01 | | AK024740 | gi\|10437104\|dbj\|AK024740.1AK024740 | 6.2E−264 |
| | | | | | Homo sapiens cDNA: FLJ21087 fis, clone | |
| | | | | | CAS03323 | |
| 3812 | M00042833A:G07 | MA172:D01 | | AF047470 | gi\|2906145\|gb\|AF047470.1AF047470 | 3E−166 |
| | | | | | Homo sapiens malate dehydrogenase | |
| | | | | | precursor (MDH) mRNA, nuclear gene | |
| | | | | | encoding mitochondrial protei | |
| 3813 | M00042906D:F05 | MA168:E01 | | L31792 | gi\|471076\|gb\|L31792.1HUMCGM2A | 1.1E−200 |
| | | | | | Homo sapiens carcinoembryonic antigen | |
| | | | | | (CGM2) mRNA, complete cds | |
| 3814 | M00042910C:A02 | MA168:G01 | | AF113700 | gi\|6855634\|gb\|AF113700.1AF113700 | 7.6E−245 |
| | | | | | Homo sapiens clone FLB9737 | |
| 3815 | M00042838C:D06 | MA172:H01 | | AK026558 | gi\|10439440\|dbj\|AK026558.1AK026558 | 1.7E−214 |
| | | | | | Homo sapiens cDNA: FLJ22905 fis, clone | |
| | | | | | KAT05654, highly similar to | |
| | | | | | HUMRPL18A Homo sapiens riboso | |
| 3816 | M00042867B:F03 | MA172:A07 | 0.30983 | D87666 | gi\|1620016\|dbj\|D87666.1D87666 Human | 1.3E−101 |
| | | | | | heart mRNA for heat shock protein 90, | |
| | | | | | partial cds | |
| 3817 | M00055439B:G05 | MA168:B07 | | AY029066 | gi\|14017398\|gb\|AY029066.1 Homo | 9.6E−263 |
| | | | | | sapiens Humanin (HN1) mRNA, complete | |
| | | | | | cds | |
| 3818 | M00055442D:E12 | MA168:F07 | | BC005354 | gi\|13529169\|gb\|BC005354.1BC005354 | 6.6E−239 |
| | | | | | Homo sapiens, ribosomal protein, large P2, | |
| | | | | | clone MGC: 12453 IMAGE: 4052568, | |
| | | | | | mRNA, complete cds | |
| 3819 | M00056711D:A02 | MA175:B01 | | Z11566 | gi\|1066270\|emb\|Z11566.1HSPR22MR | 6.7E−133 |
| | | | | | H. sapiens mRNA for Pr22 protein | |
| 3820 | M00056771C:A12 | MA175:A07 | | X02152 | gi\|34312\|emb\|X02152.1HSLDHAR | 6E−130 |
| | | | | | Human mRNA for lactate dehydrogenase- | |
| | | | | | A (LDH-A, EC 1.1.1.27) | |
| 3821 | M00056772D:G07 | MA175:C07 | | NM_001016 | gi\|14277699\|ref\|NM_001016.2 Homo | 1.2E−218 |
| | | | | | sapiens ribosomal protein S12 (RPS12), | |
| | | | | | mRNA | |
| 3822 | M00056782D:E04 | MA175:F07 | | AF346968 | gi\|13272626\|gb\|AF346968.1AF346968 | 3.6E−172 |
| | | | | | Homo sapiens mitochondrion, complete | |
| | | | | | genome | |
| 3823 | M00056785D:G01 | MA175:G07 | | NM_001019 | gi\|14165468\|ref\|NM_001019.2 Homo | 1.5E−230 |
| | | | | | sapiens ribosomal protein S15a (RPS15A), | |
| | | | | | mRNA | |
| 3824 | M00056788C:A01 | MA175:H07 | | AY029066 | gi\|14017398\|gb\|AY029066.1 Homo | 3.5E−287 |
| | | | | | sapiens Humanin (HN1) mRNA, complete | |
| | | | | | cds | |
| 3825 | RG:1663880:10014:F07 | MA163:F07 | | BC019315 | gi\|17939511\|gb\|BC019315.1BC019315 | 1E−300 |
| | | | | | Homo sapiens, N-acetylneuraminic acid | |
| | | | | | phosphate synthase; sialic acid synthase, | |
| | | | | | clone MGC: 4339 IM | |
| 3826 | M00043310B:D08 | MA183:C01 | | NM_000969 | gi\|14591908\|ref\|NM_000969.2 Homo | 1.5E−261 |
| | | | | | sapiens ribosomal protein L5 (RPL5), | |
| | | | | | mRNA | |
| 3827 | M00054538C:G03 | MA185:C01 | | BC000734 | gi\|12653884\|gb\|BC000734.1BC000734 | 4E−234 |
| | | | | | Homo sapiens, eukaryotic translation | |
| | | | | | initiation factor 3, subunit 6 (48 kD), clone | |
| | | | | | MGC: 2060 IMAGE: | |
| 3828 | M00043315C:G05 | MA183:H01 | | AK023362 | gi\|10435266\|dbj\|AK023362.1AK023362 | 2.7E−241 |
| | | | | | Homo sapiens cDNA FLJ13300 fis, clone | |
| | | | | | OVARC1001342, highly similar to 40S | |
| | | | | | RIBOSOMAL PROTEIN S8 | |
| 3829 | M00055397B:E08 | MA199:B01 | | X06747 | gi\|36101\|emb\|X06747.1HSRNPA1 Human | 9.7E−132 |
| | | | | | hnRNP core protein A1 | |
| 3830 | M00056624B:H11 | MA186:C01 | | X56597 | gi\|31394\|emb\|X56597.1HSFIB Human | 7.7E−192 |
| | | | | | humFib mRNA for fibrillarin | |
| 3831 | M00055423C:C03 | MA199:E07 | | L01124 | gi\|307390\|gb\|L01124.1HUMRPS13A | 9.1E−154 |
| | | | | | Human ribosomal protein S13 (RPS13) | |
| | | | | | mRNA, complete cds | |
| 3832 | M00056668D:C06 | MA186:F07 | | BC013231 | gi\|15301504\|gb\|BC013231.1BC013231 | 9.8E−263 |
| | | | | | Homo sapiens, clone IMAGE: 3462987, | |
| | | | | | mRNA | |
| 3833 | M00056669B:A10 | MA186:G07 | | NM_001025 | gi\|14790142\|ref\|NM_001025.2 Homo | 3.7E−290 |
| | | | | | sapiens ribosomal protein S23 (RPS23), | |
| | | | | | mRNA | |
| 3834 | M00055424A:D01 | MA199:G07 | | BC002362 | gi\|12803116\|gb\|BC002362.1BC002362 | 6.4E−183 |
| | | | | | Homo sapiens, lactate dehydrogenase B, | |
| | | | | | clone MGC: 8627 IMAGE: 2961445, | |
| | | | | | mRNA, complete cds | |
| 3835 | M00056669B:E07 | MA186:H07 | | NM_002295 | gi\|9845501\|ref\|NM_002295.2 Homo | 9.1E−232 |
| | | | | | sapiens laminin receptor 1 (67 kD, | |
| | | | | | ribosomal protein SA) (LAMR1), mRNA | |
| 3836 | M00055424D:F01 | MA199:H07 | | NM_001012 | gi\|4506742\|ref\|NM_001012.1 Homo | 4.4E−190 |
| | | | | | sapiens ribosomal protein S8 (RPS8), | |
| | | | | | mRNA | |
| 3837 | M00056243A:H07 | MA181:C02 | 0.86405 | | | |
| 3838 | M00056243C:G10 | MA181:D02 | 0.46512 | | | |
| 3839 | M00055528D:H03 | MA169:F02 | 0.6783 | | | |
| 3840 | M00055607B:A11 | MA169:B08 | | AF161415 | gi\|6841243\|gb\|AF161415.1AF161415 | 3.5E−253 |
| | | | | | Homo sapiens HSPC297 mRNA, partial | |
| | | | | | cds | |
| 3841 | M00055363C:E02 | MA197:A08 | 0.62737 | | | |
| 3842 | M00055373D:H02 | MA197:F08 | | BC013016 | gi\|15278200\|gb\|BC013016.1BC013016 | 3.3E−125 |
| | | | | | Homo sapiens, Similar to ribosomal | |
| | | | | | protein L19, clone MGC: 4526 | |
| | | | | | IMAGE: 3010178, mRNA, complete cds | |
| 3843 | M00055374D:E01 | MA197:H08 | | NM_000979 | gi\|15431298\|ref\|NM_000979.2 Homo | 1.5E−261 |
| | | | | | sapiens ribosomal protein L18 (RPL18), | |
| | | | | | mRNA | |
| 3844 | M00056401D:D09 | MA173:A02 | | BC008492 | gi\|14250147\|gb\|BC008492.1BC008492 | 1.6E−105 |
| | | | | | Homo sapiens, ribosomal protein L3, clone | |
| | | | | | MGC: 14821 IMAGE: 4251511, mRNA, | |
| | | | | | complete cds | |
| 3845 | M00056139D:A10 | MA180:B02 | | X16356 | gi\|37203\|emb\|X16356.1HSTM3CEA | 3.9E−237 |
| | | | | | Human mRNA for transmembrane | |
| | | | | | carcinoembryonic antigen BGPC (part.) | |
| | | | | | (formerly TM3-CEA) | |
| 3846 | M00056140A:E11 | MA180:D02 | | U96628 | gi\|2343084\|gb\|U96628.1HSU96628 Homo | 2.4E−182 |
| | | | | | sapiens nuclear antigen H731-like protein | |
| | | | | | mRNA, complete cds | |
| 3847 | M00056142D:A08 | MA180:E02 | | BC015958 | gi\|16358989\|gb\|BC015958.1BC015958 | 4.2E−268 |
| | | | | | Homo sapiens, clone MGC: 15290 | |
| | | | | | IMAGE: 3940309, mRNA, complete cds | |
| 3848 | M00056412D:A09 | MA173:F02 | 0.85039 | | | |
| 3849 | M00056142D:H11 | MA180:F02 | | AK025078 | gi\|10437520\|dbj\|AK025078.1AK025078 | 3.8E−120 |
| | | | | | Homo sapiens cDNA: FLJ21425 fis, clone | |
| | | | | | COL04162 | |
| 3850 | M00056414C:F03 | MA173:G02 | | M29548 | gi\|181966\|gb\|M29548.1HUMEF1AB | 1.7E−114 |
| | | | | | Human elongation factor 1-alpha (EF1A) | |
| | | | | | mRNA, partial cds | |
| 3851 | M00056196A:H09 | MA180:B08 | | D84239 | gi\|1944351\|dbj\|D84239.1D84239 Homo | 2E−251 |
| | | | | | sapiens mRNA for IgG Fc binding protein, | |
| | | | | | complete cds | |
| 3852 | M00056200A:E11 | MA180:D08 | | U14528 | gi\|549987\|gb\|U14528.1HSU14528 Human | 4.3E−299 |
| | | | | | sulfate transporter (DTD) mRNA, | |
| | | | | | complete cds | |
| 3853 | M00056488C:G01 | MA173:E08 | | L08048 | gi\|184250\|gb\|L08048.1HUMHMG1C | 3.3E−281 |
| | | | | | Human non-histone chromosomal protein | |
| | | | | | (HMG-1) retropseudogene | |
| 3854 | M00056200B:B01 | MA180:E08 | | D84239 | gi\|1944351\|dbj\|D84239.1D84239 Homo | 1.5E−233 |
| | | | | | sapiens mRNA for IgG Fc binding protein, | |
| | | | | | complete cds | |
| 3855 | M00056203B:G08 | MA180:F08 | 0.89391 | | | |
| 3856 | M00056493A:F09 | MA173:H08 | | X14831 | gi\|37199\|emb\|X14831.1HSTM2CEA | 4.2E−115 |
| | | | | | Human mRNA for transmembrane | |
| | | | | | carcinoembryonic antigen BGPb (formerly | |
| | | | | | TM2-CEA) | |
| 3857 | M00054640D:D12 | MA187:B02 | 0.89884 | | | |
| 3858 | M00054643B:F04 | MA187:D02 | 0.66848 | | | |
| 3859 | M00054643C:D08 | MA187:E02 | | BC000491 | gi\|12653440\|gb\|BC000491.1BC000491 | 1.6E−236 |
| | | | | | Homo sapiens, proliferating cell nuclear | |
| | | | | | antigen, clone MGC: 8367 | |
| | | | | | IMAGE: 2820036, mRNA, complete cd | |
| 3860 | M00054854D:B06 | MA189:F02 | | M16660 | gi\|184420\|gb\|M16660.1HUMHSP90 | 2.4E−263 |
| | | | | | Human 90-kDa heat-shock protein gene, | |
| | | | | | cDNA, complete cds | |
| 3861 | M00054644B:F02 | MA187:G02 | | BC017414 | gi\|16924273\|gb\|BC017414.1BC017414 | 1.2E−246 |
| | | | | | Homo sapiens, Similar to signal | |
| | | | | | recognition particle 9 kD, clone | |
| | | | | | IMAGE: 4655251, mRNA, partial cds | |
| 3862 | M00054857A:E08 | MA189:G02 | | BC016753 | gi\|16876954\|gb\|BC016753.1BC016753 | 8.6E−229 |
| | | | | | Homo sapiens, clone MGC: 1138 | |
| | | | | | IMAGE: 2987963, mRNA, complete cds | |
| 3863 | M00054681D:G03 | MA187:B08 | | BC019360 | gi\|17939583\|gb\|BC019360.1BC019360 | 1E−300 |
| | | | | | Homo sapiens, clone IMAGE: 4025624, | |
| | | | | | mRNA | |
| 3864 | M00054682D:F11 | MA187:D08 | 0.13542 | AF116637 | gi\|7959775\|gb\|AF116637.1AF116637 | 3.2E−210 |
| | | | | | Homo sapiens PRO1489 mRNA, complete | |
| | | | | | cds | |
| 3865 | M00054684B:C07 | MA187:F08 | | BC001781 | gi\|12804704\|gb\|BC001781.1BC001781 | 8.6E−176 |
| | | | | | Homo sapiens, ribosomal protein L44, | |
| | | | | | clone MGC: 2064 IMAGE: 3353669, | |
| | | | | | mRNA, complete cds | |
| 3866 | M00057191B:E11 | MA193:D02 | | AK026528 | gi\|10439405\|dbj\|AK026528.1AK026528 | 4.6E−274 |
| | | | | | Homo sapiens cDNA: FLJ22875 fis, clone | |
| | | | | | KAT02879 | |
| 3867 | M00057194B:G12 | MA193:G02 | | AF228422 | gi\|12656020\|gb\|AF228422.1AF228422 | 1.9E−117 |
| | | | | | Homo sapiens normal mucosa of | |
| | | | | | esophagus specific 1 (NMES1) mRNA, | |
| | | | | | complete cds | |
| 3868 | M00057222D:G09 | MA193:B08 | | D49400 | gi\|1395161\|dbj\|D49400.1HUMVATPASE | 3.9E−262 |
| | | | | | Homo sapiens mRNA for vacuolar | |
| | | | | | ATPase, complete cds | |
| 3869 | M00042531B:H03 | MA167:A02 | | M15042 | gi\|180198\|gb\|M15042.1HUMCEA Human | 6.3E−211 |
| | | | | | carcinoembryonic antigen mRNA | |
| 3870 | M00042440C:G04 | MA171:A02 | 0.89441 | | | |
| 3871 | M00042533C:D02 | MA167:C02 | | X56999 | gi\|37568\|emb\|X56999.1HSUBA52P | 3.7E−29 |
| | | | | | Human UbA52 placental mRNA for | |
| | | | | | ubiquitin-52 amino acid fusion protein | |
| 3872 | M00042536D:H05 | MA167:E02 | | AF146019 | gi\|10197599\|gb\|AF146019.1AF146019 | 3E−26 |
| | | | | | Homo sapiens hepatocellular carcinoma | |
| | | | | | antigen gene 520 mRNA, complete cds | |
| 3873 | M00042465B:E04 | MA171:E02 | | BC016732 | gi\|16876903\|gb\|BC016732.1BC016732 | 5.7E−202 |
| | | | | | Homo sapiens, thymosin, beta 4, X | |
| | | | | | chromosome, clone MGC: 24503 | |
| | | | | | IMAGE: 4096207, mRNA, complete cds | |
| 3874 | M00042537D:F10 | MA167:F02 | | BC000889 | gi\|12654142\|gb\|BC000889.1BC000889 | 1.6E−236 |
| | | | | | Homo sapiens, RNA polymerase I 16 kDa | |
| | | | | | subunit, clone MGC: 4881 | |
| | | | | | IMAGE: 3462906, mRNA, complete cds | |
| 3875 | M00042467B:B04 | MA171:F02 | | V00572 | gi\|35434\|emb\|V00572.1HSPGK1 Human | 1E−240 |
| | | | | | mRNA encoding phosphoglycerate kinase | |
| 3876 | M00042538D:D12 | MA167:G02 | | X68195 | gi\|36165\|emb\|X68195.1HSRSPAC | 6.6E−24 |
| | | | | | H. sapiens genomic DNA of ribosomal | |
| | | | | | RNA intergenic spacer sequence | |
| 3877 | M00042467B:B08 | MA171:G02 | | U11861 | gi\|515482\|gb\|U11861.1HSU11861 Human | 1.7E−165 |
| | | | | | G10 homolog (edg-2) mRNA, complete | |
| | | | | | cds | |
| 3878 | M00042711B:G09 | MA167:B08 | | AF130094 | gi\|11493492\|gb\|AF130094.1AF130094 | 3E−207 |
| | | | | | Homo sapiens clone FLC0165 mRNA | |
| | | | | | sequence | |
| 3879 | M00042790B:E12 | MA171:B08 | | AF039400 | gi\|4009457\|gb\|AF039400.1AF039400 | 5.9E−261 |
| | | | | | Homo sapiens calcium-dependent chloride | |
| | | | | | channel-1 (hCLCA1) mRNA, complete cds | |
| 3880 | M00042791A:C10 | MA171:C08 | | NM_000147 | gi\|4503802\|ref\|NM_000147.1 Homo | 1.3E−252 |
| | | | | | sapiens fucosidase, alpha-L-1, tissue | |
| | | | | | (FUCA1), mRNA | |
| 3881 | M00042711C:H05 | MA167:D08 | | X16354 | gi\|37197\|emb\|X16354.1HSTM1CEA | 2.7E−163 |
| | | | | | Human mRNA for transmembrane | |
| | | | | | carcinoembryonic antigen BGPa (formerly | |
| | | | | | TM1-CEA) | |
| 3882 | M00042801D:B02 | MA171:H08 | | BC002348 | gi\|12803088\|gb\|BC002348.1BC002348 | 4.9E−196 |
| | | | | | Homo sapiens, nuclear transport factor 2 | |
| | | | | | (placental protein 15), clone MGC: 8327 | |
| | | | | | IMAGE: 2819267, mR | |
| 3883 | M00042801D:B02 | MA171:H08 | | BC002348 | gi\|12803088\|gb\|BC002348.1BC002348 | 4.9E−196 |
| | | | | | Homo sapiens, nuclear transport factor 2 | |
| | | | | | (placental protein 15), clone MGC: 8327 | |
| | | | | | IMAGE: 2819267, mR | |
| 3884 | M00056532A:D09 | MA174:C02 | 0.78082 | | | |
| 3885 | M00056533D:H04 | MA174:E02 | | AK000070 | gi\|7019918\|dbj\|AK000070.1AK000070 | 3.6E−287 |
| | | | | | Homo sapiens cDNA FLJ20063 fis, clone | |
| | | | | | COL01524 | |
| 3886 | M00056575B:C04 | MA174:B08 | | AK000113 | gi\|7019989\|dbj\|AK000113.1AK000113 | 2.4E−263 |
| | | | | | Homo sapiens cDNA FLJ20106 fis, clone | |
| | | | | | COL04830 | |
| 3887 | M00056578C:A09 | MA174:C08 | | NM_000988 | gi\|17017972\|ref\|NM_000988.2 Homo | 2.1E−198 |
| | | | | | sapiens ribosomal protein L27 (RPL27), | |
| | | | | | mRNA | |
| 3888 | RG:1862072:20001:D08 | MA139:D08 | | X61633 | gi\|37957\|emb\|X61633.1HSWIGEEX4 | 9.2E−25 |
| | | | | | H. sapiens Wilms tumor gene 1, exon 4 | |
| 3889 | RG:1862465:20001:F08 | MA139:F08 | 0.81221 | | | |
| 3890 | RG:347381:10009:A02 | MA158:A02 | | U38846 | gi\|1200183\|gb\|U38846.1HSU38846 | 0 |
| | | | | | Human stimulator of TAR RNA binding | |
| | | | | | (SRB) mRNA, complete cds | |
| 3891 | RG:417093:10009:D08 | MA158:D08 | 0.08361 | M17885 | gi\|190231\|gb\|M17885.1HUMPPARP0 | 4.4E−216 |
| | | | | | Human acidic ribosomal phosphoprotein | |
| | | | | | P0 mRNA, complete cds | |
| 3892 | M00043413B:C04 | MA184:A02 | | AK027437 | gi\|14042109\|dbj\|AK027437.1AK027437 | 5.2E−174 |
| | | | | | Homo sapiens cDNA FLJ14531 fis, clone | |
| | | | | | NT2RM2000371, weakly similar to | |
| | | | | | POLYRIBONUCLEOTIDE NUCLEOT | |
| 3893 | M00043502D:C12 | MA184:F02 | | BC000820 | gi\|12654032\|gb\|BC000820.1BC000820 | 5.2E−252 |
| | | | | | Homo sapiens, menage a trois 1 (CAK | |
| | | | | | assembly factor), clone MGC: 5154 | |
| | | | | | IMAGE: 3453943, mRNA, complet | |
| 3894 | M00057341B:B11 | MA182:E08 | | BC001955 | gi\|12805002\|gb\|BC001955.1BC001955 | 1.1E−243 |
| | | | | | Homo sapiens, ribosomal protein S10, | |
| | | | | | clone MGC: 4389 IMAGE: 2905318, | |
| | | | | | mRNA, complete cds | |
| 3895 | M00054512A:F11 | MA184:G08 | 0.19488 | | | |
| 3896 | M00042353A:D05 | MA182:H08 | | BC016352 | gi\|16741002\|gb\|BC016352.1BC016352 | 2E−123 |
| | | | | | Homo sapiens, small acidic protein, clone | |
| | | | | | MGC: 24468 IMAGE: 4082845, mRNA, | |
| | | | | | complete cds | |
| 3897 | M00054937B:D09 | MA198:B02 | | S79979 | gi\|1839333\|gb\|S79979.1S79979 ribosomal | 2.8E−75 |
| | | | | | protein L37 [human, HeLa cells, | |
| | | | | | Genomic/mRNA, 754 nt] | |
| 3898 | M00055797C:H09 | MA170:D08 | | BC009699 | gi\|16307220\|gb\|BC009699.1BC009699 | 8.2E−226 |
| | | | | | Homo sapiens, Similar to RNA helicase- | |
| | | | | | related protein, clone MGC: 9246 | |
| | | | | | IMAGE: 3892441, mRNA, comple | |
| 3899 | M00055799B:C01 | MA170:E08 | | X01117 | gi\|57149\|emb\|X01117.1RNRRNA06 Rat | 1.5E−51 |
| | | | | | 18S rRNA sequence | |
| 3900 | M00055194C:G12 | MA196:D02 | | BC008062 | gi\|14165518\|gb\|BC008062.1BC008062 | 7.7E−27 |
| | | | | | Homo sapiens, basic transcription factor 3, | |
| | | | | | clone MGC: 2209 IMAGE: 2966788, | |
| | | | | | mRNA, complete cds | |
| 3901 | M00055233B:D08 | MA196:B08 | 0.55474 | | | |
| 3902 | M00055966C:D06 | MA179:H02 | | | | |
| 3903 | M00056024B:B06 | MA179:D08 | | BC011949 | gi\|15080385\|gb\|BC011949.1BC011949 | 6E−261 |
| | | | | | Homo sapiens, Similar to carbonic | |
| | | | | | anhydrase II, clone MGC: 9006 | |
| | | | | | IMAGE: 3863603, mRNA, complete cds | |
| 3904 | M00056024C:G04 | MA179:E08 | | | | |
| 3905 | M00054737D:F10 | MA188:D02 | | BC018828 | gi\|17402971\|gb\|BC018828.1BC018828 | 3.5E−284 |
| | | | | | Homo sapiens, clone IMAGE: 3343539, | |
| | | | | | mRNA | |
| 3906 | M00054780D:C09 | MA188:A08 | | BC007967 | gi\|14044092\|gb\|BC007967.1BC007967 | 2.2E−151 |
| | | | | | Homo sapiens, clone MGC: 14460 | |
| | | | | | IMAGE: 4304670, mRNA, complete cds | |
| 3907 | M00054787A:E09 | MA188:D08 | | NM_006013 | gi\|15718685\|ref\|NM_006013.2 Homo | 8E−279 |
| | | | | | sapiens ribosomal protein L10 (RPL10), | |
| | | | | | mRNA | |
| 3908 | M00054806B:E11 | MA188:E08 | | AK026650 | gi\|10439548\|dbj\|AK026650.1AK026650 | 1.3E−252 |
| | | | | | Homo sapiens cDNA: FLJ22997 fis, clone | |
| | | | | | KAT11962, highly similar to HSEF1AC | |
| | | | | | Human mRNA for elonga | |
| 3909 | M00042913B:C11 | MA168:B02 | | NM_000999 | gi\|16306562\|ref\|NM_000999.2 Homo | 2.4E−182 |
| | | | | | sapiens ribosomal protein L38 (RPL38), | |
| | | | | | mRNA | |
| 3910 | M00042915B:B10 | MA168:D02 | | AK058013 | gi\|16554011\|dbj\|AK058013.1AK058013 | 2.2E−201 |
| | | | | | Homo sapiens cDNA FLJ25284 fis, clone | |
| | | | | | STM06787, highly similar to 15- | |
| | | | | | HYDROXYPROSTAGLANDIN | |
| | | | | | DEHYDR | |
| 3911 | M00054792C:E12 | MA168:E02 | | D14530 | gi\|414348\|dbj\|D14530.1HUMRSPT | 4.1E−268 |
| | | | | | Human homolog of yeast ribosomal | |
| | | | | | protein S28, complete cds | |
| 3912 | M00042842A:C01 | MA172:G02 | 0.66829 | | | |
| 3913 | M00055450A:C09 | MA168:H08 | 0.8 | | | |
| 3914 | M00056804C:D01 | MA175:H08 | | AF126743 | gi\|5052332\|gb\|AF126743.1AF126743 | 3.1E−278 |
| | | | | | Homo sapiens DNAJ domain-containing | |
| | | | | | Protein MCJ (MCJ) mRNA, complete cds | |
| 3915 | RG:1647954:10014:D08 | MA163:D08 | | NM_001261 | gi\|17017983\|ref\|NM_001261.2 Homo | 1.9E−273 |
| | | | | | sapiens cyclin-dependent kinase 9 (CDC2- | |
| | | | | | related kinase) (CDK9), mRNA | |
| 3916 | RG: 1664311:10014:F08 | MA163:F08 | | X02761 | gi\|31396\|emb\|X02761.1HSFIB1 Human | 0 |
| | | | | | mRNA for fibronectin (FN precursor) | |
| 3917 | RG: 1671377:10014:G08 | MA163:G08 | | BC013078 | gi\|15341811\|gb\|BC013078.1BC013078 | 2.8E−297 |
| | | | | | Homo sapiens, clone MGC: 17534 | |
| | | | | | IMAGE: 3459415, mRNA, complete cds | |
| 3918 | M00043316B:F10 | MA183:C02 | | X16064 | gi\|37495\|emb\|X16064.1HSTUMP Human | 2.7E−269 |
| | | | | | mRNA for translationally controlled tumor | |
| | | | | | protein | |
| 3919 | M00054545B:A03 | MA185:D02 | | AF151048 | gi\|7106817\|gb\|AFl51048.1AF151048 | 4.6E−271 |
| | | | | | Homo sapiens HSPC214 mRNA, complete | |
| | | | | | cds | |
| 3920 | M00054545B:B09 | MA185:E02 | 0.07415 | X07979 | gi\|31441\|emb\|X07979.1HSFNRB Human | 1.2E−126 |
| | | | | | mRNA for integrin beta 1 subunit | |
| 3921 | M00054575A:B09 | MA185:D08 | | X16064 | gi\|37495\|emb\|X16064.1HSTUMP Human | 3.2E−278 |
| | | | | | mRNA for translationally controlled tumor | |
| | | | | | protein | |
| 3922 | M00043374B:H05 | MA183:F08 | 0.11186 | NM_053275 | gi\|16933545\|ref\|NM_053275.1 Homo | 3E−136 |
| | | | | | sapiens ribosomal protein, large, P0 | |
| | | | | | (RPLP0), transcript variant 2, mRNA | |
| 3923 | M00056641A:G11 | MA186:F02 | | BC003352 | gi\|13097158\|gb\|BC003352.1BC003352 | 3.6E−284 |
| | | | | | Homo sapiens, tumor protein, | |
| | | | | | translationally-controlled 1, clone | |
| | | | | | MGC: 5308 IMAGE: 2899964, mRNA, co | |
| 3924 | M00056642A:D08 | MA186:H02 | 0.78693 | | | |
| 3925 | M00055403B:B11 | MA199:H02 | | NM_001021 | gi\|14591913\|ref\|NM_001021.2 Homo | 5.8E−180 |
| | | | | | sapiens ribosomal protein S17 (RPS17), | |
| | | | | | mRNA | |
| 3926 | M00056676B:C11 | MA186:H08 | | AF346968 | gi\|13272626\|gb\|AF346968.1AF346968 | 4.6E−165 |
| | | | | | Homo sapiens mitochondrion, complete | |
| | | | | | genome | |
| 3927 | M00055530D:B02 | MA169:B03 | | NM_001012 | gi\|4506742\|ref\|NM_001012.1 Homo | 1.5E−261 |
| | | | | | sapiens ribosomal protein S8 (RPS8), | |
| | | | | | mRNA | |
| 3928 | M00056253A:D06 | MA181:C03 | | BC014166 | gi\|15559610\|gb\|BC014166.1BC014166 | 1.2E−274 |
| | | | | | Homo sapiens, clone IMAGE: 4549553, | |
| | | | | | mRNA | |
| 3929 | M00056253B:B06 | MA181:D03 | | BC000053 | gi\|12652614\|gb\|BC000053.1BC000053 | 1.7E−270 |
| | | | | | Homo sapiens, LPS-induced TNF-alpha | |
| | | | | | factor, clone IMAGE: 3506981, mRNA | |
| 3930 | M00055642D:F09 | MA169:D09 | | AF203815 | gi\|6979641\|gb\|AF203815.1AF203815 | 2.2E−257 |
| | | | | | Homo sapiens alpha gene sequence | |
| 3931 | M00055643A:E09 | MA169:E09 | | J03037 | gi\|179771\|gb\|J03037.1HUMCAIIA Human | 3E−247 |
| | | | | | carbonic anhydrase II mRNA, complete | |
| | | | | | cds | |
| 3932 | M00055643D:E02 | MA169:F09 | | M10050 | gi\|182355\|gb\|M10050.1HUMFABPL | 2.1E−251 |
| | | | | | Human liver fatty acid binding protein | |
| | | | | | (FABP) mRNA, complete cds | |
| 3933 | M00055376D:D08 | MA197:B09 | | D38112 | gi\|644480\|dbj\|D38112.1HUMMTA Homo | 8.5E−111 |
| | | | | | sapiens mitochondrial DNA, complete | |
| | | | | | sequence | |
| 3934 | M00056415C:D02 | MA173:B03 | 0.67751 | | | |
| 3935 | M00056146D:F05 | MA180:B03 | 0.61693 | | | |
| 3936 | M00056417A:F02 | MA173:C03 | | Z85099 | gi\|1834810\|emb\|Z85099.1HSZ85099 | 2.7E−31 |
| | | | | | H. sapiens Ig lambda light chain variable | |
| | | | | | region gene (3-01OIIA11) rearranged; Ig- | |
| | | | | | Light-Lambda; VLam | |
| 3937 | M00056148A:B07 | MA180:C03 | | AK026170 | gi\|10438933\|dbj\|AK026170.1AK026170 | 4.8E−134 |
| | | | | | Homo sapiens cDNA: FLJ22517 fis, clone | |
| | | | | | HRC12186 | |
| 3938 | M00056420C:E07 | MA173:D03 | | BC010735 | gi\|14789596\|gb\|BC010735.1BC010735 | 3.7E−262 |
| | | | | | Homo sapiens, Similar to eukaryotic | |
| | | | | | translation elongation factor 1 alpha 1, | |
| | | | | | clone MGC: 10096 IMAG | |
| 3939 | M00056150A:E04 | MA180:D03 | 0.82941 | | | |
| 3940 | M00056421C:H11 | MA173:F03 | | X60489 | gi\|31099\|emb\|X60489.1HSEF1B Human | 3.5E−228 |
| | | | | | mRNA for elongation factor-1-beta | |
| 3941 | M00056150C:A10 | MA180:F03 | | AL360191 | gi\|8919392\|emb\|AL360191.1HST000237 | 1.1E−237 |
| | | | | | Homo sapiens mRNA full length insert | |
| | | | | | cDNA clone EUROIMAGE 781354 | |
| 3942 | M00056421D:H05 | MA173:G03 | | BC017338 | gi\|16878283\|gb\|BC017338.1BC017338 | 1.1E−159 |
| | | | | | Homo sapiens, fucosidase, alpha-L-1, | |
| | | | | | tissue, clone MGC: 29579 | |
| | | | | | IMAGE: 4871788, mRNA, complete cds | |
| 3943 | M00056150C:C04 | MA180:G03 | | AJ276249 | gi\|7362984\|emb\|AJ276249.1HSA276249 | 1.3E−98 |
| | | | | | Homo sapiens partial mRNA, clone cl- | |
| | | | | | 10e16 | |
| 3944 | M00056422B:D11 | MA173:H03 | | BC001289 | gi\|12654890\|gb\|BC001289.1BC001289 | 1.9E−120 |
| | | | | | Homo sapiens, Sjogren syndrome antigen | |
| | | | | | B (autoantigen La), clone MGC: 5194 | |
| | | | | | IMAGE: 3454454, mRNA, co | |
| 3945 | M00056151C:A12 | MA180:H03 | | X59706 | gi\|34204\|emb\|X59706.1HSLA1L1IG | 1.5E−227 |
| | | | | | H. sapiens rearranged Humigla1L1 gene | |
| | | | | | encoding IgG light chain | |
| 3946 | M00056493C:E06 | MA173:A09 | | AF153608 | gi\|5231140\|gb\|AF153608.1AF153608 | 1.3E−280 |
| | | | | | Homo sapiens sin3 associated polypeptide | |
| | | | | | (SAP18) mRNA, complete cds | |
| 3947 | M00056205D:E03 | MA180:A09 | 0.78241 | | | |
| 3948 | M00056495A:G10 | MA173:B09 | | M63573 | gi\|337998\|gb\|M63573.1HUMSCYLP | 4.5E−100 |
| | | | | | Human secreted cyclophilin-like protein | |
| | | | | | (SCYLP) mRNA, complete cds | |
| 3949 | M00056206D:B10 | MA180:E09 | | AF001893 | gi\|2529723\|gb\|AF001893.1BETA2 Human | 1.1E−35 |
| | | | | | MEN1 region clone epsilon/beta mRNA, 3′ | |
| | | | | | fragment | |
| 3950 | M00056501D:C08 | MA173:H09 | | Y11339 | gi\|7576275\|emb\|Y11339.2HSY11339 | 1.9E−220 |
| | | | | | Homo sapiens mRNA for GalNAc alpha-2, | |
| | | | | | 6-sialyltransferase I, long form | |
| 3951 | M00056209D:H10 | MA180:H09 | 0.08151 | J03037 | gi\|179771\|gb\|J03037.1HUMCAIIA Human | 1.6E−258 |
| | | | | | carbonic anhydrase II mRNA, complete | |
| | | | | | cds | |
| 3952 | M00054645B:C12 | MA187:B03 | 0.18868 | BC008092 | gi\|14198047\|gb\|BC008092.1BC008092 | 7.3E−105 |
| | | | | | Homo sapiens, ribosomal protein, large, | |
| | | | | | P0, clone MGC: 9343 IMAGE: 3458803, | |
| | | | | | mRNA, complete cds | |
| 3953 | M00054646A:B10 | MA187:C03 | | BC007097 | gi\|13937968\|gb\|BC007097.1BC007097 | 5.2E−146 |
| | | | | | Homo sapiens, tissue inhibitor of | |
| | | | | | metalloproteinase 1 (erythroid potentiating | |
| | | | | | activity, collagena | |
| 3954 | M00054647D:E01 | MA187:G03 | | NM_001026 | gi\|14916502\|ref\|NM_001026.2 Homo | 6.4E−111 |
| | | | | | sapiens ribosomal protein S24 (RPS24), | |
| | | | | | transcript variant 2, mRNA | |
| 3955 | M00057202C:G06 | MA193:E03 | | | | |
| 3956 | M00057202D:C11 | MA193:F03 | | X71973 | gi\|311699\|emb\|X71973.1HSGPX4 | 1.3E−26 |
| | | | | | H. sapiens GPx-4 mRNA for phospholipid | |
| | | | | | hydroperoxide glutathione peroxidase | |
| 3957 | M00042549A:G12 | MA167:C03 | | AF153609 | gi\|5231142\|gb\|AF153609.1A1F153609 | 1.8E−120 |
| | | | | | Homo sapiens serine/threonine protein | |
| | | | | | kinase sgk mRNA, complete cds | |
| 3958 | M00042549D:F03 | MA167:D03 | | BC011025 | gi\|15029635\|gb\|BC011025.1BC011025 | 6.8E−34 |
| | | | | | Homo sapiens, Similar to sorcin, clone | |
| | | | | | MGC: 13597 IMAGE: 4281626, mRNA, | |
| | | | | | complete cds | |
| 3959 | M00042551B:D12 | MA167:E03 | | NM_002295 | gi\|9845501\|ref\|NM_002295.2 Homo | 8.3E−226 |
| | | | | | sapiens laminin receptor 1 (67 kD, | |
| | | | | | ribosomal protein SA) (LAMR1), mRNA | |
| 3960 | M00042513A:D03 | MA171:E03 | | NM_001002 | gi\|16933547\|ref\|NM_001002.2 Homo | 2.5E−266 |
| | | | | | sapiens ribosomal protein, large, P0 | |
| | | | | | (RPLP0), transcript variant 1, mRNA | |
| 3961 | M00042513D:A12 | MA171:F03 | 0.53205 | | | |
| 3962 | M00042551D:D12 | MA167:H03 | | Z48514 | gi\|695600\|emb\|Z48514.1HSXGR4551 | 2.8E−191 |
| | | | | | H. sapiens XG mRNA (clone R4(551)) | |
| 3963 | M00042717B:D05 | MA167:A09 | 0.47619 | X98311 | gi\|1524059\|emb\|X98311.1HSCGM2ANT | 1.1E−45 |
| | | | | | H. sapiens mRNA for carcinoembryonic | |
| | | | | | antigen family member 2, CGM2 | |
| 3964 | M00042719D:C09 | MA167:B09 | | L31792 | gi\|471076\|gb\|L31792.1HUMCGM2A | 4.2E−144 |
| | | | | | Homo sapiens carcinoembryonic antigen | |
| | | | | | (CGM2) mRNA, complete cds | |
| 3965 | M00042803C:F11 | MA171:C09 | | M31520 | gi\|337504\|gb\|M31520.1HUMRPS24A | 7.6E−120 |
| | | | | | Human ribosomal protein S24 mRNA | |
| 3966 | M00042805D:D12 | MA171:E09 | | BC004324 | gi\|13279235\|gb\|BC004324.1BC004324 | 2.4E−263 |
| | | | | | Homo sapiens, ribosomal protein S16, | |
| | | | | | clone MGC: 10931 IMAGE: 3628799, | |
| | | | | | mRNA, complete cds | |
| 3967 | M00042731A:G04 | MA167:F09 | | Z84867 | gi\|1834578\|emb\|Z84867.1HSZ84867 | 5.8E−113 |
| | | | | | H. sapiens Ig lambda light chain variable | |
| | | | | | region gene (14-09DPIA215) rearranged; | |
| | | | | | Ig-Light-Lambda; VL | |
| 3968 | M00042806C:E09 | MA171:G09 | 0.12055 | U16738 | gi\|608516\|gb\|U16738.1HSU16738 Homo | 1.4E−165 |
| | | | | | sapiens CAG-isl 7 mRNA, complete cds | |
| 3969 | M00042806D:F08 | MA171:H09 | | Y16241 | gi\|3378195\|emb\|Y16241.1HSY16241 | 3E−247 |
| | | | | | Homo sapiens mRNA for nebulette | |
| 3970 | M00056537A:F05 | MA174:C03 | | NM_021130 | gi\|10863926\|ref\|NM_021130.1 Homo | 5.1E−249 |
| | | | | | sapiens peptidylprolyl isomerase A | |
| | | | | | (cyclophilin A) (PPIA), mRNA | |
| 3971 | M00056537D:A07 | MA174:D03 | | BC019255 | gi\|17939424\|gb\|BC019255.1BC019255 | 2.3E−260 |
| | | | | | Homo sapiens, multifunctional polypeptide | |
| | | | | | similar to SAICAR synthetase and AIR | |
| | | | | | carboxylase, clone | |
| 3972 | RG:1862584:20001:G03 | MA139:G03 | 0.72829 | | | |
| 3973 | M00056585D:D05 | MA174:A09 | | BC007989 | gi\|14124931\|gb\|BC007989.1BC007989 | 1.3E−283 |
| | | | | | Homo sapiens, Similar to heat shock 90 kD | |
| | | | | | protein 1, alpha, clone IMAGE: 3030617, | |
| | | | | | mRNA, partial cds | |
| 3974 | M00056586C:B08 | MA174:B09 | | BC013873 | gi\|15530196\|gb\|BC013873.1BC013873 | 1.2E−184 |
| | | | | | Homo sapiens, Similar to centrin, EF-hand | |
| | | | | | protein, 2, clone MGC: 10365 | |
| | | | | | IMAGE: 3836808, mRNA, comple | |
| 3975 | M00056592A:B08 | MA174:E09 | | AB018580 | gi\|6624210\|dbj\|AB018580.1AB018580 | 7.8E−251 |
| | | | | | Homo sapiens mRNA for hluPGFS, | |
| | | | | | complete cds | |
| 3976 | RG:378550:10009:C03 | MA158:C03 | | | | |
| 3977 | RG:789040:10011:F09 | MA160:F09 | | M14676 | gi\|338227\|gb\|M14676.1HUMSLK Human | 1E−300 |
| | | | | | src-like kinase (slk) mRNA, complete cds | |
| 3978 | M00057283A:D01 | MA182:B03 | | AF283772 | gi\|10281741\|gb\|AF283772.2AF283772 | 2.5E−266 |
| | | | | | Homo sapiens clone TCBAP0781 mRNA | |
| | | | | | sequence | |
| 3979 | M00043505A:E07 | MA184:D03 | | NM_007209 | gi\|16117792\|ref\|NM_007209.2 Homo | 5.5E−258 |
| | | | | | sapiens ribosomal protein L35 (RPL35), | |
| | | | | | mRNA | |
| 3980 | M00043506B:G10 | MA184:G03 | | BC007945 | gi\|14044036\|gb\|BC007945.1BC007945 | 1E−197 |
| | | | | | Homo sapiens, ribosomal protein S11, | |
| | | | | | clone MGC: 14322 IMAGE: 4297932, | |
| | | | | | mRNA, complete cds | |
| 3981 | M00043507A:B02 | MA184:H03 | | | | |
| 3982 | M00042353C:F02 | MA182:A09 | | NM_001015 | gi\|14277698\|ref\|NM_001015.2 Homo | 3.4E−256 |
| | | | | | sapiens ribosomal protein S11 (RPS11), | |
| | | | | | mRNA | |
| 3983 | M00054516B:A08 | MA184:F09 | | BC004459 | gi\|13325289\|gb\|BC004459.1BC004459 | 5E−280 |
| | | | | | Homo sapiens, eukaryotic translation | |
| | | | | | initiation factor 4E binding protein 1, clone | |
| | | | | | MGC: 4316 IMAGE | |
| 3984 | M00054986D:B04 | MA198:A09 | | AJ131712 | gi\|7576251\|emb\|AJ131712.1HSA131712 | 1.2E−168 |
| | | | | | Homo sapiens mRNA for nucleolar RNA- | |
| | | | | | helicase (noH61 gene) | |
| 3985 | M00054987C:B10 | MA198:B09 | 0.09792 | AF097362 | gi\|6165617\|gb\|AF097362.1AF097362 | 9.1E−139 |
| | | | | | Homo sapiens gamma-interferon inducible | |
| | | | | | lysosomal thiol reductase (GILT) mRNA, | |
| | | | | | complete cds | |
| 3986 | M00054988D:B11 | MA198:C09 | | BC019051 | gi\|17403061\|gb\|BC019051.1BC019051 | 1.8E−192 |
| | | | | | Homo sapiens, clone IMAGE: 4636237, | |
| | | | | | mRNA | |
| 3987 | M00055743C:G08 | MA170:E03 | | BC018970 | gi\|17512000\|gb\|BC018970.1BC018970 | 2.8E−216 |
| | | | | | Homo sapiens, ribosomal protein L11, | |
| | | | | | clone MGC: 19586 IMAGE: 4337066, | |
| | | | | | mRNA, complete cds | |
| 3988 | M00055196B:C09 | MA196:D03 | | BC018755 | gi\|17511806\|gb\|BC018755.1BC018755 | 6.7E−242 |
| | | | | | Homo sapiens, PDZ and LIM domain 1 | |
| | | | | | (elfin), clone MGC: 31954 | |
| | | | | | IMAGE: 3610938, mRNA, complete cds | |
| 3989 | M00055238B:G05 | MA196:B09 | | NM_012423 | gi\|14591905\|ref\|NM_012423.2 Homo | 3.8E−206 |
| | | | | | sapiens ribosomal protein L13a (RPL13A), | |
| | | | | | mRNA | |
| 3990 | M00056207B:H06 | MA180:G09 | 0.89703 | | | |
| 3991 | M00055966C:G04 | MA179:A03 | | BC008492 | gi\|14250147\|gb\|BC008492.1BC008492 | 8.2E−282 |
| | | | | | Homo sapiens, ribosomal protein L3, clone | |
| | | | | | MGC: 14821 IMAGE: 4251511, mRNA, | |
| | | | | | complete cds | |
| 3992 | M00056920D:C08 | MA177:A03 | | BC014301 | gi\|15679985\|gb\|BC014301.1BC014301 | 8.8E−204 |
| | | | | | Homo sapiens, Similar to enhancer of | |
| | | | | | rudimentary (Drosophila) homolog, clone | |
| | | | | | MGC: 1509 IMAGE: 35072 | |
| 3993 | M00055969D:D01 | MA179:C03 | 0.16904 | X73501 | gi\|402644\|emb\|X73501.1HSCYTOK20 | 4E−225 |
| | | | | | H. sapiens gene for cytokeratin 20 | |
| 3994 | M00056055D:F06 | MA179:E09 | | AY011168 | gi\|12699140\|gb\|AY011168.1 Homo | 5.4E−149 |
| | | | | | sapiens 16S ribosomal RNA gene, partial | |
| | | | | | sequence; mitochondrial gene for | |
| | | | | | mitochondrial product | |
| 3995 | M00056956B:G12 | MA177:E09 | 0.87013 | | | |
| 3996 | M00056060D:C04 | MA179:F09 | | V00710 | gi\|13683\|emb\|V00710.1MIT1HS Human | 4E−184 |
| | | | | | mitochondrial genes for several tRNAs | |
| | | | | | (Phe, Val, Leu) and 12S and 16S ribosomal | |
| | | | | | RNAs | |
| 3997 | M00056061C:H04 | MA179:G09 | | U14528 | gi\|549987\|gb\|U14528.1HSU14528 Human | 3.4E−219 |
| | | | | | sulfate transporter (DTD) mRNA, | |
| | | | | | complete cds | |
| 3998 | M00054743C:E05 | MA188:A03 | | BC001603 | gi\|12804402\|gb\|BC001603.1BC001603 | 2.3E−179 |
| | | | | | Homo sapiens, Similar to ribosomal | |
| | | | | | protein L21, clone MGC: 2150 | |
| | | | | | IMAGE: 3543702, mRNA, complete cds | |
| 3999 | M00054744C:B02 | MA188:B03 | | NM_033643 | gi\|16117795\|ref\|NM_033643.1 Homo | 6.2E−92 |
| | | | | | sapiens ribosomal protein L36 (RPL36), | |
| | | | | | transcript variant 1, mRNA | |
| 4000 | M00054808A:E02 | MA188:C09 | | BC003030 | gi\|12804340\|gb\|BC003030.1BC003030 | 5.5E−174 |
| | | | | | Homo sapiens, heat shock 60 kD protein 1 | |
| | | | | | (chaperonin), clone MGC: 4335 | |
| | | | | | IMAGE: 2821157, mRNA, complet | |
| 4001 | M00054811A:G01 | MA188:G09 | | X90583 | gi\|1071680\|emb\|X90583.1HSRNATRAP | 3.9E−184 |
| | | | | | H. sapiens mRNA for rat translocon- | |
| | | | | | associated protein delta homolog | |
| 4002 | M00054797C:G10 | MA168:A03 | | BC004983 | gi\|13436415\|gb\|BC004983.1BC004983 | 2.1E−148 |
| | | | | | Homo sapiens, nuclear factor of kappa | |
| | | | | | light polypeptide gene enhancer in B-cells | |
| | | | | | inhibitor, alpha | |
| 4003 | M00042843B:H01 | MA172:A03 | | AF068754 | gi\|3283408\|gb\|AF068754.1AF068754 | 7.8E−139 |
| | | | | | Homo sapiens heat shock factor binding | |
| | | | | | protein 1 HSBP1 mRNA, complete cds | |
| 4004 | M00042844D:D10 | MA172:D03 | | BC000483 | gi\|12653424\|gb\|BC000483.1BC000483 | 2.3E−232 |
| | | | | | Homo sapiens, clone MGC: 8704 | |
| | | | | | IMAGE: 2964733, mRNA, complete cds | |
| 4005 | M00042845D:A12 | MA172:E03 | | BC008329 | gi\|14249899\|gb\|BC008329.1BC008329 | 8.5E−229 |
| | | | | | Homo sapiens, clone MGC: 15787 | |
| | | | | | IMAGE: 3504130, mRNA, complete cds | |
| 4006 | M00054800C:H10 | MA168:G03 | | Z85052 | gi\|1834763\|emb\|Z85052.1HSZ85052 | 9E−167 |
| | | | | | H. sapiens Ig lambda light chain variable | |
| | | | | | region gene (26-34ITIIIF120) rearranged; | |
| | | | | | Ig-Light-Lambda; | |
| 4007 | M00054911D:E09 | MA168:H03 | | NM_000969 | gi\|14591908\|ref\|NM_000969.2 Homo | 7.2E−217 |
| | | | | | sapiens ribosomal protein L5 (RPL5), | |
| | | | | | mRNA | |
| 4008 | M00055450A:G03 | MA168:A09 | 0.09821 | AF074331 | gi\|5052074\|gb\|AF074331.1AF074331 | 6.8E−152 |
| | | | | | Homo sapiens PAPS synthetase-2 | |
| | | | | | (PAPSS2) mRNA, complete cds | |
| 4009 | M00055456B:H05 | MA168:D09 | 0.79701 | | | |
| 4010 | M00056733C:D03 | MA175:D03 | | X97336 | gi\|1666193\|emb\|X97336.1RUMTGENOM | 3.1E−72 |
| | | | | | Rhinoceros unicornis complete | |
| | | | | | mitochondrial genome | |
| 4011 | M00056737D:E08 | MA175:H03 | | D11094 | gi\|219930\|dbj\|D11094.1HUMMSS1 | 5.9E−230 |
| | | | | | Human mRNA for MSS1, complete cds | |
| 4012 | M00056809B:A12 | MA175:E09 | | L42345 | gi\|1160933\|gb\|L42345.1HUMHLAB44A | 6E−152 |
| | | | | | Homo sapiens lymphocyte antigen HLA- | |
| | | | | | B*4402 and HLA-B*5101 mRNA, exons | |
| | | | | | 1-7, complete cds | |
| 4013 | M00056809D:C07 | MA175:G09 | | J03801 | gi\|187243\|gb\|J03801.1HUMLSZ Human | 9.3E−207 |
| | | | | | lysozyme mRNA, complete cds with an | |
| | | | | | Alu repeat in the 3′ flank | |
| 4014 | RG:1664308:10014:F09 | MA163:F09 | | AF011497 | gi\|2286216\|gb\|AF011497.1AF011497 | 0 |
| | | | | | Homo sapiens guanine nucleotide binding | |
| | | | | | protein alpha 11 subunit (G11) mRNA, | |
| | | | | | complete cds | |
| 4015 | M00043321A:G07 | MA183:B03 | | D49400 | gi\|1395161\|dbj\|D49400.1HUMVATPASE | 5.1E−280 |
| | | | | | Homo sapiens mRNA for vacuolar | |
| | | | | | ATPase, complete cds | |
| 4016 | M00054549A:F03 | MA185:C03 | 0.84052 | | | |
| 4017 | M00043381A:C08 | MA183:D09 | | NM_001012 | gi\|4506742\|ref\|NM_001012.1 Homo | 1.1E−231 |
| | | | | | sapiens ribosomal protein S8 (RPS8), | |
| | | | | | mRNA | |
| 4018 | M00056642B:G03 | MA186:A03 | | BC010952 | gi\|15012094\|gb\|BC010952.1BC010952 | 1E−300 |
| | | | | | Homo sapiens, Similar to protease inhibitor | |
| | | | | | 3, skin-derived (SKALP), clone | |
| | | | | | MGC: 13613 IMAGE: 408315 | |
| 4019 | M00056688C:A07 | MA186:H09 | | D13748 | gi\|219402\|dbj\|D13748.1HUM4AI Human | 1E−300 |
| | | | | | mRNA for eukaryotic initiation factor 4AI | |
| 4020 | M00056257C:G03 | MA181:A04 | | AK054673 | gi\|16549265\|dbj\|AK054673.1AK054673 | 3.6E−228 |
| | | | | | Homo sapiens cDNA FL130111 fis, clone | |
| | | | | | BNGH42000360, highly similar to 3- | |
| | | | | | KETOACYL-COA THIOLASE MI | |
| 4021 | M00055545C:F11 | MA169:G04 | | AY029066 | gi\|14017398\|gb\|AY029066.1 Homo | 1.4E−258 |
| | | | | | sapiens Humanin (HN1) mRNA, complete | |
| | | | | | cds | |
| 4022 | M00055653C:F04 | MA169:C10 | | M10050 | gi\|182355\|gb\|M10050.1HUMFABPL | 5E−224 |
| | | | | | Human liver fatty acid binding protein | |
| | | | | | (FABP) mRNA, complete cds | |
| 4023 | M00055653D:F01 | MA169:D10 | | M10050 | gi\|182355\|gb\|M10050.1HUMFABPL | 1.9E−167 |
| | | | | | Human liver fatty acid binding protein | |
| | | | | | (FABP) mRNA, complete cds | |
| 4024 | M00055385A:C11 | MA197:B10 | | BC013231 | gi\|15301504\|gb\|BC013231.1BC013231 | 2.9E−244 |
| | | | | | Homo sapiens, clone IMAGE: 3462987, | |
| | | | | | mRNA | |
| 4025 | M00056157A:F11 | MA180:D04 | | X74104 | gi\|452756\|emb\|X74104.1HSSSR H. sapiens | 4.5E−274 |
| | | | | | mRNA for TRAP beta subunit | |
| 4026 | M00056160A:F03 | MA180:E04 | 0.89209 | | | |
| 4027 | M00056426A:H07 | MA173:F04 | 0.49541 | | | |
| 4028 | M00056214C:B04 | MA180:C10 | | Y00339 | gi\|29586\|emb\|Y00339.1HSCA2 Human | 3E−222 |
| | | | | | mRNA for carbonic anhydrase II (EC | |
| | | | | | 4.2.1.1) | |
| 4029 | M00056216A:F10 | MA180:D10 | 0.75335 | | | |
| 4030 | M00056507A:G11 | MA173:G10 | 0.71615 | | | |
| 4031 | M00054648C:C10 | MA187:A04 | | BC004113 | gi\|13278665\|gb\|BC004113.1BC004113 | 1.6E−236 |
| | | | | | Homo sapiens, Similar to non-POU- | |
| | | | | | domain-containing, octamer-binding, clone | |
| | | | | | IMAGE: 3835400, mRNA, p | |
| 4032 | M00054862A:H11 | MA189:A04 | 0.60181 | | | |
| 4033 | M00054648D:F12 | MA187:B04 | | BC001118 | gi\|12654566\|gb\|BC001118.1BC001118 | 1.5E−289 |
| | | | | | Homo sapiens, Similar to seven | |
| | | | | | transmembrane domain protein, clone | |
| | | | | | MGC: 1936 IMAGE: 2989840, mRNA, | |
| 4034 | M00054650C:H08 | MA187:D04 | | AB026723 | gi\|5931601\|dbj\|AB026723.1AB026723 | 1.6E−295 |
| | | | | | Homo sapiens SID6-8061 mRNA for | |
| | | | | | pyrophosphatase, complete cds | |
| 4035 | M00054868C:C11 | MA189:H04 | 0.09703 | | | |
| 4036 | M00054700C:E02 | MA187:D10 | | BC000530 | gi\|12653516\|gb\|BC000530.1BC000530 | 2.9E−244 |
| | | | | | Homo sapiens, ribosomal protein L19, | |
| | | | | | clone MGC: 8653 IMAGE: 2961653, | |
| | | | | | mRNA, complete cds | |
| 4037 | M00054902D:G11 | MA189:F10 | 0.71088 | | | |
| 4038 | M00054903B:G06 | MA189:G10 | | BC013231 | gi\|15301504\|gb\|BC013231.1BC013231 | 1.1E−240 |
| | | | | | Homo sapiens, clone IMAGE: 3462987, | |
| | | | | | mRNA | |
| 4039 | M00054706A:D05 | MA187:H10 | | AB060236 | gi\|13676490\|dbj\|AB060236.1AB060236 | 6.9E−71 |
| | | | | | Macaca fascicularis brain cDNA | |
| | | | | | clone: QflA-11918, full insert sequence | |
| 4040 | M00057207A:D05 | MA193:C04 | | AF127763 | gi\|6138993\|gb\|AF127763.2AF127763 | 2.7E−297 |
| | | | | | Homo sapiens mitogenic oxidase mRNA, | |
| | | | | | complete cds | |
| 4041 | M00057207C:F06 | MA193:D04 | | BC016756 | gi\|16876963\|gb\|BC016756.1BC016756 | 9.4E−291 |
| | | | | | Homo sapiens, glutathione peroxidase 2 | |
| | | | | | (gastrointestinal), clone IMAGE: 3681457, | |
| | | | | | mRNA | |
| 4042 | M00057208B:F11 | MA193:F04 | | X60489 | gi\|31099\|emb\|X60489.1HSEF1B Human | 8E−279 |
| | | | | | mRNA for elongation factor-1-beta | |
| 4043 | M00057242B:B10 | MA193:C10 | | J03464 | gi\|179595\|gb\|J03464.1HUMC1A2 Human | 2.1E−282 |
| | | | | | collagen alpha-2 type I mRNA, complete | |
| | | | | | cds, clone pHCOL2A1 | |
| 4044 | M00042555A:E06 | MA167:C04 | 0.79249 | | | |
| 4045 | M00042561A:H03 | MA167:D04 | | AK057546 | gi\|16553292\|dbj\|AK057546.1AK057546 | 3.1E−278 |
| | | | | | Homo sapiens cDNA FLJ32984 fis, clone | |
| | | | | | THYMU1000017, highly similar to Homo | |
| | | | | | sapiens splice varian | |
| 4046 | M00042756C:E10 | MA171:E04 | | NM_005348 | gi\|13129149\|ref\|NM_005348.1 Homo | 3E−222 |
| | | | | | sapiens heat shock 90 kD protein 1, alpha | |
| | | | | | (HSPCA), mRNA | |
| 4047 | M00042758D:F01 | MA171:F04 | | NM_000969 | gi\|14591908\|ref\|NM_000969.2 Homo | 3.7E−259 |
| | | | | | sapiens ribosomal protein L5 (RPL5), | |
| | | | | | mRNA | |
| 4048 | M00042759B:E02 | MA171:H04 | | BC000077 | gi\|12652658\|gb\|BC000077.1BC000077 | 5.1E−252 |
| | | | | | Homo sapiens, ribosomal protein L8, clone | |
| | | | | | MGC: 3253 IMAGE: 3506015, mRNA, | |
| | | | | | complete cds | |
| 4049 | M00042808D:D03 | MA171:B10 | | AB048207 | gi\|15425668\|dbj\|AB048207.1AB048207 | 2.2E−257 |
| | | | | | Homo sapiens mRNA for TIGA1, | |
| | | | | | complete cds | |
| 4050 | M00042808D:D10 | MA171:C10 | | AK026166 | gi\|10438929\|dbj\|AK026166.1AK026166 | 9.5E−263 |
| | | | | | Homo sapiens cDNA: FLJ22513 fis, clone | |
| | | | | | HRC12111, highly similar to HUMKUP | |
| | | | | | Human Ku (p70/p80) sub | |
| 4051 | M00042811B:A05 | MA171:D10 | | AK027191 | gi\|10440260\|dbj\|AK027191.1AK027191 | 1.6E−121 |
| | | | | | Homo sapiens cDNA: FLJ23538 fis, clone | |
| | | | | | LNG08010, highly similar to BETA2 | |
| | | | | | Human MEN1 region clone | |
| 4052 | M00042746B:F05 | MA167:E10 | | AK026528 | gi\|10439405\|dbj\|AK026528.1AK026528 | 1.6E−77 |
| | | | | | Homo sapiens cDNA: FLJ22875 fis, clone | |
| | | | | | KAT02879 | |
| 4053 | M00042746C:D01 | MA167:G10 | | BC000551 | gi\|12653554\|gb\|BC000551.1BC000551 | 5E−128 |
| | | | | | Homo sapiens, lysophospholipase-like, | |
| | | | | | clone MGC: 1216 IMAGE: 3163689, | |
| | | | | | mRNA, complete cds | |
| 4054 | M00042812D:B04 | MA171:G10 | | NM_000978 | gi\|14591907\|ref\|NM_000978.2 Homo | 3.5E−256 |
| | | | | | sapiens ribosomal protein L23 (RPL23), | |
| | | | | | mRNA | |
| 4055 | M00056546B:F12 | MA174:A04 | | AK026570 | gi\|10439452\|dbj\|AK026570.1AK026570 | 2.1E−226 |
| | | | | | Homo sapiens cDNA: FLJ22917 fis, clone | |
| | | | | | KAT06430 | |
| 4056 | M00056550A:G09 | MA174:H04 | | X14420 | gi\|30057\|emb\|X14420.1HSCOL3AI | 5.1E−165 |
| | | | | | Human mRNA for pro-alpha-1 type 3 | |
| | | | | | collagen | |
| 4057 | M00056610C:B08 | MA174:G10 | | D87667 | gi\|1620019\|dbj\|D87667.1D87667 Human | 1.4E−199 |
| | | | | | brain mRNA homologous to 3′UTR of | |
| | | | | | human CD24 gene, partial sequence | |
| 4058 | RG:745556:10011:B04 | MA160:B04 | | AK056676 | gi\|16552146\|dbj\|AK056676.1AK056676 | 8.7E−227 |
| | | | | | Homo sapiens cDNA FLJ32114 fis, clone | |
| | | | | | OCBBF2001706 | |
| 4059 | RG:446537:10009:G04 | MA158:G04 | | BC001430 | gi\|12655150\|gb\|BC001430.1BC001430 | 0 |
| | | | | | Homo sapiens, POP7 (processing of | |
| | | | | | precursor, S. cerevisiae) homolog, clone | |
| | | | | | MGC: 1986 IMAGE: 3138336 | |
| 4060 | RG:375937:10009:B10 | MA158:B10 | | BC010153 | gi\|14603405\|gb\|BC010153.1BC010153 | 1.1E−77 |
| | | | | | Homo sapiens, cyclin-dependent kinase 4, | |
| | | | | | clone MGC: 19704 IMAGE: 3531300, | |
| | | | | | mRNA, complete cds | |
| 4061 | RG:755120:10011:B10 | MA160:B10 | | BC016725 | gi\|16876888\|gb\|BC016725.1BC016725 | 3.5E−52 |
| | | | | | Homo sapiens, 60S ribosomal protein L30 | |
| | | | | | isolog, clone MGC: 24451 | |
| | | | | | IMAGE: 4078305, mRNA, complete cds | |
| 4062 | RG:781108:10011:D10 | MA160:D10 | | | | |
| 4063 | M00042450C:H10 | MA182:A10 | | S56985 | gi\|298485\|gb\|S56985.1S56985 ribosomal | 1.4E−258 |
| | | | | | protein L19 [human, breast cancer cell line, | |
| | | | | | MCF-7, mRNA, 690 nt] | |
| 4064 | M00042451B:B05 | MA182:B10 | | BC013231 | gi\|15301504\|gb\|BC013231.1BC013231 | 1.7E−239 |
| | | | | | Homo sapiens, clone IMAGE: 3462987, | |
| | | | | | mRNA | |
| 4065 | M00054517D:D12 | MA184:B10 | | NM_000661 | gi\|15431302\|ref\|NM_000661.2 Homo | 1E−156 |
| | | | | | sapiens ribosomal protein L9 (RPL9), | |
| | | | | | mRNA | |
| 4066 | M00055002B:G06 | MA198:D10 | | J04164 | gi\|177801\|gb\|J04164.1HUM927A Human | 1.5E−177 |
| | | | | | interferon-inducible protein 9-27 mRNA, | |
| | | | | | complete cds | |
| 4067 | M00055749A:C09 | MA170:B04 | 0.08723 | M36532 | gi\|179794\|gb\|M36532.1HUMCAIZ Human | 1.8E−236 |
| | | | | | carbonic anhydrase II mRNA, complete | |
| | | | | | cds | |
| 4068 | M00055750A:F10 | MA170:D04 | | X57809 | gi\|33714\|emb\|X57809.1HSIGVL009 | 4.1E−178 |
| | | | | | Human rearranged immunoglobulin | |
| | | | | | lambda light chain mRNA | |
| 4069 | M00055757A:H06 | MA170:G04 | | M12759 | gi\|532596\|gb\|M12759.1HUMIGJ02 | 2.6E−104 |
| | | | | | Human Ig J chain gene, exons 3 and 4 | |
| 4070 | M00055200B:F03 | MA196:D04 | | AK056446 | gi\|16551850\|dbj\|AK056446.1AK056446 | 2.3E−232 |
| | | | | | Homo sapiens cDNA FLJ31884 fis, clone | |
| | | | | | NT2RP7002906, highly similar to HEAT | |
| | | | | | SHOCK PROTEIN HSP 90- | |
| 4071 | M00055203B:F05 | MA196:F04 | | NM_000979 | gi\|15431298\|ref\|NM_000979.2 Homo | 3.8E−262 |
| | | | | | sapiens ribosomal protein L18 (RPL18), | |
| | | | | | mRNA | |
| 4072 | M00055980B:F12 | MA179:E04 | | AK000140 | gi\|7020034\|dbj\|AK000140.1AK000140 | 6.8E−270 |
| | | | | | Homo sapiens cDNA FLJ20133 fis, clone | |
| | | | | | COL06539 | |
| 4073 | M00056066C:H10 | MA179:B10 | 0.89137 | | | |
| 4074 | M00056067B:F12 | MA179:C10 | | BC011836 | gi\|15080121\|gb\|BC011836.1BC011836 | 7.1E−273 |
| | | | | | Homo sapiens, clone IMAGE: 3945177, | |
| | | | | | mRNA | |
| 4075 | M00056075D:H10 | MA179:D10 | | AK027140 | gi\|10440192\|dbj\|AK027140.1AK027140 | 3.3E−200 |
| | | | | | Homo sapiens cDNA: FLJ23487 fis, clone | |
| | | | | | LNG00423 | |
| 4076 | M00056962D:A05 | MA177:D10 | | BC017366 | gi\|16924194\|gb\|BC017366.1BC017366 | 2.4E−91 |
| | | | | | Homo sapiens, clone MGC: 1191 | |
| | | | | | IMAGE: 3506054, mRNA, complete cds | |
| 4077 | M00056081D:B09 | MA179:E10 | | AF346964 | gi\|13272570\|gb\|AF346964.1AF346964 | 1.9E−93 |
| | | | | | Homo sapiens mitochondrion, complete | |
| | | | | | genome | |
| 4078 | M00056963A:E01 | MA177:E10 | | BC000999 | gi\|12803040\|gb\|BC000999.2BC000999 | 1.9E−276 |
| | | | | | Homo sapiens, Similar to transforming, | |
| | | | | | acidic coiled-coil containing protein 2, | |
| | | | | | clone IMAGE: 29849 | |
| 4079 | M00056081D:C02 | MA179:F10 | | V00710 | gi\|13683\|emb\|V00710.1MIT1HS Human | 1.3E−97 |
| | | | | | mitochondrial genes for several tRNAs | |
| | | | | | (Phe, Val, Leu) and 12S and 16S ribosomal | |
| | | | | | RNAs | |
| 4080 | M00056964D:C08 | MA177:G10 | | M36072 | gi\|337494\|gb\|M36072.1HUMRPL7A | 1.8E−245 |
| | | | | | Human ribosomal protein L7a (surf 3) | |
| | | | | | large subunit mRNA, complete cds | |
| 4081 | M00056084A:B08 | MA179:H10 | | U67963 | gi\|1763010\|gb\|U67963.1HSU67963 | 2.3E−136 |
| | | | | | Human lysophospholipase homolog (HU- | |
| | | | | | K5) mRNA, complete cds | |
| 4082 | M00054750C:G08 | MA188:B04 | | BC001125 | gi\|12654578\|gb\|BC001125.1BC001125 | 1.1E−190 |
| | | | | | Homo sapiens, peptidylprolyl isomerase B | |
| | | | | | (cyclophilin B), clone MGC: 2224 | |
| | | | | | IMAGE: 2966791, mRNA, com | |
| 4083 | M00054750D:F04 | MA188:C04 | | U30246 | gi\|903681\|gb\|U30246.1HSU30246 Human | 3E−247 |
| | | | | | bumetanide-sensitive Na-K-Cl | |
| | | | | | cotransporter (NKCC1) mRNA, complete | |
| | | | | | cds | |
| 4084 | M00054757A:F05 | MA188:G04 | | U86602 | gi\|1835785\|gb\|U86602.1HSU86602 | 1E−300 |
| | | | | | Human nucleolar protein p40 mRNA, | |
| | | | | | complete cds | |
| 4085 | M00054760D:B10 | MA188:H04 | | BC014788 | gi\|15928638\|gb\|BC014788.1BC014788 | 1E−300 |
| | | | | | Homo sapiens, guanine nucleotide binding | |
| | | | | | protein (G protein), beta polypeptide 2-like | |
| | | | | | 1, clone MG | |
| 4086 | M00042847A:A04 | MA172:A04 | | M61831 | gi\|178276\|gb\|M61831.1HUMAHCY | 5.5E−230 |
| | | | | | Human S-adenosylhomocysteine hydrolase | |
| | | | | | (AHCY) mRNA, complete cds | |
| 4087 | M00042847A:D10 | MA172:B04 | 0.82393 | | | |
| 4088 | M00054917B:G02 | MA168:F04 | | J04164 | gi\|177801\|gb\|J04164.1HUM927A Human | 6.4E−239 |
| | | | | | interferon-inducible protein 9-27 mRNA, | |
| | | | | | complete cds | |
| 4089 | M00055468D:D05 | MA168:C10 | | BC001781 | gi\|12804704\|gb\|BC001781.1BC001781 | 2.2E−173 |
| | | | | | Homo sapiens, ribosomal protein L44, | |
| | | | | | clone MGC: 2064 IMAGE: 3353669, | |
| | | | | | mRNA, complete cds | |
| 4090 | M00055469B:E11 | MA168:D10 | 0.52048 | U07969 | gi\|483391\|gb\|U07969.1HSU07969 Human | 7.2E−103 |
| | | | | | intestinal peptide-associated transporter | |
| | | | | | HPT-1 mRNA, complete cds | |
| 4091 | M00055492C:C01 | MA168:G10 | | BC003394 | gi\|13097278\|gb\|BC003394.1BC003394 | 3.2E−253 |
| | | | | | Homo sapiens, heterogeneous nuclear | |
| | | | | | ribonucleoprotein C (C1/C2), clone | |
| | | | | | MGC: 5418 IMAGE: 3447724, mR | |
| 4092 | M00055496A:E06 | MA168:H10 | 0.86834 | | | |
| 4093 | M00056742D:D01 | MA175:F04 | | U51924 | gi\|1263307\|gb\|U51924.1HSU51924 | 1.3E−199 |
| | | | | | Human phosphatase 2A inhibitor I2PP2A | |
| | | | | | mRNA, complete cds | |
| 4094 | M00056814D:C08 | MA175:G10 | | BC000472 | gi\|12653404\|gb\|BC000472.1BC000472 | 2.4E−291 |
| | | | | | Homo sapiens, ribosomal protein S4, X- | |
| | | | | | linked, clone MGC: 8636 | |
| | | | | | IMAGE: 2961540, mRNA, complete cds | |
| 4095 | RG:1636303:10014:B10 | MA163:B10 | | AJ338808 | gi\|15883226\|emb\|AJ338808.1HSA338808 | 0 |
| | | | | | Homo sapiens genomic sequence | |
| | | | | | surrounding NotI site, clone NR1-QA13R | |
| 4096 | RG:1643142:10014:C10 | MA163:C10 | | U14528 | gi\|549987\|gb\|U14528.1HSU14528 Human | 5.6E−138 |
| | | | | | sulfate transporter (DTD) mRNA, | |
| | | | | | complete cds | |
| 4097 | RG:1650444:10014:D10 | MA163:D10 | | D10040 | gi\|219899\|dbj\|D10040.1HUMLCACS | 0 |
| | | | | | Homo sapiens mRNA for long-chain acyl- | |
| | | | | | CoA synthetase, complete cds | |
| 4098 | RG:1418984:10003:H10 | MA152:H10 | | X52967 | gi\|36139\|emb\|X52967.1HSRPL7 Human | 1E−300 |
| | | | | | mRNA for ribosomal protein L7 | |
| 4099 | M00043339C:C12 | MA183:A04 | | X60489 | gi\|31099\|emb\|X60489.1HSEF1B Human | 7E−270 |
| | | | | | mRNA for elongation factor-1-beta | |
| 4100 | M00043342C:H03 | MA183:B04 | | AK026558 | gi\|10439440\|dbj\|AK026558.1AK026558 | 4.1E−159 |
| | | | | | Homo sapiens cDNA: FLJ22905 fis, clone | |
| | | | | | KAT05654, highly similar to | |
| | | | | | HUMRPL18A Homo sapiens riboso | |
| 4101 | M00043350A:C04 | MA183:D04 | | BC004324 | gi\|13279235\|gb\|BC004324.1BC004324 | 3.7E−231 |
| | | | | | Homo sapiens, ribosomal protein S16, | |
| | | | | | clone MGC: 10931 IMAGE: 3628799, | |
| | | | | | mRNA, complete cds | |
| 4102 | M00056646D:G05 | MA186:B04 | | BC018190 | gi\|17390422\|gb\|BC018190.1BC018190 | 3.4E−172 |
| | | | | | Homo sapiens, Similar to metallothionein | |
| | | | | | 1L, clone MGC: 9187 IMAGE: 3859643, | |
| | | | | | mRNA, complete cds | |
| 4103 | M00055406C:H08 | MA199:D04 | | AF078861 | gi\|5531836\|gb\|AF078861.1AF078861 | 1.8E−192 |
| | | | | | Homo sapiens PTD008 mRNA, complete | |
| | | | | | cds | |
| 4104 | M00056653C:F06 | MA186:H04 | | BC005354 | gi\|13529169\|gb\|BC005354.1BC005354 | 1.6E−264 |
| | | | | | Homo sapiens, ribosomal protein, large P2, | |
| | | | | | clone MGC: 12453 IMAGE: 4052568, | |
| | | | | | mRNA, complete cds | |
| 4105 | M00055408A:H06 | MA199:H04 | | AF054183 | gi\|4092053\|gb\|AF054183.1AF054183 | 1E−187 |
| | | | | | Homo sapiens GTP binding protein | |
| | | | | | mRNA, complete cds | |
| 4106 | M00055545D:E02 | MA169:A05 | | BC009699 | gi\|16307220\|gb\|BC009699.1BC009699 | 5E−224 |
| | | | | | Homo sapiens, Similar to RNA helicase- | |
| | | | | | related protein, clone MGC: 9246 | |
| | | | | | IMAGE: 3892441, mRNA, comple | |
| 4107 | M00055548B:H07 | MA169:C05 | | AF105253 | gi\|7532779\|gb\|AF105253.1AF105253 | 4.2E−268 |
| | | | | | Homo sapiens neuroendocrine secretory | |
| | | | | | protein 55 mRNA, complete cds | |
| 4108 | M00056271C:F02 | MA181:D05 | | BC008323 | gi\|14249887\|gb\|BC008323.1BC008323 | 5.8E−202 |
| | | | | | Homo sapiens, clone MGC: 15764 | |
| | | | | | IMAGE: 3358085, mRNA, complete cds | |
| 4109 | M00055550D:A05 | MA169:F05 | | AF130094 | gi\|11493492\|gb\|AF130094.1AF130094 | 3.4E−225 |
| | | | | | Homo sapiens clone FLC0165 mRNA | |
| | | | | | sequence | |
| 4110 | M00055661A:F09 | MA169:E11 | | | | |
| 4111 | M00056427D:A09 | MA173:B05 | | U07550 | gi\|469170\|gb\|U07550.1HSU07550 Human | 2E−145 |
| | | | | | chaperonin 10 mRNA, complete cds | |
| 4112 | M00056163C:H09 | MA180:B05 | | AF201944 | gi\|9295191\|gb\|AF201944.1AF201944 | 2.2E−285 |
| | | | | | Homo sapiens HGTD-P (HGTD-P) | |
| | | | | | mRNA, complete cds | |
| 4113 | M00056428B:F07 | MA173:C05 | | U30246 | gi\|903681\|gb\|U30246.1HSU30246 Human | 9.7E−126 |
| | | | | | bumetanide-sensitive Na—K—Cl | |
| | | | | | cotransporter (NKCC1) mRNA, complete | |
| | | | | | cds | |
| 4114 | M00056163D:E01 | MA180:C05 | | BC001829 | gi\|12804776\|gb\|BC001829.1BC001829 | 4.4E−240 |
| | | | | | Homo sapiens, lactate dehydrogenase A, | |
| | | | | | clone MGC: 4065 IMAGE: 2960999, | |
| | | | | | mRNA, complete cds | |
| 4115 | M00056428C:A12 | MA173:E05 | | NM_001016 | gi\|14277699\|ref\|NM_001016.2 Homo | 4.2E−212 |
| | | | | | sapiens ribosomal protein S12 (RPS12), | |
| | | | | | mRNA | |
| 4116 | M00056429D:D07 | MA173:F05 | 0.53763 | | | |
| 4117 | M00056175D:B05 | MA180:G05 | | Z62862 | gi\|1035240\|emb\|Z62862.1HS74B1R | 6.9E−87 |
| | | | | | H. sapiens CpG island DNA genomic Mse1 | |
| | | | | | fragment, clone 74b1, reverse read | |
| | | | | | cpg74b1.rt1a | |
| 4118 | M00056507D:D04 | MA173:A11 | 0.65197 | | | |
| 4119 | M00056511D:H07 | MA173:F11 | | BC000419 | gi\|12653300\|gb\|BC000419.1BC000419 | 6.1E−205 |
| | | | | | Homo sapiens, catechol-O- | |
| | | | | | methyltransferase, clone MGC: 8663 | |
| | | | | | IMAGE: 2964400, mRNA, complete cds | |
| 4120 | M00054654A:F12 | MA187:A05 | | NM_000976 | gi\|15431291\|ref\|NM_000976.2 Homo | 1E−296 |
| | | | | | sapiens ribosomal protein L12 (RPL12), | |
| | | | | | mRNA | |
| 4121 | M00054868D:F12 | MA189:A05 | | NM_012423 | gi\|14591905\|ref\|NM_012423.2 Homo | 4.4E−140 |
| | | | | | sapiens ribosomal protein L13a (RPL13A), | |
| | | | | | mRNA | |
| 4122 | M00054661B:H10 | MA187:D05 | | L47277 | gi\|986911\|gb\|L47277.1HUMTOPATRA | 5.8E−261 |
| | | | | | Homo sapiens (cell line HepG2, HeLa) | |
| | | | | | alpha topoisomerase truncated-form | |
| | | | | | mRNA, 3′UTR | |
| 4123 | M00054666B:C07 | MA187:F05 | | AJ250229 | gi\|8926686\|emb\|AJ250229.1HSA250229 | 6.1E−205 |
| | | | | | Homo sapiens mRNA for chromosome 11 | |
| | | | | | hypothetical protein (ORF1) | |
| 4124 | M00054870B:H05 | MA189:F05 | | M26326 | gi\|186690\|gb\|M26326.1HUMKER18AA | 4.8E−121 |
| | | | | | Human keratin 18 mRNA, complete cds | |
| 4125 | M00054669B:B03 | MA187:G05 | | BC001754 | gi\|12804658\|gb\|BC001754.1BC001754 | 8E−192 |
| | | | | | Homo sapiens, male-enhanced antigen, | |
| | | | | | clone MGC: 2286 IMAGE: 3355279, | |
| | | | | | mRNA, complete cds | |
| 4126 | M00054706B:G04 | MA187:A11 | | AF201944 | gi\|9295191\|gb\|AF201944.1AF201944 | 8.3E−251 |
| | | | | | Homo sapiens HGTD-P (HGTD-P) | |
| | | | | | mRNA, complete cds | |
| 4127 | M00054720C:F01 | MA187:D11 | | BC013918 | gi\|15530264\|gb\|BC013918.1BC013918 | 1.4E−224 |
| | | | | | Homo sapiens, Similar to eukaryotic | |
| | | | | | translation elongation factor 1 gamma, | |
| | | | | | clone MGC: 22883 IMAGE: | |
| 4128 | M00054722B:E08 | MA187:E11 | | Z62862 | gi\|1035240\|emb\|Z62862.1HS74B1R | 6E−116 |
| | | | | | H. sapiens CpG island DNA genomic Mse1 | |
| | | | | | fragment, clone 74b1, reverse read | |
| | | | | | cpg74b1.rt1a | |
| 4129 | M00054908A:H08 | MA189:E11 | | L00160 | gi\|189904\|gb\|L00160.1HUMPGK2 Human | 2.4E−291 |
| | | | | | phosphoglycerate kinase (pgk) mRNA, | |
| | | | | | exons 2 to last | |
| 4130 | M00054723B:H12 | MA187:G11 | | X60819 | gi\|34458\|emb\|X60819.1HSMAOP14 | 1.6E−295 |
| | | | | | H. sapiens DNA for monoamine oxidase | |
| | | | | | type A (14) (partial) | |
| 4131 | M00057210B:G10 | MA193:C05 | | U12404 | gi\|5311701\|gb\|U12404.1HSU12404 Human | 3.5E−175 |
| | | | | | Csa-19 mRNA, complete cds | |
| 4132 | M00057248D:B05 | MA193:B11 | | NM_001024 | gi\|14670385\|ref\|NM_001024.2 Homo | 1.3E−196 |
| | | | | | sapiens ribosomal protein S21 (RPS21), | |
| | | | | | mRNA | |
| 4133 | M00057252A:F06 | MA193:F11 | | AF035555 | gi\|3116433\|gb\|AF035555.1AF035555 | 2.5E−182 |
| | | | | | Homo sapiens short chain L-3- | |
| | | | | | hydroxyacyl-CoA dehydrogenase | |
| | | | | | (SCHAD) mRNA, complete cds | |
| 4134 | M00042573B:A02 | MA167:B05 | | BC007583 | gi\|14043190\|gb\|BC007583.1BC007583 | 1.6E−102 |
| | | | | | Homo sapiens, clone MGC: 15572 | |
| | | | | | IMAGE: 3140342, mRNA, complete cds | |
| 4135 | M00042766A:E10 | MA171:F05 | | AF201944 | gi\|9295191\|gb\|AF201944.1AF201944 | 2.8E−244 |
| | | | | | Homo sapiens HGTD-P (HGTD-P) | |
| | | | | | mRNA, complete cds | |
| 4136 | M00042882D:G08 | MA167:A11 | | AF346964 | gi\|13272570\|gb\|AF346964.1AF346964 | 5.1E−199 |
| | | | | | Homo sapiens mitochondrion, complete | |
| | | | | | genome | |
| 4137 | M00042885C:A12 | MA167:B11 | | NM_001018 | gi\|14591911\|ref\|NM_001018.2 Homo | 1.9E−248 |
| | | | | | sapiens ribosomal protein S15 (RPS15), | |
| | | | | | mRNA | |
| 4138 | M00042815A:E07 | MA171:B11 | 0.781 | | | |
| 4139 | M00042817B:E11 | MA171:C11 | | AF077034 | gi\|4689115\|gb\|AF077034.1AF077034 | 5.6E−258 |
| | | | | | Homo sapiens HSPC010 mRNA, complete | |
| | | | | | cds | |
| 4140 | M00042887C:A07 | MA167:E11 | | X73502 | gi\|406853\|emb\|X73502.1HSENCY20 H. Sapiens | 2.1E−195 |
| | | | | | mRNA for cytokeratin 20 | |
| 4141 | M00042818D:A08 | MA171:G11 | | NM_001002 | gi\|16933547\|ref\|NM_001002.2 Homo | 2E−251 |
| | | | | | sapiens ribosomal protein, large, P0 | |
| | | | | | (RPLP0), transcript variant 1, mRNA | |
| 4142 | M00056552A:G08 | MA174:C05 | | AK027892 | gi\|14042896\|dbj\|AK027892.1AK027892 | 2.4E−291 |
| | | | | | Homo sapiens cDNA FLJ14986 fis, clone | |
| | | | | | Y79AA1000784, highly similar to Homo | |
| | | | | | sapiens RanBP7/import | |
| 4143 | M00056552C:D08 | MA174:D05 | | BC017831 | gi\|17389602\|gb\|BC017831.1BC017831 | 2E−279 |
| | | | | | Homo sapiens, ribosomal protein L17, | |
| | | | | | clone MGC: 22482 IMAGE: 4251433, | |
| | | | | | mRNA, complete cds | |
| 4144 | M00056553C:E10 | MA174:E05 | | X14420 | gi\|30057\|emb\|X14420.1HSCOL3AI | 5.8E−289 |
| | | | | | Human mRNA for pro-alpha-1 type 3 | |
| | | | | | collagen | |
| 4145 | M00056555B:C11 | MA174:H05 | | M58458 | gi\|337509\|gb\|M58458.1HUMRPS4X | 1.2E−196 |
| | | | | | Human ribosomal protein S4 (RPS4X) | |
| | | | | | isoform mRNA, complete cds | |
| 4146 | M00056611C:D03 | MA174:D11 | | AF081192 | gi\|3420798\|gb\|AF081192.1AF081192 | 3.9E−293 |
| | | | | | Homo sapiens histone H2A.F/Z variant | |
| | | | | | (H2AV) mRNA, complete cds | |
| 4147 | M00056611D:B03 | MA174:F11 | | L06498 | gi\|292442\|gb\|L06498.1HUMRPS20 Homo | 3.E−169 |
| | | | | | sapiens ribosomal protein S20 (RPS20) | |
| | | | | | mRNA, complete cds | |
| 4148 | M00056611D:F08 | MA174:G11 | | M19645 | gi\|183644\|gb\|M19645.1HUMGRP78 | 1.5E−289 |
| | | | | | Human 78 kdalton glucose-regulated | |
| | | | | | protein (GRP78) gene, complete cds | |
| 4149 | M00056614C:F06 | MA174:H11 | | AB063318 | gi\|14517631\|dbj\|AB063318.1AB063318 | 5.7E−230 |
| | | | | | Homo sapiens MoDP-2, MoDP-3 mRNA | |
| | | | | | for acute morphine dependence related | |
| | | | | | protein 2, acute morphine | |
| 4150 | RG:358387:10009:A05 | MA158:A05 | | BC014270 | gi\|15679933\|gb\|BC014270.1BC014270 | 2.9E−266 |
| | | | | | Homo sapiens, protein kinase C, zeta, | |
| | | | | | clone MGC: 10512 IMAGE: 3835020, | |
| | | | | | mRNA, complete cds | |
| 4151 | M00057302A:F08 | MA182:A05 | | BC007097 | gi\|13937968\|gb\|BC007097.1BC007097 | 3.3E−147 |
| | | | | | Homo sapiens, tissue inhibitor of | |
| | | | | | metalloproteinase 1 (erythroid potentiating | |
| | | | | | activity, collagena | |
| 4152 | M00057302C:H09 | MA182:C05 | | BC018210 | gi\|17390469\|gb\|BC018210.1BC018210 | 2.1E−251 |
| | | | | | Homo sapiens, tubulin-specific chaperone | |
| | | | | | a, clone MGC: 9129 IMAGE: 3861138, | |
| | | | | | mRNA, complete cds | |
| 4153 | M00054496A:B09 | MA184:F05 | 0.60245 | BC002589 | gi\|12803524\|gb\|BC002589.1BC002589 | 3.5E−64 |
| | | | | | Homo sapiens, proteasome (prosome, | |
| | | | | | macropain) 26S subunit, ATPase, 2, clone | |
| | | | | | MGC: 3004 IMAGE: 316179 | |
| 4154 | M00054496A:H05 | MA184:H05 | | BC004138 | gi\|13278716\|gb\|BC004138.1BC004138 | 1.4E−286 |
| | | | | | Homo sapiens, ribosomal protein L6, clone | |
| | | | | | MGC: 1635 IMAGE: 2823733, mRNA, | |
| | | | | | complete cds | |
| 4155 | M00042460B:A08 | MA182:A11 | | NM_000980 | gi\|15431299\|ref\|NM_000980.2 Homo | 8.7E−229 |
| | | | | | sapiens ribosomal protein L18a (RPL18A), | |
| | | | | | mRNA | |
| 4156 | M00054524B:B09 | MA184:A11 | | NM_000976 | gi\|15431291\|ref\|NM_000976.2 Homo | 4.1E−296 |
| | | | | | sapiens ribosomal protein L12 (RPL12), | |
| | | | | | mRNA | |
| 4157 | M00054526C:E05 | MA184:B11 | | NM_000988 | gi\|17017972\|ref\|NM_000988.2 Homo | 7E−189 |
| | | | | | sapiens ribosomal protein L27 (RPL27), | |
| | | | | | mRNA | |
| 4158 | M00042516B:A08 | MA182:C11 | | NM_000976 | gi\|15431291\|ref\|NM_000976.2 Homo | 2E−248 |
| | | | | | sapiens ribosomal protein L12 (RPL12), | |
| | | | | | mRNA | |
| 4159 | M00042517D:H10 | MA182:D11 | | BC000386 | gi\|12653234\|gb\|BC000386.1BC000386 | 3.8E−178 |
| | | | | | Homo sapiens, eukaryotic translation | |
| | | | | | initiation factor 3, subunit 3 (gamma, | |
| | | | | | 40 kD), clone MGC: 8431 | |
| 4160 | M00054527B:H11 | MA184:D11 | | AF155235 | gi\|6318598\|gb\|AF155235.1AF155235 | 4.5E−240 |
| | | | | | Homo sapiens 15.5 kD RNA binding | |
| | | | | | protein mRNA, complete cds | |
| 4161 | M00042517D:H11 | MA182:E11 | | BC016756 | gi\|16876963\|gb\|BC016756.1BC016756 | 1.4E−230 |
| | | | | | Homo sapiens, glutathione peroxidase 2 | |
| | | | | | (gastrointestinal), clone IMAGE: 3681457, | |
| | | | | | mRNA | |
| 4162 | M00054529C:G04 | MA184:G11 | | NM_022551 | gi\|14165467\|ref\|NM_022551.2 Homo | 2.7E−213 |
| | | | | | sapiens ribosomal protein S18 (RPS18), | |
| | | | | | mRNA | |
| 4163 | M00043300D:A06 | MA182:H11 | | BC012146 | gi\|15082460\|gb\|BC012146.1BC012146 | 3.6E−259 |
| | | | | | Homo sapiens, Similar to ribosomal | |
| | | | | | protein L3, clone MGC: 20359 | |
| | | | | | IMAGE: 4549682, mRNA, complete cds | |
| 4164 | M00054958A:G10 | MA198:C05 | | AY007723 | gi\|15431041\|gb\|AY007723.1 Homo | 2.6E−185 |
| | | | | | sapiens MAL2 proteolipid (MAL2) | |
| | | | | | mRNA, complete cds | |
| 4165 | M00054958B:B07 | MA198:D05 | 0.12023 | AF012108 | gi\|2331249\|gb\|AF012108.1AF012108 | 2.6E−111 |
| | | | | | Homo sapiens Amplified in Breast Cancer | |
| | | | | | (AIB1) mRNA, complete cds | |
| 4166 | M00054961D:E08 | MA198:H05 | | NM_005617 | gi\|14141191\|ref\|NM_005617.2 Homo | 3.2E−172 |
| | | | | | sapiens ribosomal protein S14 (RPS14), | |
| | | | | | mRNA | |
| 4167 | M00055015C:H02 | MA198:C11 | | X58965 | gi\|35069\|X58965.1HSNM23H2G | 4.4E−187 |
| | | | | | H. sapiens RNA for nm23-H2 gene | |
| 4168 | M00055016B:D03 | MA198:E11 | | NM_001010 | gi\|17158043\|ref\|NM_001010.2 Homo | 1.7E−186 |
| | | | | | sapiens ribosomal protein S6 (RPS6), | |
| | | | | | mRNA | |
| 4169 | M00055764D:D05 | MA170:E05 | | BC001708 | gi\|12804576\|gb\|BC001708.1BC001708 | 9.8E−210 |
| | | | | | Homo sapiens, ribosomal protein S3A, | |
| | | | | | clone MGC: 1626 IMAGE: 3544072, | |
| | | | | | mRNA, complete cds | |
| 4170 | M00055815C:E08 | MA170:B11 | | AK025459 | gi\|10437979\|dbj\|AK025459.1AK025459 | 4.8E−249 |
| | | | | | Homo sapiens cDNA: FLJ21806 fis, clone | |
| | | | | | HEP00829, highly similar to HSTRA1 | |
| | | | | | Human tra1 mRNA for hu | |
| 4171 | M00055819B:B12 | MA170:F11 | | AF014838 | gi\|2281706\|gb\|AF014838.1AF014838 | 8.3E−254 |
| | | | | | Homo sapiens galectin-4 mRNA, complete | |
| | | | | | cds | |
| 4172 | M00055820C:H11 | MA170:H11 | | NM_000967 | gi\|16507968\|ref\|NM_000967.2 Homo | 3.4E−175 |
| | | | | | sapiens ribosomal protein L3 (RPL3), | |
| | | | | | mRNA | |
| 4173 | M00055204B:C04 | MA196:A05 | | X57351 | gi\|311373\|emb\|X57351.1HS18D Human 1- | 1.2E−218 |
| | | | | | 8D gene from interferon-inducible gene | |
| | | | | | family | |
| 4174 | M00055209A:C09 | MA196:D05 | | AF028832 | gi\|3287488\|gb\|AF028832.1AF028832 | 9.1E−232 |
| | | | | | Homo sapiens Hsp89-alpha-delta-N | |
| | | | | | mRNA, complete cds | |
| 4175 | M00055252C:G12 | MA196:D11 | 0.1038 | U16738 | gi\|608516\|gb\|U16738.1HSU16738 Homo | 1E−172 |
| | | | | | sapiens CAG-isl 7 mRNA, complete cds | |
| 4176 | M00056934C:D08 | MA177:A05 | | Z69043 | gi\|2398656\|emb\|Z69043.1HSTRAPRNA | 3.2E−281 |
| | | | | | H. sapiens mRNA translocon-associated | |
| | | | | | protein delta subunit precursor | |
| 4177 | M00055989C:D03 | MA179:B05 | 0.8 | | | |
| 4178 | M00056937C:G12 | MA177:D05 | | AK055020 | gi\|16549662\|dbj\|AK055020.1AK055020 | 3.2E−219 |
| | | | | | Homo sapiens cDNA FLJ30458 fis, clone | |
| | | | | | BRACE2009421, highly similar to | |
| | | | | | NUCLEOSOME ASSEMBLY PROTEI | |
| 4179 | M00055997B:A02 | MA179:H05 | 0.89264 | | | |
| 4180 | M00056087A:G01 | MA179:C11 | | AF150754 | gi\|12484558\|gb\|AF150754.2AF150754 | 2.4E−96 |
| | | | | | Homo sapiens 3′phosphoadenosine 5′- | |
| | | | | | phosphosulfate synthase 2b isoform | |
| | | | | | mRNA, complete cds | |
| 4181 | M00056091A:H05 | MA179:D11 | | BC013724 | gi\|15489238\|gb\|BC013724.1BC013724 | 3.9E−265 |
| | | | | | Homo sapiens, ferritin, heavy polypeptide | |
| | | | | | 1, clone MGC: 17255 IMAGE: 3857790, | |
| | | | | | mRNA, complete cds | |
| 4182 | M00056966B:A05 | MA177:E11 | | AF346974 | gi\|13272710\|gb\|AF346974.1AF346974 | 5.6E−108 |
| | | | | | Homo sapiens mitochondrion, complete | |
| | | | | | genome | |
| 4183 | M00056093A:F08 | MA179:F11 | 0.26754 | | | |
| 4184 | M00056096C:H10 | MA179:H11 | 0.77419 | | | |
| 4185 | M00054766B:E10 | MA188:H05 | | BC005328 | gi\|13529103\|gb\|BC005328.1BC005328 | 5.8E−258 |
| | | | | | Homo sapiens, ribosomal protein S27a, | |
| | | | | | clone MGC: 12414, mRNA, complete cds | |
| 4186 | M00054817B:H09 | MA188:B11 | | BC015465 | gi\|15930040\|gb\|BC015465.1BC015465 | 8.4E−254 |
| | | | | | Homo sapiens, HSPC023 protein, clone | |
| | | | | | MGC: 8754 IMAGE: 3914049, mRNA, | |
| | | | | | complete cds | |
| 4187 | M00054818D:G04 | MA188:D11 | | BC008495 | gi\|14250151\|gb\|BC008495.1BC008495 | 1.4E−258 |
| | | | | | Homo sapiens, nucleophosmin (nucleolar | |
| | | | | | phosphoprotein B23, numatrin), clone | |
| | | | | | MGC: 14826 IMAGE: 42766 | |
| 4188 | M00042851D:H04 | MA172:A05 | | NM_001000 | gi\|16306563\|ref\|NM_001000.2 Homo | 3.7E−156 |
| | | | | | sapiens ribosomal protein L39 (RPL39), | |
| | | | | | mRNA | |
| 4189 | M00042853A:F01 | MA172:B05 | | NM_000970 | gi\|16753226\|ref\|NM_000970.2 Homo | 3.4E−284 |
| | | | | | sapiens ribosomal protein L6 (RPL6), | |
| | | | | | mRNA | |
| 4190 | M00055426A:G06 | MA168:E05 | | AF272149 | gi\|9971873\|gb\|AF272149.1AF272149 | 1.3E−61 |
| | | | | | Homo sapiens hepatocellular carcinoma | |
| | | | | | associated-gene TB6, mRNA sequence | |
| 4191 | M00055496A:G12 | MA168:B11 | | AF203815 | gi\|6979641\|gb\|AF203815.1AF203815 | 5.6E−202 |
| | | | | | Homo sapiens alpha gene sequence | |
| 4192 | M00055509C:C02 | MA168:F11 | 0.76684 | AL590401 | gi\|14422235\|emb\|AL590401.6AL590401 | 1.8E−35 |
| | | | | | Human DNA sequence from clone RP11- | |
| | | | | | 466P12 on chromosome 6, complete | |
| | | | | | sequence [Homo sapiens] | |
| 4193 | M00055510B:F08 | MA168:G11 | | AF067174 | gi\|4894381\|gb\|AF067174.1AF067174 | 2.2E−257 |
| | | | | | Homo sapiens retinol dehydrogenase | |
| | | | | | homolog mRNA, complete cds | |
| 4194 | M00055510D:A08 | MA168:H11 | | AK026649 | gi\|10439547\|dbj\|AK026649.1AK026649 | 1.6E−161 |
| | | | | | Homo sapiens cDNA: FLJ22996 fis, clone | |
| | | | | | KAT11938 | |
| 4195 | M00056748C:B08 | MA175:B05 | | AF054183 | gi\|4092053\|gb\|AF054183.1AF054183 | 1.2E−165 |
| | | | | | Homo sapiens GTP binding protein | |
| | | | | | mRNA, complete cds | |
| 4196 | M00056749A:F01 | MA175:C05 | | Y14736 | gi\|2765422\|emb\|Y14736.1HSIGG1KL | 1.2E−249 |
| | | | | | Homo sapiens mRNA for immunoglobulin | |
| | | | | | kappa light chain | |
| 4197 | M00056754B:A10 | MA175:G05 | | V00710 | gi\|13683\|emb\|V00710.1MIT1HS Human | 6.3E−292 |
| | | | | | mitochondrial genes for several tRNAs | |
| | | | | | (Phe, Val, Leu) and 12S and 16S ribosomal | |
| | | | | | RNAs | |
| 4198 | M00056754B:H06 | MA175:H05 | | D38112 | gi\|644480\|dbj\|D38112.1HUMMTA Homo | 1.4E−252 |
| | | | | | sapiens mitochondrial DNA, complete | |
| | | | | | sequence | |
| 4199 | RG:1653390:10014:E05 | MA163:E05 | | M15353 | gi\|306486\|gb\|M15353.1HUMIF4E Homo | 1.5E−138 |
| | | | | | sapiens cap-binding protein mRNA, | |
| | | | | | complete cds | |
| 4200 | RG:1669553:10014:G05 | MA163:G05 | | X03663 | gi\|29899\|emb\|X03663.1HSCFMS Human | 5.8E−221 |
| | | | | | mRNA for c-fms proto-oncogene | |
| 4201 | M00043355A:H12 | MA183:B05 | | M94314 | gi\|292436\|gb\|M94314.1HUMRPL30A | 7.9E−66 |
| | | | | | Homo sapiens ribosomal protein L30 | |
| | | | | | mRNA, complete cds | |
| 4202 | M00043355B:F10 | MA183:C05 | | AK055653 | gi\|16550433\|dbj\|AK055653, 1AK055653 | 1.1E−165 |
| | | | | | Homo sapiens cDNA FLJ31091 fis, clone | |
| | | | | | IMR321000155, highly similar to 60S | |
| | | | | | RIBOSOMAL PROTEIN L35A | |
| 4203 | M00043357B:B10 | MA183:G05 | | NM_000978 | gi\|14591907\|ref\|NM_000978.2 Homo | 3.7E−206 |
| | | | | | sapiens ribosomal protein L23 (RPL23), | |
| | | | | | mRNA | |
| 4204 | M00054557C:D09 | MA185:G05 | | NM_012423 | gi\|14591905\|ref\|NM_012423.2 Homo | 9.6E−167 |
| | | | | | sapiens ribosomal protein L13a (RPL13A), | |
| | | | | | mRNA | |
| 4205 | M00043358B:G11 | MA183:H05 | | M60854 | gi\|338446\|gb\|M60854.1HUMSRAA | 5.2E−280 |
| | | | | | Human ribosomal protein S16 mRNA, | |
| | | | | | complete cds | |
| 4206 | M00043396D:B04 | MA183:A11 | | AF026166 | gi\|4090928\|gb\|AF026166.1AF026166 | 4.1E−237 |
| | | | | | Homo sapiens chaperonin-containing TCP- | |
| | | | | | 1 beta subunit homolog mRNA, complete | |
| | | | | | cds | |
| 4207 | M00054612D:D11 | MA185:H11 | | NM_006013 | gi\|15718685\|ref\|NM_006013.2 Homo | 1.2E−171 |
| | | | | | sapiens ribosomal protein L10 (RPL10), | |
| | | | | | mRNA | |
| 4208 | M00055409B:D08 | MA199:A05 | | BC016748 | gi\|16876941\|gb\|BC016748.1BC016748 | 3.6E−55 |
| | | | | | Homo sapiens, ribosomal protein L37a, | |
| | | | | | clone MGC: 26772 IMAGE: 4831278, | |
| | | | | | mRNA, complete cds | |
| 4209 | M00055409D:F06 | MA199:B05 | | V00572 | gi\|35434\|emb\|V00572.1HSPGK1 Human | 1.6E−186 |
| | | | | | mRNA encoding phosphoglycerate kinase | |
| 4210 | M00055410A:A06 | MA199:C05 | 0.80422 | | | |
| 4211 | M00056659A:D08 | MA186:F05 | | M15470 | gi\|187680\|gb\|M15470.1HUMMHB44 | 3E−275 |
| | | | | | Human MHC class I HLA-B44 mRNA, | |
| | | | | | partial cds | |
| 4212 | M00056704C:H08 | MA186:D11 | | BC001125 | gi\|12654578\|gb\|BC001125.1BC001125 | 8.2E−282 |
| | | | | | Homo sapiens, peptidylprolyl isomerase B | |
| | | | | | (cyclophilin B), clone MGC: 2224 | |
| | | | | | IMAGE:2966791, mRNA, com | |
| 4213 | M00055553C:B06 | MA169:A06 | | | | |
| 4214 | M00056280B:D10 | MA181:A06 | 0.72079 | | | |
| 4215 | M00056282D:G10 | MA181:C06 | 0.05211 | AJ420520 | gi\|17066384\|emb\|AJ420520.1HSA420520 | 1.5E−88 |
| | | | | | Homo sapiens mRNA full length insert | |
| | | | | | cDNA clone EUROIMAGE 1979495 | |
| 4216 | M00056288B:A12 | MA181:G06 | | D14530 | gi\|414348\|dbj\|D14530.1HUMRSPT | 9.8E−23 |
| | | | | | Human homolog of yeast ribosomal | |
| | | | | | protein S28, complete cds | |
| 4217 | M00055686D:E11 | MA169:B12 | | L02785 | gi\|291963\|gb\|L02785.1HUMDRA Homo | 5.9E−202 |
| | | | | | sapiens colon mucosa-associated (DRA) | |
| | | | | | mRNA, complete cds | |
| 4218 | M00042346B:F09 | MA181:C12 | 0.23093 | AK000168 | gi\|7020079\|dbj\|AK000168.1AK000168 | 7.4E−202 |
| | | | | | Homo sapiens cDNA FLJ20161 fis, clone | |
| | | | | | COL09252, highly similar to L33930 | |
| | | | | | Homo sapiens CD24 signal | |
| 4219 | M00055698C:E05 | MA169:E12 | 0.82609 | | | |
| 4220 | M00042347C:D07 | MA181:E12 | | M12759 | gi\|532596\|gb\|M12759.1HUMIGJ02 | 3.2E−166 |
| | | | | | Human Ig J chain gene, exons 3 and 4 | |
| 4221 | M00055702C:C04 | MA169:F12 | 0.85 | | | |
| 4222 | M00042348C:F03 | MA181:G12 | | x60489 | gi\|31099\|emb\|X60489.1HSEF1B Human | 6.68E−233 |
| | | | | | mRNA for elongation factor-1-beta | |
| 4223 | M00055335D:E01 | MA197:D06 | | BC003510 | gi\|13097578\|gb\|BC003510.1BC003510 | 2.6E−176 |
| | | | | | Homo sapiens, prothymosin, alpha (gene | |
| | | | | | sequence 28), clone MGC: 10549 | |
| | | | | | IMAGE: 3610808, mRNA, complet | |
| 4224 | M00056180C:E06 | MA180:B06 | | BC018190 | gi\|17390422\|gb\|BC018190.1BC018190 | 5.3E−171 |
| | | | | | Homo sapiens, Similar to metallothionein | |
| | | | | | 1L, clone MGC: 9187 IMAGE: 3859643, | |
| | | | | | mRNA, complete cds | |
| 4225 | M00056184B:G11 | MA180:D06 | | Y00345 | gi\|35569\|emb\|Y00345.1HSPOLYAB | 8.2E−254 |
| | | | | | Human mRNA for polyA binding protein | |
| 4226 | M00056514A:F06 | MA173:A12 | | AJ335311 | gi\|15879729\|emb\|AJ335311.1HSA335311 | 7.7E−54 |
| | | | | | Homo sapiens genomic sequence | |
| | | | | | surrounding NotI site, clone NR1-WB8C | |
| 4227 | M00056514C:H11 | MA173:D12 | | BC000386 | gi\|12653234\|gb\|BC000386.1BC000386 | 1.8E−242 |
| | | | | | Homo sapiens, eukaryotic translation | |
| | | | | | initiation factor 3, subunit 3 (gamma, | |
| | | | | | 40 kD), clone MGC: 8431 | |
| 4228 | M00054674D:C05 | MA187:C06 | | D14530 | gi\|414348\|dbj\|D14530.1HUMRSPT | 8.3E−198 |
| | | | | | Human homolog of yeast ribosomal | |
| | | | | | protein S28, complete cds | |
| 4229 | M00054675A:H07 | MA187:D06 | | X00474 | gi\|35706\|emb\|X00474.1HSPS2 Human pS2 | 7.8E−170 |
| | | | | | mRNA induced by estrogen from human | |
| | | | | | breast cancer cell line MCF-7 | |
| 4230 | M00054878A:G12 | MA189:D06 | | AL359678 | gi\|15215911\|emb\|AL359678.15AL359678 | 2.4E−207 |
| | | | | | Human DNA sequence from clone RP11- | |
| | | | | | 550J21 on chromosome 9, complete | |
| | | | | | sequence [Homo sapiens] | |
| 4231 | M00054676B:D07 | MA187:H06 | | BC000749 | gi\|13879207\|gb\|BC000749.1BC000749 | 2.9E−129 |
| | | | | | Homo sapiens, lactate dehydrogenase A, | |
| | | | | | clone MGC: 2417 IMAGE: 2960999, | |
| | | | | | mRNA, complete cds | |
| 4232 | M00054725A:E09 | MA187:B12 | | NM_022551 | gi\|14165467\|ref\|NM_022551.2 Homo | 2.7E−241 |
| | | | | | sapiens ribosomal protein S18 (RPS18), | |
| | | | | | mRNA | |
| 4233 | M00054924C:B09 | MA189:C12 | 0.63711 | | | |
| 4234 | M00054726D:B04 | MA187:D12 | | X16064 | gi\|37495\|emb\|X16064.1HSTUMP Human | 1.1E−271 |
| | | | | | mRNA for translationally controlled tumor | |
| | | | | | protein | |
| 4235 | M00054927A:H09 | MA189:E12 | | X06705 | gi\|35511\|emb\|X06705.1HSPLAX Human | 2.7E−297 |
| | | | | | PLA-X mRNA | |
| 4236 | M00054727C:F11 | MA187:F12 | 0.7234 | | | |
| 4237 | M00054728A:H05 | MA187:H12 | | X16064 | gi\|37495\|emb\|X16064.1HSTUMP Human | 1.3E−168 |
| | | | | | mRNA for translationally controlled tumor | |
| | | | | | protein | |
| 4238 | M00054930B:G05 | MA189:H12 | | U15008 | gi\|600747\|gb\|U15008.1HSU15008 Human | 7E−270 |
| | | | | | SnRNP core protein Sm D2 mRNA, | |
| | | | | | complete cds | |
| 4239 | M00057214C:G11 | MA193:B06 | | U55206 | gi\|2957143\|gb\|U55206.1HSU55206 Homo | 4.1E−115 |
| | | | | | sapiens human gamma-glutamyl hydrolase | |
| | | | | | (hGH) mRNA, complete cds | |
| 4240 | M00057216C:G01 | MA193:D06 | | BC000695 | gi\|12653812\|gb\|BC000695.1BC000695 | 7.3E−28 |
| | | | | | Homo sapiens, Similar to tetraspan 1, clone | |
| | | | | | IMAGE: 3349380, mRNA | |
| 4241 | M00057217C:B07 | MA193:F06 | | AK057120 | gi\|16552707\|dbj\|AK057120.1AK057120 | 3.6E−206 |
| | | | | | Homo sapiens cDNA FLJ32558 fis, clone | |
| | | | | | SPLEN1000143, highly similar to HIGH | |
| | | | | | MOBILITY GROUP PROTEL | |
| 4242 | M00042695A:H04 | MA167:B06 | | BC007075 | gi\|13937928\|gb\|BC007075.1BC007075 | 9.6E−37 |
| | | | | | Homo sapiens, hemoglobin, beta, clone | |
| | | | | | MGC: 14540 IMAGE: 4292125, mRNA, | |
| | | | | | complete cds | |
| 4243 | M00042695D:D09 | MA167:C06 | | BC018749 | gi\|17511797\|gb\|BC018749.1BC018749 | 3.5E−194 |
| | | | | | Homo sapiens, Similar to immunoglobulin | |
| | | | | | lambda joining 3, clone MGC: 31942 | |
| | | | | | IMAGE: 4854511, mRNA, co | |
| 4244 | M00042771A:D01 | MA171:D06 | | BC007659 | gi\|4043327\|gb\|BC007659.1BC007659 | 6.7E−239 |
| | | | | | Homo sapiens, diaphorase | |
| | | | | | (NADH/NADPH) (cytochrome b-5 | |
| | | | | | reductase), clone MGC: 2073 | |
| | | | | | IMAGE: 3349257, m | |
| 4245 | M00042772D:F02 | MA171:E06 | | NM_002295 | gi\|9845501\|ref\|NM_002295.2 Homo | 2.2E−254 |
| | | | | | sapiens laminin receptor 1 (67 kD, | |
| | | | | | ribosomal protein SA) (LAMR1), mRNA | |
| 4246 | M00042773A:A12 | MA171:F06 | | AK000009 | gi\|7019813\|dbj\|AK000009.1AK000009 | 2.6E−213 |
| | | | | | Homo sapiens cDNA FLJ20002 fis, clone | |
| | | | | | ADKA01577 | |
| 4247 | M00042699B:B10 | MA167:G06 | | X98311 | gi\|1524059\|emb\|X98311.1HSCGM2ANT | 1.5E−31 |
| | | | | | H. sapiens mRNA for carcinoembryonic | |
| | | | | | antigen family member 2, CGM2 | |
| 4248 | M00042889A:H07 | MA167:A12 | | NM_005950 | gi\|10835229\|ref\|NM_005950.1 Homo | 6E−202 |
| | | | | | sapiens metallothionein 1G (MT1G), | |
| | | | | | mRNA | |
| 4249 | M00042819A:C09 | MA171:A12 | | BC009220 | gi\|14327996\|gb\|BC009220.1BC009220 | 5.2E−218 |
| | | | | | Homo sapiens, clone MGC: 16362 | |
| | | | | | IMAGE: 3927795, mRNA, complete cds | |
| 4250 | M00042819C:B03 | MA171:B12 | | NM_000995 | gi\|16117786\|ref\|NM_000995.2 Homo | 9.4E−207 |
| | | | | | sapiens ribosomal protein L34 (RPL34), | |
| | | | | | transcript variant 1, mRNA | |
| 4251 | M00042895B:C02 | MA167:C12 | | AF217186 | gi\|11526786\|gb\|AF217186.1AF217186 | 1.4E−283 |
| | | | | | Homo sapiens inorganic pyrophosphatase 1 | |
| | | | | | (PPA1) mRNA, complete cds | |
| 4252 | M00042823B:A02 | MA171:C12 | | A1F212248 | gi\|13182770\|gb\|AF212248.1AF212248 | 5.1E−252 |
| | | | | | Homo sapiens CDA09 mRNA, complete | |
| | | | | | cds | |
| 4253 | M00042895D:B04 | MA167:E12 | | U83908 | gi\|1825561\|gb\|U83908.1HSU83908 | 2.4E−229 |
| | | | | | Human nuclear antigen H731 mRNA, | |
| | | | | | complete cds | |
| 4254 | M00056564B:F11 | MA174:F06 | | AL136593 | gi\|7018431\|emb\|AL136593.1HSM801567 | 3.4E−284 |
| | | | | | Homo sapiens mRNA; cDNA | |
| | | | | | DKFZp761K102 (from clone | |
| | | | | | DKFZp761K102); complete cds | |
| 4255 | M00056564C:E08 | MA174:G06 | | Z74616 | gi\|1418929\|emb\|Z74616.1HSPPA2ICO | 1.4E−286 |
| | | | | | H. sapiens mRNA for prepro-alpha2(I) | |
| | | | | | collagen | |
| 4256 | M00056615D:A01 | MA174:A12 | | X12881 | gi\|34036\|emb\|X12881.1HSKER18R | 1.8E−273 |
| | | | | | Human mRNA for cytokeratin 18 | |
| 4257 | M00056620D:F02 | MA174:G12 | | AK000335 | gi\|7020350\|dbj\|AK000335.1AK000335 | 3.5E−287 |
| | | | | | Homo sapiens cDNA FLJ20328 fis, clone | |
| | | | | | HEP10039 | |
| 4258 | RG:359184:10009:A06 | MA158:A06 | | M35663 | gi\|189505\|gb\|M35663.1HUMP68A Human | 1.6E−258 |
| | | | | | p68 kinase mRNA, complete cds | |
| 4259 | RG:428530:10009:D12 | MA158:D12 | | AF321918 | gi\|12958659\|gb\|AF321918.1AF321918 | 0 |
| | | | | | Homo sapiens testicular acid phosphatase | |
| | | | | | (ACPT) gene, complete cds, alternatively | |
| | | | | | spliced product | |
| 4260 | M00057310A:A07 | MA182:A06 | | AF054187 | gi\|4092059\|gb\|AF054187.1AF054187 | 7.3E−143 |
| | | | | | Homo sapiens alpha NAC mRNA, | |
| | | | | | complete cds | |
| 4261 | M00054503C:H10 | MA184:F06 | | BC018828 | gi\|17402971\|gb\|BC018828.1BC018828 | 2E−276 |
| | | | | | Homo sapiens, clone IMAGE: 3343539, | |
| | | | | | mRNA | |
| 4262 | M00043302C:D03 | MA182:C12 | | BC006791 | gi\|13905015\|gb\|BC006791.1BC006791 | 8.3E−282 |
| | | | | | Homo sapiens, ribosomal protein L10a, | |
| | | | | | clone MGC: 5203 IMAGE: 2901249, | |
| | | | | | mRNA, complete cds | |
| 4263 | M00054535B:F10 | MA184:F12 | | S35960 | gi\|249370\|gb\|S35960.1S35960 laminin | 4.1E−112 |
| | | | | | receptor homolog {3′ region} [human, | |
| | | | | | mRNA Partial, 739 nt] | |
| 4264 | M00054535C:D10 | MA184:G12 | | BC008063 | gi\|14165520\|gb\|BC008063.1BC008063 | 4.7E−274 |
| | | | | | Homo sapiens, Similar to KIAA0102 gene | |
| | | | | | product, clone MGC: 2249 | |
| | | | | | IMAGE: 2967488, mRNA, complete cds | |
| 4265 | M00054535C:H09 | MA184:H12 | | AB020680 | gi\|4240234\|dbj\|AB020680.1AB020680 | 3.1E−275 |
| | | | | | Homo sapiens mRNA for KIAA0873 | |
| | | | | | protein, partial cds | |
| 4266 | M00054964B:A08 | MA198:C06 | | BC017189 | gi\|16877928\|gb\|BC017189.1BC017189 | 1.1E−190 |
| | | | | | Homo sapiens, myo-iositol 1-phosphate | |
| | | | | | synthase A1, clone MGC: 726 | |
| | | | | | IMAGE: 3140452, mRNA, complete c | |
| 4267 | M00054966C:H01 | MA198:D06 | | BC018828 | gi\|17402971\|gb\|BC018828.1BC018828 | 4.4E−190 |
| | | | | | Homo sapiens, clone IMAGE: 3343539, | |
| | | | | | mRNA | |
| 4268 | M00055022D:F01 | MA198:D12 | | NM_000975 | gi\|15431289\|ref\|NM_000975.2 Homo | 2.5E−182 |
| | | | | | sapiens ribosomal protein L11 (RPL11), | |
| | | | | | mRNA | |
| 4269 | M00055026C:C12 | MA198:G12 | | NM_007209 | gi\|16117792\|ref\|NM_007209.2 Homo | 4E−184 |
| | | | | | sapiens ribosomal protein L35 (RPL35), | |
| | | | | | mRNA | |
| 4270 | M00055027B:C11 | MA198:H12 | | AF283772 | gi\|10281741\|gb\|AF283772.2AF283772 | 1E−187 |
| | | | | | Homo sapiens clone TCBAP0781 mRNA | |
| | | | | | sequence | |
| 4271 | M00055826D:C11 | MA170:E12 | 0.7443 | | | |
| 4272 | M00055828C:D10 | MA170:G12 | | V00662 | gi\|13003\|emb\|V00662.1MIHSXX | 9.5E−229 |
| | | | | | H. sapiens mitochondrial genome | |
| 4273 | M00055828D:F12 | MA170:H12 | 0.71968 | BC001573 | gi\|16306770\|gb\|BC001573.1BC001573 | 2.8E−37 |
| | | | | | Homo sapiens, clone MGC: 5522 | |
| | | | | | IMAGE: 3454199, mRNA, complete cds | |
| 4274 | M00055215C:E11 | MA196:B06 | | BC001118 | gi\|12654566\|gb\|BC001118.1BC001118 | 2.4E−288 |
| | | | | | Homo sapiens, Similar to seven | |
| | | | | | transmembrane domain protein, clone | |
| | | | | | MGC: 1936 IMAGE: 2989840, mRNA, | |
| 4275 | M00055217C:E09 | MA196:D06 | | BC010187 | gi\|14603477\|gb\|BC010187.1BC010187 | 4.3E−215 |
| | | | | | Homo sapiens, ribosomal protein S11, | |
| | | | | | clone MGC: 20218 IMAGE: 4547934, | |
| | | | | | mRNA, complete cds | |
| 4276 | M00055221B:C01 | MA196:E06 | | NM_001016 | gi\|14277699\|ref\|NM_001016.2 Homo | 4.7E−246 |
| | | | | | sapiens ribosomal protein S12 (RPS12), | |
| | | | | | mRNA | |
| 4277 | M00055222A:E02 | MA196:G06 | | NM_000987 | gi\|17017970\|ref\|NM_000987.2 Homo | 2.1E−226 |
| | | | | | sapiens ribosomal protein L26 (RPL26), | |
| | | | | | mRNA | |
| 4278 | M00056226D:F03 | MA180:B12 | | BC011835 | gi\|15080118\|gb\|BC011835.1BC011835 | 1.7E−57 |
| | | | | | Homo sapiens, Similar to ATPase, Na+/K+ | |
| | | | | | transporting, beta 3 polypeptide, clone | |
| | | | | | MGC: 20152 IMAGE: 3 | |
| 4279 | M00055258A:G02 | MA196:F12 | | BC016753 | gi\|16876954\|gb\|BC016753.1BC016753 | 1.3E−102 |
| | | | | | Homo sapiens, clone MGC: 1138 | |
| | | | | | IMAGE: 2987963, mRNA, complete cds | |
| 4280 | M00055998A:A02 | MA179:A06 | | AF343729 | gi\|13649973\|gb\|AF343729.1AF343729 | 1.4E−283 |
| | | | | | Homo sapiens 3-alpha hydroxysteroid | |
| | | | | | dehydrogenase mRNA, complete cds | |
| 4281 | M00056945A:B11 | MA177:A06 | 0.89778 | | | |
| 4282 | M00056945D:H03 | MA177:C06 | 0.71282 | | | |
| 4283 | M00056001A:F11 | MA179:D06 | | BC015983 | gi\|16359036\|gb\|BC015983.1BC015983 | 4.5E−165 |
| | | | | | Homo sapiens, clone IMAGE: 4074053, | |
| | | | | | mRNA | |
| 4284 | M00056946D:B04 | MA177:F06 | | AF028832 | gi\|3287488\|gb\|AF028832.1AF028832 | 1E−296 |
| | | | | | Homo sapiens Hsp89-alpha-delta-N | |
| | | | | | mRNA, complete cds | |
| 4285 | M00056101B:B02 | MA179:A12 | | AL049999 | gi\|4884252\|emb\|AL049999.1HSM800347 | 3E−100 |
| | | | | | Homo sapiens mRNA; cDNA | |
| | | | | | DKFZp564M182 (from clone | |
| | | | | | DKFZp564M182); partial cds | |
| 4286 | M00056110C:D09 | MA179:E12 | | AK024903 | gi\|10437317\|dbj\|AK024903.1AK024903 | 1E−209 |
| | | | | | Homo sapiens cDNA: FLJ21250 fis, clone | |
| | | | | | COL01253, highly similar to AB020527 | |
| | | | | | Homo sapiens mRNA fo | |
| 4287 | M00056111B:H03 | MA179:F12 | 0.81436 | | | |
| 4288 | M00054772B:H06 | MA188:G06 | | L19185 | gi\|440307\|gb\|L19185.1HUMNKEFB | 3.6E−178 |
| | | | | | Human natural killer cell enhancing factor | |
| | | | | | (NKEFB) mRNA, complete cds | |
| 4289 | M00054825B:B05 | MA188:C12 | 0.09038 | NM_005348 | gi\|13129149\|ref\|NM_005348.1 Homo | 4.1E−222 |
| | | | | | sapiens heat shock 90 kD protein 1, alpha | |
| | | | | | (HSPCA), mRNA | |
| 4290 | M00054831A:G04 | MA188:D12 | | AL359585 | gi\|8655645\|emb\|AL359585.1HSM802687 | 6.2E−116 |
| | | | | | Homo sapiens mRNA; cDNA | |
| | | | | | DKFZp762B195 (from clone | |
| | | | | | DKFZp762B195) | |
| 4291 | M00054831D:B07 | MA188:F12 | | U43701 | gi\|1399085\|gb\|U43701.1HSU43701 | 4.2E−296 |
| | | | | | Human ribosomal protein L23a mRNA, | |
| | | | | | complete cds | |
| 4292 | M00042862D:A12 | MA172:B06 | | BC007097 | gi\|13937968\|gb\|BC007097.1BC007097 | 1.9E−248 |
| | | | | | Homo sapiens, tissue inhibitor of | |
| | | | | | metalloproteinase 1 (erythroid potentiating | |
| | | | | | activity, collagena | |
| 4293 | M00042864A:E05 | MA172:E06 | 0.59184 | | | |
| 4294 | M00042864D:E06 | MA172:F06 | | NM_007099 | gi\|6005987\|ref\|NM_007099.1 Homo | 3.5E−228 |
| | | | | | sapiens acid phosphatase 1, soluble | |
| | | | | | (ACP1), transcript variant b, mRNA | |
| 4295 | M00055514B:A05 | MA168:E12 | | BC001190 | gi\|12654700\|gb\|BC001190.1BC001190 | 1.4E−230 |
| | | | | | Homo sapiens, Similar to creatine kinase, | |
| | | | | | brain, clone MGC: 3160 IMAGE: 3354679, | |
| | | | | | mRNA, complete cds | |
| 4296 | M00056763B:A12 | MA175:D06 | | NM_004417 | gi\|7108342\|ref\|NM_004417.2 Homo | 6.4E−267 |
| | | | | | sapiens dual specificity phosphatase 1 | |
| | | | | | (DUSP1), mRNA | |
| 4297 | M00056767D:F06 | MA175:F06 | | AF203815 | gi\|6979641\|gb\|AF203815.1AF203815 | 8.6E−285 |
| | | | | | Homo sapiens alpha gene sequence | |
| 4298 | M00056821A:D08 | MA175:A12 | | NM_001016 | gi\|14277699\|ref\|NM_001016.2 Homo | 8.3E−220 |
| | | | | | sapiens ribosomal protein S12 (RPS12), | |
| | | | | | mRNA | |
| 4299 | M00056822C:G03 | MA175:C12 | | NM_000970 | gi\|16753226\|ref\|NM_000970.2 Homo | 3.4E−284 |
| | | | | | sapiens ribosomal protein L6 (RPL6), | |
| | | | | | mRNA | |
| 4300 | M00056823D:H02 | MA175:E12 | | BC018828 | gi\|17402971\|gb\|BC018828.1BC018828 | 1.9E−276 |
| | | | | | Homo sapiens, clone IMAGE: 3343539, | |
| | | | | | mRNA | |
| 4301 | RG:1609994:10014:A06 | MA163:A06 | | BC006322 | gi\|13623444\|gb\|BC006322.1BC006322 | 1E−300 |
| | | | | | Homo sapiens, activating transcription | |
| | | | | | factor 3, clone MGC: 12746 | |
| | | | | | IMAGE: 4138076, mRNA, complete cd | |
| 4302 | RG:1667183:10014:F12 | MA163:F12 | | BC000013 | gi\|12652546\|gb\|BC000013.1BC000013 | 5.4E−58 |
| | | | | | Homo sapiens, insulin-like growth factor | |
| | | | | | binding protein 3, clone MGC: 2305 | |
| | | | | | IMAGE: 3506666, mRNA, c | |
| 4303 | M00043358D:C06 | MA183:A06 | | AF113008 | gi\|6642739\|gb\|AF113008.1AF113008 | 1.5E−152 |
| | | | | | Homo sapiens clone FLB0708 mRNA | |
| | | | | | sequence | |
| 4304 | M00054558B:E05 | MA185:A06 | 0.69811 | BC014498 | gi\|15680272\|gb\|BC014498.1BC014498 | 1.1E−27 |
| | | | | | Homo sapiens, clone IMAGE: 4856273, | |
| | | | | | mRNA | |
| 4305 | M00043361B:G03 | MA183:E06 | | NM_001025 | gi\|14790142\|ref\|NM_001025.2 Homo | 1.3E−218 |
| | | | | | sapiens ribosomal protein S23 (RPS23), | |
| | | | | | mRNA | |
| 4306 | M00043408C:D11 | MA183:G12 | | U14967 | gi\|550014\|gb\|U14967.1HSU14967 Human | 1.4E−283 |
| | | | | | ribosomal protein L21 mRNA, complete | |
| | | | | | cds | |
| 4307 | M00054632A:E11 | MA185:H12 | 0.18764 | X73459 | gi\|313660\|emb\|X73459.1HSSRP14A | 2E−140 |
| | | | | | H. sapiens mRNA for signal recognition | |
| | | | | | particle subunit 14 | |
| 4308 | M00056661A:G05 | MA186:A06 | | L18960 | gi\|306724\|gb\|L18960.1HUMEIF4C Human | 5.2E−280 |
| | | | | | protein synthesis factor (eIF-4C) mRNA, | |
| | | | | | complete cds | |
| 4309 | M00056661C:C11 | MA186:B06 | | S72481 | gi\|632789\|gb\|S72481.1S72481 pantophysin | 3.4E−281 |
| | | | | | [human, keratinocyte line HaCaT, mRNA, | |
| | | | | | 2106 nt] | |
| 4310 | M00055412D:E05 | MA199:B06 | | M26697 | gi\|189311\|gb\|M26697.1HUMNUMB23 | 8.9E−176 |
| | | | | | Human nucleolar protein (B23) mRNA, | |
| | | | | | complete cds | |
| 4311 | M00055413A:G12 | MA199:C06 | | BC012354 | gi\|15214456\|gb\|BC012354.1BC012354 | 1.9E−95 |
| | | | | | Homo sapiens, clone MGC: 20390 | |
| | | | | | IMAGE: 4564801, mRNA, complete cds | |
| 4312 | M00055414D:A09 | MA199:D06 | | X06705 | gi\|35511\|emb\|X06705.1HSPLAX Human | 4.1E−187 |
| | | | | | PLA-X mRNA | |
| 4313 | M00056707B:C01 | MA186:C12 | | AF178581 | gi\|10800410\|gb\|AF178581.2AF178581 | 1.3E−252 |
| | | | | | Homo sapiens nasopharyngeal carcinoma | |
| | | | | | gene sequence | |
| 4314 | M00056237D:C10 | MA181:D01 | 0.64821 | | | |
| 4315 | M00056238B:D03 | MA181:E01 | | AF083241 | gi\|5106776\|gb\|AF083241.1HSPC024 | 9.4E−257 |
| | | | | | Homo sapiens HSPC024 mRNA, complete | |
| | | | | | cds | |
| 4316 | M00056239B:D05 | MA181:G01 | 0.89873 | | | |
| 4317 | M00056241B:H07 | MA181:H01 | 0.625 | NM_033340 | gi\|1571870\|ref\|NM_033340.1 Homo | 2.2E−50 |
| | | | | | sapiens caspase 7, apoptosis-related | |
| | | | | | cysteine protease (CASP7), transcript | |
| | | | | | variant beta, mRNA | |
| 4318 | 1:2921194:04B02:C06 | MA118:C06 | | AB006780 | gi\|2385451\|dbj\|AB006780.1AB006780 | 3.1E−222 |
| | | | | | Homo sapiens mRNA for galectin-3, | |
| | | | | | complete cds | |
| 4319 | I:1624865:04B02:G06 | MA118:G06 | | U15009 | gi\|600749\|gb\|U15009.1HSU15009 Human | 4.7E−246 |
| | | | | | SnRNP core protein Sm D3 mRNA, | |
| | | | | | complete cds | |
| 4320 | I:1728607:04A02:H06 | MA116:H06 | | BC016164 | gi\|16740573\|gb\|BC016164.1BC016164 | IE−262 |
| | | | | | Homo sapiens, small inducible cytokine | |
| | | | | | subfamily D (Cys-X3-Cys), member 1 | |
| | | | | | (fractalkine, neurotact | |
| 4321 | I:2827453:04B02:H06 | MA118:H06 | | U27143 | gi\|862932\|gb\|U27143.1HSU27143 Human | 2.5E−113 |
| | | | | | protein kinase C inhibitor-I cDNA, | |
| | | | | | complete cds | |
| 4322 | I:2070593:04B02:D12 | MA118:D12 | | D83004 | gi\|1181557\|dbj\|D83004.1D83004 Human | 1.5E−233 |
| | | | | | epidennoid carcinoma mRNA for | |
| | | | | | ubiquitin-conjugating enzyme E2 similar to | |
| | | | | | Drosophila bendless ge | |
| 4323 | I:2683114:04A02:H12 | MA116:H12 | | L20493 | gi\|306754\|gb\|L20493.1HUMGAGLUTD | 1E−300 |
| | | | | | Human gamma-glutamyl transpeptidase | |
| | | | | | mRNA, complete cds | |
| 4324 | I:1809336:02A02:G06 | MA108:G06 | | U09117 | gi\|483919\|gb\|U09117.1HSU09117 Human | 1.3E−280 |
| | | | | | phospholipase c delta 1 mRNA, complete | |
| | | | | | cds | |

### Example 50

### Detection of Differential Expression Using Arrays

[0575] cDNA probes were prepared from total RNA isolated from the patient cells described above. Since LCM provides for the isolation of specific cell types to provide a substantially homogenous cell sample, this provided for a similarly pure RNA sample.

[0576] Total RNA was first reverse transcribed into cDNA using a primer containing a T7 RNA polymerase promoter, followed by second strand DNA synthesis. cDNA was then transcribed in vitro to produce antisense RNA using the T7 promoter-mediated expression (see, e.g., Luo et al. (1999) Nature Med 5:117-122), and the antisense RNA was then converted into cDNA. The second set of cDNAs were again transcribed in vitro, using the T7 promoter, to provide antisense RNA. Optionally, the RNA was again converted into cDNA, allowing for up to a third round of T7-mediated amplification to produce more antisense RNA. Thus the procedure provided for two or three rounds of in vitro transcription to produce the final RNA used for fluorescent labeling.

[0577] Fluorescent probes were generated by first adding control RNA to the antisense RNA mix, and producing fluorescently labeled cDNA from the RNA starting material. Fluorescently labeled cDNAs prepared from the tumor RNA sample were compared to fluorescently labeled cDNAs prepared from normal cell RNA sample. For example, the cDNA probes from the normal cells were labeled with Cy3 fluorescent dye (green) and the cDNA probes prepared from the tumor cells were labeled with Cy5 fluorescent dye (red), and vice versa.

[0578] Each array used had an identical spatial layout and control spot set. Each microarray was divided into two areas, each area having an array with, on each half, twelve groupings of 32×12 spots, for a total of about 9,216 spots on each array. The two areas are spotted identically which provide for at least two duplicates of each clone per array.

[0579] Polynucleotides for use on the arrays were obtained from both publicly available sources and from cDNA libraries generated from selected cell lines and patient tissues as described above and in Table 29. PCR products of from about 0.5 kb to 2.0 kb amplified from these sources were spotted onto the array using a Molecular Dynamics Gen III spotter according to the manufacturer's recommendations. The first row of each of the 24 regions on the array had about 32 control spots, including 4 negative control spots and 8 test polynucleotides. The test polynucleotides were spiked into each sample before the labeling reaction with a range of concentrations from 2-600 pg/slide and ratios of 1:1. For each array design, two slides were hybridized with the test samples reverse-labeled in the labeling reaction. This provided for about four duplicate measurements for each clone, two of one color and two of the other, for each sample.

[0580] The differential expression assay was performed by mixing equal amounts of probes from tumor cells and normal cells of the same patient. The arrays were prehybridized by incubation for about 2 hrs at 60° C. in 5×SSC/0.2% SDS/1 mM EDTA, and then washed three times in water and twice in isopropanol. Following prehybridization of the array, the probe mixture was then hybridized to the array under conditions of high stringency (overnight at 42° C. in 50% formamide, 5×SSC, and 0.2% SDS. After hybridization, the array was washed at 55° C. three times as follows: 1) first wash in 1×SSC/0.2% SDS; 2) second wash in 0.1×SSC/0.2% SDS; and 3) third wash in 0.1×SSC.

[0581] The arrays were then scanned for green and red fluorescence using a Molecular Dynamics Generation III dual color laser-scanner/detector. The images were processed using BioDiscovery Autogene software, and the data from each scan set normalized to provide for a ratio of expression relative to normal. Data from the microarray experiments was analyzed according to the algorithms described in U.S. application Ser. No. 60/252,358, filed Nov. 20, 2000, by E. J. Moler, M. A. Boyle, and F. M. Randazzo, and entitled “Precision and accuracy in cDNA microarray data,” which application is specifically incorporated herein by reference.

[0582] The experiment was repeated, this time labeling the two probes with the opposite color in order to perform the assay in both “color directions.” Each experiment was sometimes repeated with two more slides (one in each color direction). The level fluorescence for each sequence on the array expressed as a ratio of the geometric mean of 8 replicate spots/genes from the four arrays or 4 replicate spots/gene from 2 arrays or some other permutation. The data were normalized using the spiked positive controls present in each duplicated area, and the precision of this normalization was included in the final determination of the significance of each differential. The fluorescent intensity of each spot was also compared to the negative controls in each duplicated area to determine which spots have detected significant expression levels in each sample.

[0583] A statistical analysis of the fluorescent intensities was applied to each set of duplicate spots to assess the precision and significance of each differential measurement, resulting in a p-value testing the null hypothesis that there is no differential in the expression level between the tumor and normal samples of each patient. During initial analysis of the microarrays, the hypothesis was accepted if p>1 , and the differential ratio was set to 1.000 for those spots. All other spots have a significant difference in expression between the tumor and normal sample. If the tumor sample has detectable expression and the normal does not, the ratio is truncated at 1000 since the value for expression in the normal sample would be zero, and the ratio would not be a mathematically useful value (e.g., infinity). If the normal sample has detectable expression and the tumor does not, the ratio is truncated to 0.001, since the value for expression in the tumor sample would be zero and the ratio would not be a mathematically useful value. These latter two situations are referred to herein as “on/off.” Database tables were populated using a 95% confidence level (p>0.05).

[0584] Table 31 provides the results for gene products that were expressed by at least 2-fold or greater in the colon tumor samples relative to normal tissue samples in at least 20% of the patients tested, or gene products in which expression levels of the gene in colon tumor cells was less than or equal to ½ of the expression level in normal tissue samples in at least 20% of the patients tested. Table 31 includes: (1) the “SEQ ID NO” of the sequence tested; (2) the spot identification number (“Spot ID”); (3) the “Clone ID” assigned to the clone from which the sequence was isolated; (4) the “MAClone ID” assigned to the clone from which the sequence was isolated; (5) the percentage of patients tested in which expression levels (e.g., as message level) of the gene was at least 2-fold greater in cancerous tissue than in matched normal tissue (“>=2×”); (6) the percentage of patients tested in which expression levels (e.g., as message level) of the gene was at least 5-fold greater in cancerous tissue than in matched normal tissue (“>=5×”); (7) the percentage of patients tested in which expression levels (e.g., as message level) of the gene was less than or equal to ½ of the expression level in matched normal cells (“<=half×”); and (8) the number of patients analyzed (“Num Ratios”).

[0585] Table 31 also includes the results from each patient, identified by the patient ID number (e.g., 10). This data represents the ratio of differential expression for the samples tested from that particular patient's tissues (e.g., “10” is the ratio from the tissue samples of Patient ID no. 10). The ratios of differential expression are expressed as a normalized hybridization signal associated with the tumor probe divided by the normalized hybridization signal with the normal probe. Thus, a ratio greater than 1 indicates that the gene product is increased in expression in cancerous cells relative to normal cells, while a ratio of less than 1 indicates the opposite.

[0586] These data provide evidence that the genes represented by the polynucleotides having the indicated sequences are differentially expressed in colon cancer as compared to normal non-cancerous colon tissue.

### Example 51

### Antisense Regulation of Gene Expression

[0587] The expression of the differentially expressed genes represented by the polynucleotides in the cancerous cells can be analyzed using antisense knockout technology to confirm the role and function of the gene product in tumorigenesis, e.g., in promoting a metastatic phenotype.

[0588] A number of different oligonucleotides complementary to the mRNA generated by the differentially expressed genes identified herein can be designed as potential antisense oligonucleotides, and tested for their ability to suppress expression of the genes. Sets of antisense oligomers specific to each candidate target are designed using the sequences of the polynucleotides corresponding to a differentially expressed gene and the software program HYBsimulator Version 4 (available for Windows 95/Windows NT or for Power Macintosh, RNAture, Inc. 1003 Health Sciences Road, West, Irvine, Calif. 92612 USA). Factors that are considered when designing antisense oligonucleotides include: 1) the secondary structure of oligonucleotides; 2) the secondary structure of the target gene; 3) the specificity with no or minimum cross-hybridization to other expressed genes; 4) stability; 5) length and 6) terminal GC content. The antisense oligonucleotide is designed so that it will hybridize to its target sequence under conditions of high stringency at physiological temperatures (e.g., an optimal temperature for the cells in culture to provide for hybridization in the cell, e.g., about 37° C.), but with minimal formation of homodimers.

[0589] Using the sets of oligomers and the HYBsimulator program, three to ten antisense oligonucleotides and their reverse controls are designed and synthesized for each candidate mRNA transcript, which transcript is obtained from the gene corresponding to the target polynucleotide sequence of interest. Once synthesized and quantitated, the oligomers are screened for efficiency of a transcript knock-out in a panel of cancer cell lines. The efficiency of the knock-out is determined by analyzing mRNA levels using lightcycler quantification. The oligomers that resulted in the highest level of transcript knock-out, wherein the level was at least about 50%, preferably about 80-90%, up to 95% or more up to undetectable message, are selected for use in a cell-based proliferation assay, an anchorage independent growth assay, and an apoptosis assay.

[0590] The ability of each designed antisense oligonucleotide to inhibit gene expression is tested through transfection into SW620 colon carcinoma cells. For each transfection mixture, a carrier molecule (such as a lipid, lipid derivative, lipid-like molecule, cholesterol, cholesterol derivative, or cholesterol-like molecule) is prepared to a working concentration of 0.5 mM in water, sonicated to yield a uniform solution, and filtered through a 0.45 μm PVDF membrane. The antisense or control oligonucleotide is then prepared to a working concentration of 100 μM in sterile Millipore water. The oligonucleotide is further diluted in OptiMEM™ (Gibco/BRL), in a microfuge tube, to 2 μM, or approximately 20 μg oligo/ml of OptiMEM™. In a separate microfuge tube, the carrier molecule, typically in the amount of about 1.5-2 nmol carrier/μg antisense oligonucleotide, is diluted into the same volume of OptiMEM™ used to dilute the oligonucleotide. The diluted antisense oligonucleotide is immediately added to the diluted carrier and mixed by pipetting up and down. Oligonucleotide is added to the cells to a final concentration of 30 nM.

[0591] The level of target mRNA that corresponds to a target gene of interest in the transfected cells is quantitated in the cancer cell lines using the Roche LightCycler™ real-time PCR machine. Values for the target mRNA are normalized versus an internal control (e.g., beta-actin). For each 20 μl reaction, extracted RNA (generally 0.2-1 μg total) is placed into a sterile 0.5 or 1.5 ml microcentrifuge tube, and water is added to a total volume of 12.5 μl. To each tube is added 7.5 μl of a buffer/enzyme mixture, prepared by mixing (in the order listed) 2.5 μl H₂O, 2.0 μl 10× reaction buffer, 10 μl oligo dT (20 pmol), 1.0 μl dNTP mix (10 mM each), 0.5 μl RNAsin® (20 u) (Ambion, Inc., Hialeah, Fla.), and 0.5 μl MMLV reverse transcriptase (50 u) (Ambion, Inc.). The contents are mixed by pipetting up and down, and the reaction mixture is incubated at 42° C. for 1 hour. The contents of each tube are centrifuged prior to amplification.

[0592] An amplification mixture is prepared by mixing in the following order: 1× PCR buffer II, 3 mM MgCl₂, 140 μM each dNTP, 0.175 pmol each oligo, 1:50,000 dil of SYBR® Green, 0.25 mg/ml BSA, 1 unit Taq polymerase, and H₂O to 20 μl. (PCR buffer II is available in 10× concentration from Perkin-Elmer, Norwalk, Conn. ). In 1× concentration it contains 10 mM Tris pH 8.3 and 50 mM KCl. SYBR® Green (Molecular Probes, Eugene, Oreg.) is a dye which fluoresces when bound to double stranded DNA. As double stranded PCR product is produced during amplification, the fluorescence from SYBR® Green increases. To each 20 μl aliquot of amplification mixture, 2 μl of template RT is added, and amplification is carried out according to standard protocols. The results are expressed as the percent decrease in expression of the corresponding gene product relative to non-transfected cells, vehicle-only transfected (mock-transfected) cells, or cells transfected with reverse control oligonucleotides.

### Example 52

### Effect of Expression on Proliferation

[0593] The effect of gene expression on the inhibition of cell proliferation can be assessed in metastatic breast cancer cell lines (MDA-MB-231 (“231”)); SW620 colon colorectal carcinoma cells; SKOV3 cells (a human ovarian carcinoma cell line); or LNCaP, PC3, 22Rv1, MDA-PCA-2b, or DU145 prostate cancer cells.

[0594] Cells are plated to approximately 60-80% confluency in 96-well dishes. Antisense or reverse control oligonucleotide is diluted to 2 μM in OptiMEM™. The oligonucleotide-OptiMEM™ can then be added to a delivery vehicle, which delivery vehicle can be selected so as to be optimized for the particular cell type to be used in the assay. The oligo/delivery vehicle mixture is then further diluted into medium with serum on the cells. The final concentration of oligonucleotide for all experiments can be about 300 nM.

[0595] Antisense oligonucleotides are prepared as described above (see Example 51). Cells are transfected overnight at 37° C. and the transfection mixture is replaced with fresh medium the next morning. Transfection is carried out as described above in Example 51.

[0596] Those antisense oligonucleotides that result in inhibition of proliferation of SW620 cells indicate that the corresponding gene plays a role in production or maintenance of the cancerous phenotype in cancerous colon cells. Those antisense oligonucleotides that inhibit proliferation in SKOV3 cells represent genes that play a role in production or maintenance of the cancerous phenotype in cancerous breast cells. Those antisense oligonucleotides that result in inhibition of proliferation of MDA-MB-231 cells indicate that the corresponding gene plays a role in production or maintenance of the cancerous phenotype in cancerous ovarian cells. Those antisense oligonucleotides that inhibit proliferation in LNCaP, PC3, 22Rv1, MDA-PCA-2b, or DU145 cells represent genes that play a role in production or maintenance of the cancerous phenotype in cancerous prostate cells.

### Example 53

### Effect of Gene Expression on Cell Migration

[0597] The effect of gene expression on the inhibition of cell migration can be assessed in SW620 colon cancer cells using static endothelial cell binding assays, non-static endothelial cell binding assays, and transmigration assays.

[0598] For the static endothelial cell binding assay, antisense oligonucleotides are prepared as described above (see Example 51). Two days prior to use, colon cancer cells (CaP) are plated and transfected with antisense oligonucleotide as described above (see Examples 51 and 52). On the day before use, the medium is replaced with fresh medium, and on the day of use, the medium is replaced with fresh medium containing 2 μM CellTracker green CMFDA (Molecular Probes, Inc.) and cells are incubated for 30 min. Following incubation, CaP medium is replaced with fresh medium (no CMFDA) and cells are incubated for an additional 30-60 min. CaP cells are detached using CMF PBS/2.5 mM EDTA or trypsin, spun and resuspended in DMEM/1% BSA/10 mM HEPES pH 7.0. Finally, CaP cells are counted and resuspended at a concentration of 1×10⁶ cells/ml.

[0599] Endothelial cells (EC) are plated onto 96-well plates at 40-50% confluence 3 days prior to use. On the day of use, EC are washed 1× with PBS and 506 DMDM/1%BSA/10 mM HEPES pH 7 is added to each well. To each well is then added 50K (50λ) CaP cells in DMEM/1% BSA/10 mM HEPES pH 7. The plates are incubated for an additional 30 min and washed 5× with PBS containing Ca⁺⁺ and Mg⁺⁺. After the final wash, 100 μL PBS is added to each well and fluorescence is read on a fluorescent plate reader (Ab492/Em 516 nm).

[0600] For the non-static endothelial cell binding assay, CaP are prepared as described above. EC are plated onto 24-well plates at 30-40% confluence 3 days prior to use. On the day of use, a subset of EC are treated with cytokine for 6 hours then washed 2× with PBS. To each well is then added 150-200K CaP cells in DMEM/1% BSA/10 mM HEPES pH 7. Plates are placed on a rotating shaker (70 RPM) for 30 min and then washed 3× with PBS containing Ca⁺⁺ and Mg⁺⁺. After the final wash, 500 μL PBS is added to each well and fluorescence is read on a fluorescent plate reader (Ab492/Em 516 nm).

[0601] For the transmigration assay, CaP are prepared as described above with the following changes. On the day of use, CaP medium is replaced with fresh medium containing 5 μM CellTracker green CMFDA (Molecular Probes, Inc.) and cells are incubated for 30 min. Following incubation, CaP medium is replaced with fresh medium (no CMFDA) and cells are incubated for an additional 30-60 min. CaP cells are detached using CMF PBS/2.5 mM EDTA or trypsin, spun and resuspended in EGM-2-MV medium. Finally, CaP cells are counted and resuspended at a concentration of 1×10⁶ cells/ml.

[0602] EC are plated onto FluorBlok transwells (BD Biosciences) at 30-40% confluence 5-7 days before use. Medium is replaced with fresh medium 3 days before use and on the day of use. To each transwell is then added 50K labeled CaP. 30 min prior to the first fluorescence reading, 10 μg of FITC-dextran (10K MW) is added to the EC plated filter. Fluorescence is then read at multiple time points on a fluorescent plate reader (Ab492/Em 516 nm).

[0603] Those antisense oligonucleotides that result in inhibition of binding of SW620 colon cancer cells to endothelial cells indicate that the corresponding gene plays a role in the production or maintenance of the cancerous phenotype in cancerous colon cells. Those antisense oligonucleotides that result in inhibition of endothelial cell transmigration by SW620 colon cancer cells indicate that the corresponding gene plays a role in the production or maintenance of the cancerous phenotype in cancerous colon cells.

### Example 54

### Effect of Gene Expression on Colony Formation

[0604] The effect of gene expression upon colony formation of SW620 cells, SKOV3 cells, MD-MBA-231 cells, LNCaP cells, PC3 cells, 22Rv1 cells, MDA-PCA-2b cells, and DU145 cells can be tested in a soft agar assay. Soft agar assays are conducted by first establishing a bottom layer of 2 ml of 0.6% agar in media plated fresh within a few hours of layering on the cells. The cell layer is formed on the bottom layer by removing cells transfected as described above from plates using 0.05% trypsin and washing twice in media. The cells are counted in a Coulter counter, and resuspended to 106 per ml in media. 10 μl aliquots are placed with media in 96-well plates (to check counting with WST1), or diluted further for the soft agar assay. 2000 cells are plated in 800 μl 0.4% agar in duplicate wells above 0.6% agar bottom layer. After the cell layer agar solidifies, 2 ml of media is dribbled on top and antisense or reverse control oligo (produced as described in Example 51) is added without delivery vehicles. Fresh media and oligos are added every 3-4 days. Colonies form in 10 days to 3 weeks. Fields of colonies are counted by eye. Wst-1 metabolism values can be used to compensate for small differences in starting cell number. Larger fields can be scanned for visual record of differences.

[0605] Those antisense oligonucleotides that result in inhibition of colony formation of SW620 cells indicate that the corresponding gene plays a role in production or maintenance of the cancerous phenotype in cancerous colon cells. Those antisense oligonucleotides that inhibit colony formation in SKOV3 cells represent genes that play a role in production or maintenance of the cancerous phenotype in cancerous breast cells. Those antisense oligonucleotides that result in inhibition of colony formation of MDA-MB-231 cells indicate that the corresponding gene plays a role in production or maintenance of the cancerous phenotype in cancerous ovarian cells. Those antisense oligonucleotides that inhibit colony formation in LNCaP, PC3, 22Rv1, MDA-PCA-2b, or DU145 cells represent genes that play a role in production or maintenance of the cancerous phenotype in cancerous prostate cells.

### Example 55

### Induction of Cell Death Upon Depletion of Polypeptides by Depletion of mRNA (“Antisense Knockout”)

[0606] In order to assess the effect of depletion of a target message upon cell death, SW620 cells, or other cells derived from a cancer of interest, can be transfected for proliferation assays. For cytotoxic effect in the presence of cisplatin (cis), the same protocol is followed but cells are left in the presence of 2 μM drug. Each day, cytotoxicity is monitored by measuring the amount of LDH enzyme released in the medium due to membrane damage. The activity of LDH is measured using the Cytotoxicity Detection Kit from Roche Molecular Biochemicals. The data is provided as a ratio of LDH released in the medium vs. the total LDH present in the well at the same time point and treatment (rLDH/tLDH). A positive control using antisense and reverse control oligonucleotides for BCL2 (a known anti-apoptotic gene) is included; loss of message for BCL2 leads to an increase in cell death compared with treatment with the control oligonucleotide (background cytotoxicity due to transfection).

### Example 56

### Functional Analysis of Gene Products Differentially Expressed in Colon Cancer in Patients

[0607] The gene products of sequences of a gene differentially expressed in cancerous cells can be further analyzed to confirm the role and function of the gene product in tumorigenesis, e.g., in promoting or inhibiting development of a metastatic phenotype. For example, the function of gene products corresponding to genes identified herein can be assessed by blocking function of the gene products in the cell. For example, where the gene product is secreted or associated with a cell surface membrane, blocking antibodies can be generated and added to cells to examine the effect upon the cell phenotype in the context of, for example, the transformation of the cell to a cancerous, particularly a metastatic, phenotype. In order to generate antibodies, a clone corresponding to a selected gene product is selected, and a sequence that represents a partial or complete coding sequence is obtained. The resulting clone is expressed, the polypeptide produced isolated, and antibodies generated. The antibodies are then combined with cells and the effect upon tumorigenesis assessed.

[0608] Where the gene product of the differentially expressed genes identified herein exhibits sequence homology to a protein of known function (e.g., to a specific kinase or protease) and/or to a protein family of known function (e.g., contains a domain or other consensus sequence present in a protease family or in a kinase family), then the role of the gene product in tumorigenesis, as well as the activity of the gene product, can be examined using small molecules that inhibit or enhance function of the corresponding protein or protein family.

[0609] Additional functional assays include, but are not necessarily limited to, those that analyze the effect of expression of the corresponding gene upon cell cycle and cell migration. Methods for performing such assays are well known in the art.

### Example 57

### Contig Assembly and Addition Gene Characterization

[0610] The sequences of the polynucleotides provided in the present invention can be used to extend the sequence information of the gene to which the polynucleotides correspond (e.g., a gene, or mRNA encoded by the gene, having a sequence of the polynucleotide described herein). This expanded sequence information can in turn be used to further characterize the corresponding gene, which in turn provides additional information about the nature of the gene product (e.g., the normal function of the gene product). The additional information can serve to provide additional evidence of the gene product's use as a therapeutic target, and provide further guidance as to the types of agents that can modulate its activity.

[0611] In one example, a contig is assembled using a sequence of a polynucleotide of the present invention, which is present in a clone. A “contig” is a contiguous sequence of nucleotides that is assembled from nucleic acid sequences having overlapping (e.g., shared or substantially similar) sequence information. The sequences of publicly-available ESTs (Expressed Sequence Tags) and the sequences of various clones from several cDNA libraries synthesized at Chiron can be used in the contig assembly.

[0612] The contig is assembled using the software program Sequencher, version 4.05, according to the manufacturer's instructions and an overview alignment of the contiged sequences is produced. The sequence information obtained in the contig assembly can then be used to obtain a consensus sequence derived from the contig using the Sequencher program. The consensus sequence is used as a query sequence in a TeraBLASTN search of the DGTI DoubleTwist Gene Index (DoubleTwist, Inc., Oakland, Calif.), which contains all the EST and non-redundant sequence in public databases.

[0613] Through contig assembly and the use of homology searching software programs, the sequence information provided herein can be readily extended to confirm, or confirm a predicted, gene having the sequence of the polynucleotides described in the present invention. Further the information obtained can be used to identify the function of the gene product of the gene corresponding to the polynucleotides described herein. While not necessary to the practice of the invention, identification of the function of the corresponding gene, can provide guidance in the design of therapeutics that target the gene to modulate its activity and modulate the cancerous phenotype (e.g., inhibit metastasis, proliferation, and the like).

### Example 58

### Source of biological Materials

[0614] The biological materials used in the experiments that led to the present invention are described below.

[0615] Source of Patient Tissue Samples

[0616] Normal and cancerous tissues were collected from patients using laser capture microdissection (LCM) techniques, which techniques are well known in the art (see, e.g., Ohyama et al. (2000) Biotechniques 29:530-6; Curran et al. (2000) Mol. Pathol. 53:64-8; Suarez-Quian et al. (1999) Biotechniques 26:328-35; Simone et al. (1998) Trends Genet 14:272-6; Conia et al. (1997) J. Clin. Lab. Anal. 11:28-38; Emmert-Buck et al. (1996) Science 274:998-1001). Table 32 provides information about each patient from which colon tissue samples were isolated, including: the Patient ID (“PT ID”) and Path ReportID (“Path ID”), which are numbers assigned to the patient and the pathology reports for identification purposes; the group (“Grp”) to which the patients have been assigned; the anatomical location of the tumor (“Anatom Loc”); the primary tumor size (“Size”); the primary tumor grade (“Grade”); the identification of the histopathological grade (“Histo Grade”); a description of local sites to which the tumor had invaded (“Local Invasion”); the presence of lymph node metastases (“Lymph Met”); the incidence of lymph node metastases (provided as a number of lymph nodes positive for metastasis over the number of lymph nodes examined) (“Lymph Met Incid”); the regional lymphnode grade (“Reg Lymph Grade”); the identification or detection of metastases to sites distant to the tumor and their location (“Dist Met & Loc”); the grade of distant metastasis (“Dist Met Grade”); and general comments about the patient or the tumor (“Comments”). Histopathology of all primary tumors indicated the tumor was adenocarcinoma except for Patient ID Nos. 130 (for which no information was provided), 392 (in which greater than 50% of the cells were mucinous carcinoma), and 784 (adenosquamous carcinoma). Extranodal extensions were described in three patients, Patient ID Nos. 784, 789, and 791. Lymphovascular invasion was described in Patient ID Nos. 128, 228, 278, 517, 534, 784, 786, 789, 791, 890, and 892. Crohn's-like infiltrates were described in seven patients, Patient ID Nos. 52, 264, 268, 392, 393, 784, and 791.

TABLE 32

| | | | | | | | | | Lymph | Reg | | Dist | |
|---|---|---|---|---|---|---|---|---|---|---|---|---|---|
| | Path | | Anatom | | | Histo | | Lymph | Met | Lymph | Dist Met | Met | |
| Pt ID | ID | Grp | Loc | Size | Grade | Grade | Local Invasion | Met | Incid | Grade | & Loc | Grade | Comment |
| 10 | 16 | III | Cecum | 8.5 | T3 | G2 | through | Pos | 1/17 | N1 | Neg | M0 | Moderately |
| | | | | | | | muscularis propria | | | | | | differentiated |
| | | | | | | | approaching | | | | | | |
| | | | | | | | pericolic fat, but | | | | | | |
| | | | | | | | not at serosal | | | | | | |
| | | | | | | | surface | | | | | | |
| 15 | 21 | III | Ascending | 4.0 | T3 | G2 | Extending into | Pos | 3/8 | N1 | Neg | MX | invasive |
| | | | colon | | | | subserosal adipose | | | | | | adeno- |
| | | | | | | | tissue | | | | | | carcinoma, |
| | | | | | | | | | | | | | moderately |
| | | | | | | | | | | | | | differentiated; |
| | | | | | | | | | | | | | focal perineural |
| | | | | | | | | | | | | | invasion is seen |
| 52 | 71 | II | Cecum | 9.0 | T3 | G3 | Invasion through | Neg | 0/12 | N0 | Neg | M0 | Hyperplastic |
| | | | | | | | muscularis | | | | | | polyp in |
| | | | | | | | propria, subserosal | | | | | | appendix. |
| | | | | | | | involvement; | | | | | | |
| | | | | | | | ileocec. valve | | | | | | |
| | | | | | | | involvement | | | | | | |
| 121 | 140 | II | Sigmoid | 6 | T4 | G2 | Invasion of | Neg | 0/34 | N0 | Neg | M0 | Perineural |
| | | | | | | | muscularis propria | | | | | | invasion; donut |
| | | | | | | | into serosa, | | | | | | anastomosis |
| | | | | | | | involving | | | | | | Neg. One |
| | | | | | | | submucosa of | | | | | | tubulovillous |
| | | | | | | | urinary bladder | | | | | | and one tubular |
| | | | | | | | | | | | | | adenoma with |
| | | | | | | | | | | | | | no high grade |
| | | | | | | | | | | | | | dysplasia. |
| 125 | 144 | II | Cecum | 6 | T3 | G2 | Invasion through | Neg | 0/19 | N0 | Neg | M0 | patient history |
| | | | | | | | the muscularis | | | | | | of metastatic |
| | | | | | | | propria into | | | | | | melanoma |
| | | | | | | | suserosal adipose | | | | | | |
| | | | | | | | tissue. Ileocecal | | | | | | |
| | | | | | | | junction. | | | | | | |
| 128 | 147 | III | Transverse | 5.0 | T3 | G2 | Invasion of | Pos | 1/5 | N1 | Neg | M0 | |
| | | | colon | | | | muscularis propria | | | | | | |
| | | | | | | | into percolonic fat | | | | | | |
| 130 | 149 | | Splenic | 5.5 | T3 | | through wall and | Pos | 10/24 | N2 | Neg | M1 | |
| | | | flexure | | | | into surrounding | | | | | | |
| | | | | | | | adipose tissue | | | | | | |
| 133 | 152 | II | Rectum | 5.0 | T3 | G2 | Invasion through | Neg | 0/9 | N0 | Neg | M0 | Small separate |
| | | | | | | | muscularis propria | | | | | | tubular |
| | | | | | | | into non- | | | | | | adenoma |
| | | | | | | | peritonealized | | | | | | (0.4 cm) |
| | | | | | | | pericolic tissue; | | | | | | |
| | | | | | | | gross | | | | | | |
| | | | | | | | configuration is | | | | | | |
| | | | | | | | annular. | | | | | | |
| 141 | 160 | IV | Cecum | 5.5 | T3 | G2 | Invasion of | Pos | 7/21 | N2 | Pos - | M1 | Perineural |
| | | | | | | | muscularis propria | | | | Liver | | invasion |
| | | | | | | | into pericolonic | | | | | | identified |
| | | | | | | | adipose tissue, but | | | | | | adjacent to |
| | | | | | | | not through serosa. | | | | | | metastatic |
| | | | | | | | Arising from | | | | | | adeno- |
| | | | | | | | tubular adenoma. | | | | | | carcinoma. |
| 156 | 175 | III | Hepatic | 3.8 | T3 | G2 | Invasion through | Pos | 2/13 | N1 | Neg | M0 | Separate |
| | | | flexure | | | | mucsularis propria | | | | | | tubolovillous |
| | | | | | | | into | | | | | | and tubular |
| | | | | | | | subserosa/pericolic | | | | | | adenomas |
| | | | | | | | adipose, no serosal | | | | | | |
| | | | | | | | involvement. | | | | | | |
| | | | | | | | Gross | | | | | | |
| | | | | | | | configuration | | | | | | |
| | | | | | | | annular. | | | | | | |
| 228 | 247 | III | Rectum | 5.8 | T3 | G2 to | Invasion through | Pos | 1/8 | N1 | Neg | MX | Hyperplastic |
| | | | | | | G3 | muscularis propria | | | | | | polyps |
| | | | | | | | to involve | | | | | | |
| | | | | | | | subserosal, | | | | | | |
| | | | | | | | perirectoal | | | | | | |
| | | | | | | | adipose, and | | | | | | |
| | | | | | | | serosa | | | | | | |
| 264 | 283 | II | Ascending | 5.5 | T3 | G2 | Invasion through | Neg | 0/10 | N0 | Neg | M0 | Tubulovillous |
| | | | colon | | | | muscularis propria | | | | | | adenoma with |
| | | | | | | | into subserosal | | | | | | high grade |
| | | | | | | | adipose tissue. | | | | | | dysplasia |
| 266 | 285 | III | Transverse | 9 | T3 | G2 | Invades through | Neg | 0/15 | N1 | Pos - | MX | |
| | | | colon | | | | muscularis propria | | | | Me- | | |
| | | | | | | | to involve | | | | senteric | | |
| | | | | | | | pericolonic | | | | deposit | | |
| | | | | | | | adipose, extends to | | | | | | |
| | | | | | | | serosa. | | | | | | |
| 267 | 286 | III | Ileocecal | 4.5 | T2 | G2 | Confined to | Pos | 2/12 | N1 | Neg | M0 | |
| | | | | | | | muscularis propria | | | | | | |
| 268 | 287 | I | Cecum | 6.5 | T2 | G2 | Invades full | Neg | 0/12 | N0 | Neg | M0 | |
| | | | | | | | thickness of | | | | | | |
| | | | | | | | muscularis | | | | | | |
| | | | | | | | propria, but | | | | | | |
| | | | | | | | mesenteric adipose | | | | | | |
| | | | | | | | free of malignancy | | | | | | |
| 278 | 297 | III | Rectum | 4 | T3 | G2 | Invasion into | Pos | 7/10 | N2 | Neg | M0 | Descending |
| | | | | | | | perirectal adipose | | | | | | colon polyps, |
| | | | | | | | tissue. | | | | | | no HGD or |
| | | | | | | | | | | | | | carcinoma |
| | | | | | | | | | | | | | identified . . . |
| 295 | 314 | II | Ascending | 5.0 | T3 | G2 | Invasion through | Neg | 0/12 | N0 | Neg | M0 | Melanosis coli |
| | | | colon | | | | muscularis propria | | | | | | and diverticular |
| | | | | | | | into percolic | | | | | | disease. |
| | | | | | | | adipose tissue. | | | | | | |
| 296 | 315 | III | Cecum | 5.5 | T3 | G2 | Invasion through | Pos | 2/12 | N1 | Neg | M0 | Tubulovillous |
| | | | | | | | muscularis propria | | | | | | adenoma |
| | | | | | | | and invades | | | | | | (2.0 cm) |
| | | | | | | | pericolic adipose | | | | | | with no |
| | | | | | | | tissue. Ileocecal | | | | | | high grade |
| | | | | | | | junction. | | | | | | dysplasia. Neg. |
| | | | | | | | | | | | | | liver biopsy. |
| 300 | 319 | III | De- | 5.2 | T2 | G2 | through the | Pos | 2/2 | N1 | Neg | M0 | |
| | | | scending | | | | muscularis propria | | | | | | |
| | | | colon | | | | into pericolic fat | | | | | | |
| 322 | 341 | II | Sigmoid | 7 | T3 | G2 | through the | Neg | 0/5 | N0 | Neg | M0 | vascular |
| | | | | | | | muscularis propria | | | | | | invasion is |
| | | | | | | | into pericolic fat | | | | | | identified |
| 339 | 358 | II | Recto- | 6 | T3 | G2 | Extends into | Neg | 0/6 | N0 | Neg | M0 | 1 hyperplastic |
| | | | sigmoid | | | | perirectal fat but | | | | | | polyp identified |
| | | | | | | | does not reach | | | | | | |
| | | | | | | | serosa | | | | | | |
| 341 | 360 | II | Ascending | 2 cm | T3 | G2 | Invasion through | Neg | 0/4 | N0 | Neg | MX | |
| | | | colon | invasive | | | muscularis propria | | | | | | |
| | | | | | | | to involve | | | | | | |
| | | | | | | | pericolonic fat. | | | | | | |
| | | | | | | | Arising from | | | | | | |
| | | | | | | | villous adenoma. | | | | | | |
| 356 | 375 | II | Sigmoid | 6.5 | T3 | G2 | Through colon | Neg | 0/4 | N0 | Neg | M0 | |
| | | | | | | | wall into | | | | | | |
| | | | | | | | subserosal adipose | | | | | | |
| | | | | | | | tissue. No serosal | | | | | | |
| | | | | | | | spread seen. | | | | | | |
| 360 | 412 | III | Ascending | 4.3 | T3 | G2 | Invasion thru | Pos | 1/5 | N1 | Neg | M0 | Two mucosal |
| | | | colon | | | | muscularis propria | | | | | | polyps |
| | | | | | | | to pericolonic fat | | | | | | |
| 392 | 444 | IV | Ascending | 2 | T3 | G2 | Invasion through | Pos | 1/6 | N1 | Pos - | M1 | Tumor arising |
| | | | colon | | | | muscularis propria | | | | Liver | | at prior |
| | | | | | | | into subserosal | | | | | | ileocolic |
| | | | | | | | adipose tissue, not | | | | | | surgical |
| | | | | | | | serosa. | | | | | | anastomosis. |
| 393 | 445 | II | Cecum | 6.0 | T3 | G2 | Cecum, invades | Neg | 0/21 | N0 | Neg | M0 | |
| | | | | | | | through | | | | | | |
| | | | | | | | muscularis propria | | | | | | |
| | | | | | | | to involve | | | | | | |
| | | | | | | | subserosal adipose | | | | | | |
| | | | | | | | tissue but not | | | | | | |
| | | | | | | | serosa. | | | | | | |
| 413 | 465 | IV | Cecum | 4.8 | T3 | G2 | Invasive through | Neg | 0/7 | N0 | Pos - | M1 | rediagnosis of |
| | | | | | | | muscularis to | | | | Liver | | oophorectomy |
| | | | | | | | involve periserosal | | | | | | path to |
| | | | | | | | fat; abutting | | | | | | metastatic |
| | | | | | | | ileocecal junction. | | | | | | colon cancer. |
| 452 | 504 | II | Ascending | 4 | T3 | G2 | through | Neg | 0/39 | N0 | Neg | M0 | |
| | | | colon | | | | muscularis propria | | | | | | |
| | | | | | | | approaching | | | | | | |
| | | | | | | | pericolic fat, but | | | | | | |
| | | | | | | | not at serosal | | | | | | |
| | | | | | | | surface | | | | | | |
| 505 | 383 | IV | | 7.5 | T3 | G2 | Invasion through | Pos | 2/17 | N1 | Pos - | M1 | Anatomical |
| | | | | | | | muscularis propria | | | | Liver | | location of |
| | | | | | | | involving pericolic | | | | | | primary not |
| | | | | | | | adipose, serosal | | | | | | notated in |
| | | | | | | | surface uninvolved | | | | | | report. |
| | | | | | | | | | | | | | Evidence of |
| | | | | | | | | | | | | | chronic colitis. |
| 517 | 395 | IV | Sigmoid | 3 | T3 | G2 | penetrates | Pos | 6/6 | N2 | Neg | M0 | No mention of |
| | | | | | | | muscularis | | | | | | distant met in |
| | | | | | | | propria, involves | | | | | | report |
| | | | | | | | pericolonic fat. | | | | | | |
| 534 | 553 | II | Ascending | 12 | T3 | G3 | Invasion through | Neg | 0/8 | N0 | Neg | M0 | Omentum with |
| | | | colon | | | | the muscularis | | | | | | fibrosis and fat |
| | | | | | | | propria involving | | | | | | necrosis. Small |
| | | | | | | | pericolic fat. | | | | | | bowel with |
| | | | | | | | Serosa free of | | | | | | acute and |
| | | | | | | | tumor. | | | | | | chronic |
| | | | | | | | | | | | | | serositis, focal |
| | | | | | | | | | | | | | abscess and |
| | | | | | | | | | | | | | adhesions. |
| 546 | 565 | IV | Ascending | 5.5 | T3 | G2 | Invasion through | Pos | 6/12 | N2 | Pos - | M1 | |
| | | | colon | | | | muscularis propria | | | | Liver | | |
| | | | | | | | extensively | | | | | | |
| | | | | | | | through | | | | | | |
| | | | | | | | submucosal and | | | | | | |
| | | | | | | | extending to | | | | | | |
| | | | | | | | serosa. | | | | | | |
| 577 | 596 | II | Cecum | 11.5 | T3 | G2 | Invasion through | Neg | 0/58 | N0 | Neg | M0 | Appendix |
| | | | | | | | the bowel wall, | | | | | | dilated and |
| | | | | | | | into suberosal | | | | | | fibrotic, but not |
| | | | | | | | adipose. Serosal | | | | | | involved by |
| | | | | | | | surface free of | | | | | | tumor |
| | | | | | | | tumor. | | | | | | |
| 695 | 714 | II | Cecum | 14.0 | T3 | G2 | extending through | Neg | 0/22 | N0 | Neg | MX | moderately |
| | | | | | | | bowel wall into | | | | | | differentiated |
| | | | | | | | serosal fat | | | | | | adeno- |
| | | | | | | | | | | | | | carcinoma |
| | | | | | | | | | | | | | with |
| | | | | | | | | | | | | | mucinous |
| | | | | | | | | | | | | | diferentiation |
| | | | | | | | | | | | | | (% not stated), |
| | | | | | | | | | | | | | tubular |
| | | | | | | | | | | | | | adenoma and |
| | | | | | | | | | | | | | hyperplstic |
| | | | | | | | | | | | | | polyps present, |
| 784 | 803 | IV | Ascending | 3.5 | T3 | G3 | through | Pos | 5/17 | N2 | Pos - | M1 | invasive poorly |
| | | | colon | | | | muscularis propria | | | | Liver | | differentiated |
| | | | | | | | into pericolic soft | | | | | | adenosquamous |
| | | | | | | | tissues | | | | | | carcinoma |
| 786 | 805 | IV | De- | 9.5 | T3 | G2 | through | Neg | 0/12 | N0 | Pos - | M1 | moderately |
| | | | scending | | | | muscularis propria | | | | Liver | | differentiated |
| | | | colon | | | | into pericolic fat, | | | | | | invasive |
| | | | | | | | but not at serosal | | | | | | adeno- |
| | | | | | | | surface | | | | | | carcinoma |
| 787 | 806 | II | Recto- | 2.5 | T3 | G2-G3 | Invasion of | Neg | | N0 | Neg | MX | Peritumoral |
| | | | sigmoid | | | | muscularis propria | | | | | | lymphocytic |
| | | | | | | | into soft tissue | | | | | | response; 5 LN |
| | | | | | | | | | | | | | examined in |
| | | | | | | | | | | | | | pericolic fat, no |
| | | | | | | | | | | | | | metastatases |
| | | | | | | | | | | | | | observed. |
| 789 | 808 | IV | Cecum | 5.0 | T3 | G2-G3 | Extending through | Pos | 5/10 | N2 | Pos - | M1 | Three |
| | | | | | | | muscularis propria | | | | Liver | | fungating |
| | | | | | | | into pericolonic fat | | | | | | lesions |
| | | | | | | | | | | | | | examined. |
| 790 | 809 | IV | Rectum | 6.8 | T3 | G1-G2 | Invading through | Pos | 3/13 | N1 | Pos - | M1 | |
| | | | | | | | muscularis propria | | | | Liver | | |
| | | | | | | | into perirectal fat | | | | | | |
| 791 | 810 | IV | Ascending | 5.8 | T3 | G3 | Through the | Pos | 13/25 | N2 | Pos - | M1 | poorly |
| | | | colon | | | | muscularis propria | | | | Liver | | differentiated |
| | | | | | | | into pericolic fat | | | | | | invasive |
| | | | | | | | | | | | | | colonic |
| | | | | | | | | | | | | | adeno- |
| | | | | | | | | | | | | | carcinoma |
| 888 | 908 | IV | Ascending | 2.0 | T2 | G1 | Into muscularis | Pos | 3/21 | N0 | Pos - | M1 | well to |
| | | | colon | | | | propria | | | | Liver | | moderately |
| | | | | | | | | | | | | | differentiated |
| | | | | | | | | | | | | | adeno- |
| | | | | | | | | | | | | | carcinomas; |
| | | | | | | | | | | | | | this patient |
| | | | | | | | | | | | | | has tumors of |
| | | | | | | | | | | | | | the ascending |
| | | | | | | | | | | | | | colon and the |
| | | | | | | | | | | | | | sigmoid colon |
| 889 | 909 | IV | Cecum | 4.8 | T3 | G2 | Through | Pos | 1/4 | N1 | Pos - | M1 | moderately |
| | | | | | | | muscularis propria | | | | Liver | | differentiated |
| | | | | | | | int subserosal | | | | | | adeno- |
| | | | | | | | tissue | | | | | | carcinoma |
| 890 | 910 | IV | Ascending | | T3 | G2 | Through | Pos | 11/15 | N2 | Pos - | M1 | |
| | | | colon | | | | muscularis propria | | | | Liver | | |
| | | | | | | | into subserosa. | | | | | | |
| 891 | 911 | IV | Rectum | 5.2 | T3 | G2 | Invasion through | Pos | 4/15 | N2 | Pos - | M1 | Perineural |
| | | | | | | | muscularis propria | | | | Liver | | invasion |
| | | | | | | | into perirectal soft | | | | | | present. |
| | | | | | | | tissue | | | | | | |
| 892 | 912 | IV | Sigmoid | 5.0 | T3 | G2 | Invasion into | Pos | 1/28 | N1 | Pos - | M1 | Perineural |
| | | | | | | | pericolic sort | | | | Liver, left | | invasion |
| | | | | | | | tissue. Tumor | | | | and right | | present, |
| | | | | | | | focally invading | | | | lobe, | | extensive. |
| | | | | | | | skeletal muscle | | | | omentum | | Patient with a |
| | | | | | | | attached to colon. | | | | | | history of colon |
| | | | | | | | | | | | | | cancer. |
| 893 | 913 | IV | Transverse | 6.0 | T3 | G2-G3 | Through | Pos | 14/17 | N2 | Pos - | M1 | Perineural |
| | | | colon | | | | muscularis propria | | | | Liver | | invasion |
| | | | | | | | into pericolic fat | | | | | | focally |
| | | | | | | | | | | | | | present. |
| | | | | | | | | | | | | | Omentum |
| | | | | | | | | | | | | | mass, but |
| | | | | | | | | | | | | | resection with |
| | | | | | | | | | | | | | no tumor |
| | | | | | | | | | | | | | identified. |
| 989 | 1009 | IV | Sigmoid | 6.0 | T3 | G2 | Invasion through | Pos | 1/7 | N1 | Pos - | M1 | Primary |
| | | | | | | | colon wall and | | | | Liver | | adeno- |
| | | | | | | | focally involving | | | | | | carcinoma |
| | | | | | | | subserosal tissue. | | | | | | arising from |
| | | | | | | | | | | | | | tubulovillous |
| | | | | | | | | | | | | | adenoma. |

[0617] Two overlapping groups of patients described in Table 32 were studied. The first group contained 33 members whereas the second group contained 22 members. In the case of the first group of patients, gene product expression profiles of tissue samples from metastasized tumors were compared to gene product expression profiles of an “unmatched” sample, where the unmatched sample is a pool of samples of normal colon from the sample patients. For the second group of patients, gene product expression profiles of tissue samples from metastasized tumors were compared to gene product expression profiles of a “matched” sample, where the matched sample is matched to a single sample within a patient. As such, a metastasized colon tumor sample is “matched” with a normal colon sample or a primary colon tumor from the same patient. Metastases of colon cancers may appear in any tissue, including bone, breast, lung, liver, brain, kidney skin, intestine, appendix, etc. In many patients, the colon cancer had metastasized to liver.

[0618] Source of Polynucleotides on Arrays

[0619] Polynucleotides for use on the arrays were obtained from both publicly available sources and from cDNA libraries generated from selected cell lines and patient tissues. Table 33 provides information about the polynucleotides on the arrays including: (1) the “SEQ ID NO” assigned to each sequence for use in the present specification; (2) the spot identification number (“Spot ID”), an internal reference that serves as a unique identifier for the spot on the array; (3) the “Clone ID” assigned to the clone from which the sequence was isolated; and (4) the “MAClone ID” assigned to the clone from which the sequence was isolated. The sequences corresponding to the SEQ ID NOS are provided in the Sequence Listing.

[0620] Characterization of Sequences

[0621] The sequences of the isolated polynucleotides were first masked to eliminate low complexity sequences using the RepeatMasker masking program, publicly available through a web site supported by the University of Washington (See also Smit, A. F. A. and Green, P., unpublished results). Generally, masking does not influence the final search results, except to eliminate sequences of relatively little interest due to their low complexity, and to eliminate multiple “hits” based on similarity to repetitive regions common to multiple sequences, e.g., Alu repeats. Masking resulted in the elimination of several sequences.

[0622] The remaining sequences of the isolated polynucleotides were used in a homology search of the GenBank database using the TeraBLAST program (TimeLogic, Crystal Bay, Nev.), a DNA and protein sequence homology searching algorithm. TeraBLAST is a version of the publicly available BLAST search algorithm developed by the National Center for Biotechnology, modified to operate at an accelerated speed with increased sensitivity on a specialized computer hardware platform. The program was run with the default parameters recommended by TimeLogic to provide the best sensitivity and speed for searching DNA and protein sequences. Gene assignment for the query sequences was determined based on best hit from the GenBank database; expectancy values are provided with the hit.

[0623] Summary of TeraBLAST Search Results

[0624] Table 34 provides information about the gene corresponding to each polynucleotide. Table 34 includes: (1) the “SEQ ID NO” of the sequence; (2) the “Clone ID” assigned to the clone from which the sequence was isolated; (3) the “MAClone ID” assigned to the clone from which the sequence was isolated; (4) the library source of the clone (“PatientType”) (5) the GenBank Accession Number of the publicly available sequence corresponding to the polynucleotide (“GBHit”); (6) a description of the GenBank sequence (“GBDescription”); and (7) the score of the similarity of the polynucleotide sequence and the GenBank sequence (“GBScore”). The published information for each GenBank and EST description, as well as the corresponding sequence identified by the provided accession number, are incorporated herein by reference.

### Example 59

### detection of Differential Expression Using Arrays

[0625] cDNA probes were prepared from total RNA isolated from the patient samples described above. Since LCM provides for the isolation of specific cell types to provide a substantially homogenous cell sample, this provided for a similarly pure RNA sample.

[0626] Total RNA was first reverse transcribed into cDNA using a primer containing a T7 RNA polymerase promoter, followed by second strand DNA synthesis. cDNA was then transcribed in vitro to produce antisense RNA using the T7 promoter-mediated expression (see, e.g., Luo et al. (1999) Nature Med 5:117-122), and the antisense RNA was then converted into cDNA. The second set of cDNAs were again transcribed in vitro, using the T7 promoter, to provide antisense RNA. Optionally, the RNA was again converted into cDNA, allowing for up to a third round of T7-mediated amplification to produce more antisense RNA. Thus the procedure provided for two or three rounds of in vitro transcription to produce the final RNA used for fluorescent labeling.

[0627] Fluorescent probes were generated by first adding control RNA to the antisense RNA mix, and producing fluorescently labeled cDNA from the RNA starting material. Fluorescently labeled cDNAs prepared from the tumor RNA sample were compared to fluorescently labeled cDNAs prepared from a normal cell RNA sample. For example, the cDNA probes from the normal cells were labeled with Cy3 fluorescent dye (green) and the cDNA probes prepared from the tumor cells were labeled with Cy5 fluorescent dye (red), and vice versa.

[0628] Each array used had an identical spatial layout and control spot set. Each microarray was divided into two areas, each area having an array with, on each half, twelve groupings of 32×12 spots, for a total of about 9,216 spots on each array. The two areas are spotted identically which provides for at least two duplicates of each clone per array.

[0629] Polynucleotides for use on the arrays were obtained from both publicly available sources and from cDNA libraries generated from selected cell lines and patient tissues as described above and in Table 33. PCR products of from about 0.5 kb to 2.0 kb amplified from these sources were spotted onto the array using a Molecular Dynamics Gen III spotter according to the manufacturer's recommendations. The first row of each of the 24 regions on the array had about 32 control spots, including 4 negative control spots and 8 test polynucleotides. The test polynucleotides were spiked into each sample before the labeling reaction with a range of concentrations from 2-600 pg/slide and ratios of 1:1. For each array design, two slides were hybridized with the test samples reverse-labeled in the labeling reaction. This provided for about four duplicate measurements for each clone, two of one color and two of the other, for each sample.

[0630] The differential expression assay was performed by mixing equal amounts of probes from matched or unmatched samples. The arrays were pre-incubated for about 2 hrs at 60° C. in 5×SSC/0.2% SDS/1 mM EDTA, and then washed three times in water and twice in isopropanol. Following prehybridization of the array, the probe mixture was then hybridized to the array under conditions of high stringency (overnight at 42° C. in 50% formamide, 5×SSC, and 0.2% SDS. After hybridization, the array was washed at 55° C. three times as follows: 1) first wash in 1×SSC/0.2% SDS; 2) second wash in 0.1×SSC/0.2% SDS; and 3) third wash in 0.1×SSC.

[0631] The arrays were then scanned for green and red fluorescence using a Molecular Dynamics Generation III dual color laser-scanner/detector. The images were processed using BioDiscovery Au togene software, and the data from each scan set normalized to provide for a ratio of expression relative to normal. Data from the microarray experiments was analyzed according to the algorithms described in U.S. application Ser. No. 60/252,358, filed Nov. 20, 2000, by E. J. Moler, M. A. Boyle, and F. M. Randazzo, and entitled “Precision and accuracy in cDNA microarray data,” which application is specifically incorporated herein by reference.

[0632] The experiment was repeated, this time labeling the two probes with the opposite color in order to perform the assay in both “color directions.” Each experiment was sometimes repeated with two more slides (one in each color direction). The level of fluorescence for each sequence on the array expressed as a ratio of the geometric mean of 8 replicate spots/genes from the four arrays or 4 replicate spots/gene from 2 arrays or some other permutation. The data were normalized using the spiked positive controls present in each duplicated area, and the precision of this normalization was included in the final determination of the significance of each differential. The fluorescent intensity of each spot was also compared to the negative controls in each duplicated area to determine which spots have detected significant expression levels in each sample.

[0633] A statistical analysis of the fluorescent intensities was applied to each set of duplicate spots to assess the precision and significance of each differential measurement, resulting in a p-value testing the null hypothesis that there is no differential in the expression level between the tumor and normal samples of each patient. During initial analysis of the microarrays, the hypothesis was accepted if p>10⁻³, and the differential ratio was set to 1.000 for those spots. All other spots have a significant difference in expression between the matched or unmatched samples. If the tumor sample has detectable expression and the normal does not, the ratio is truncated at 1000 since the value for expression in the normal sample would be zero, and the ratio would not be a mathematically useful value (e.g., infinity). If the normal sample has detectable expression and the tumor does not, the ratio is truncated to 0.001, since the value for expression in the tumor sample would be zero and the ratio would not be a mathematically useful value. These latter two situations are referred to herein as “on/off.” Database tables were populated using a 95% confidence level (p>0.05).

[0634] Table 35 provides the results for gene products that were over- or under-expressed as determined by comparison of matched or unmatched pairs of samples isolated from the two patient groups described above. The results show data from three separate experiments using the same set of gene products, each identified by SEQ ID NO. The three experiments are: 1) a comparison of the gene expression profile of metastasized colon tumor tissue compared to unmatched normal colon tissue (“unmatched metastasis/normal”); 2) a comparison of the gene expression profile of metastasized colon tumor tissue compared to normal colon tissue from the same patient (“matched metastasis/normal”); and 3) a comparison of the gene expression profile of metastasized colon tumor tissue compared to primary tumor tissue from the same patient (“matched metastasis/tumor”). If samples are matched, they are both samples from a single patient. If samples are unmatched, one sample is obtained from a patient, and compared to pooled samples from many patients.

[0635] The results in Table 35 show the sequences that are induced by at least 2-fold or greater in the metastasized colon tumor samples relative to normal or primary tumor tissue samples in at least 20% of the patients tested, or gene products in which expression levels of the gene in metastasized colon tumor cells was less than or equal to ½ of the expression level in normal or primary tissue samples in at least 20% of the patients tested. Table 35 includes: (1) the “SEQ ID NO” of the sequence tested; (2) the “Clone ID” assigned to the clone from which the sequence was isolated; and (3) the “MAClone ID” assigned to the clone from which the sequence was isolated; (4) the percentage of patients tested in which expression levels (e.g., as message level) of a particular sequence was at least 2-fold greater in metastasized colon cancer tissue than in unmatched or matched colon tissue (“>=2×”); (5) the percentage of patients tested in which expression levels (e.g., as message level) of the gene was less than or equal to ½ of the expression level in matched or unmatched colon tissue (“<=half×”); and (6) the number of patients analyzed in each experiment (“Ratios”).

[0636] These data provide evidence that the genes represented by the polynucleotides having the indicated sequences are differentially expressed in colon cancer, particularly metastasized colon cancer, as compared to colon cancer primary tumors or normal non-cancerous colon tissue.

### Example 60

### Antisense Regulation of Gene Expression

[0637] The expression of the differentially expressed genes represented by the polynucleotides in the cancerous cells can be analyzed using antisense knockout technology to confirm the role and function of the gene product in tumorigenesis, e.g., in promoting a metastatic phenotype.

[0638] A number of different oligonucleotides complementary to the mRNA generated by the differentially expressed genes identified herein can be designed as potential antisense oligonucleotides, and tested for their ability to suppress expression of the genes. Sets of antisense oligoiners specific to each candidate target are designed using the sequences of the polynucleotides corresponding to a differentially expressed gene and the software program HYBsimulator Version 4 (available for Windows 95/Windows NT or for Power Macintosh, RNAture, Inc. 1003 Health Sciences Road, West, Irvine, Calif. 92612 USA). Factors that are considered when designing antisense oligonucleotides include: 1) the secondary structure of oligonucleotides; 2) the secondary structure of the target gene; 3) the specificity with no or minimum cross-hybridization to other expressed genes; 4) stability; 5) length and 6) terminal GC content. The antisense oligonucleotide is designed so that it will hybridize to its target sequence under conditions of high stringency at physiological temperatures (e.g., an optimal temperature for the cells in culture to provide for hybridization in the cell, e.g., about 37° C.), but with minimal formation of homodimers.

[0639] Using the sets of oligomers and the HYBsimulator program, three to ten antisense oligonucleotides and their reverse controls are designed and synthesized for each candidate mRNA transcript, which transcript is obtained from the gene corresponding to the target polynucleotide sequence of interest. Once synthesized and quantitated, the oligomers are screened for efficiency of a transcript knock-out in a panel of cancer cell lines. The efficiency of the knock-out is determined by analyzing mRNA levels using lightcycler quantification. The oligomers that resulted in the highest level of transcript knock-out, wherein the level was at least about 50%, preferably about 80-90%, up to 95% or more up to undetectable message, are selected for use in a cell-based proliferation assay, an anchorage independent growth assay, and an apoptosis assay.

[0640] The ability of each designed antisense oligonucleotide to inhibit gene expression is tested through transfection into SW620 colon carcinoma cells. For each transfection mixture, a carrier molecule (such as a lipid, lipid derivative, lipid-like molecule, cholesterol, cholesterol derivative, or cholesterol-like molecule) is prepared to a working concentration of 0.5 mM in water, sonicated to yield a uniform solution, and filtered through a 0.45 μm PVDF membrane. The antisense or control oligonucleotide is then prepared to a working concentration of 100 μM in sterile Millipore water. The oligonucleotide is further diluted in OptiMEM™ (Gibco/BRL), in a microfuge tube, to 2 μM, or approximately 20 μg oligo/ml of OptiMEM™. In a separate microfuge tube, the carrier molecule, typically in the amount of about 1.5-2 nmol carrier/μg antisense oligonucleotide, is diluted into the same volume of OptiMEM™ used to dilute the oligonucleotide. The diluted antisense oligonucleotide is immediately added to the diluted carrier and mixed by pipetting up and down. Oligonucleotide is-added to the cells to a final concentration of 30 nM.

[0641] The level of target mRNA that corresponds to a target gene of interest in the transfected cells is quantitated in the cancer cell lines using the Roche LightCyclerm real-time PCR machine. Values for the target mRNA are normalized versus an internal control (e.g., beta-actin). For each 20 μl reaction, extracted RNA (generally 0.2-1 μg total) is placed into a sterile 0.5 or 1.5 ml microcentrifuge tube, and water is added to a total volume of 12.5 μl. To each tube is added 7.5 μl of a buffer/enzyme mixture, prepared by mixing (in the order listed) 2.5 μl H₂O, 2.0 μl 10× reaction buffer, 10 μl oligo dT (20 pmol), 1.0 μl dNTP mix (10 mM each), 0.5 μl RNAsin® (20 u) (Ambion, Inc., Hialeah, Fla. ), and 0.5 μl MMLV reverse transcriptase (50 u) (Ambion, Inc.). The contents are mixed by pipetting up and down, and the reaction mixture is incubated at 42° C. for 1 hour. The contents of each tube are centrifuged prior to amplification.

[0642] An amplification mixture is prepared by mixing in the following order: 1× PCR buffer II, 3 mM MgCl₂, 140 μM each dNTP, 0.175 pmol each oligo, 1:50,000 dil of SYBR® Green, 0.25 mg/ml BSA, 1 unit Taq polymerase, and H₂O to 20 μl. (PCR buffer II is available in 10× concentration from Perkin-Elmer, Norwalk, Conn.). In 1× concentration it contains 10 mM Tris pH 8.3 and 50 mM KCl. SYBR® Green (Molecular Probes, Eugene, Oreg.) is a dye which fluoresces when bound to double stranded DNA. As double stranded PCR product is produced during amplification, the fluorescence from SYBR®) Green increases. To each 20 μl aliquot of amplification mixture, 2 μl of template RT is added, and amplification is carried out according to standard protocols. The results are expressed as the percent decrease in expression of the corresponding gene product relative to non-transfected cells, vehicle-only transfected (mock-transfected) cells, or cells transfected with reverse control oligonucleotides.

### Example 61

### Effect of Expression on Proliferation

[0643] The effect of gene expression on the inhibition of cell proliferation can be assessed in, for example, metastatic breast cancer cell lines (MDA-MB-231 (“231”)); SW620 colon colorectal carcinoma cells; SKOV3 cells (a human ovarian carcinoma cell line); or LNCaP, PC3, 22Rv1, MDA-PCA-2b, or DU145 prostate cancer cells.

[0644] Cells are plated to approximately 60-80% confluency in 96-well dishes. Antisense or reverse control oligonucleotide is diluted to 2 μM in OptiMEM™. The oligonucleotide-OptiMEM™ can then be added to a delivery vehicle, which delivery vehicle can be selected so as to be optimized for the particular cell type to be used in the assay. The oligo/delivery vehicle mixture is then further diluted into medium with serum on the cells. The final concentration of oligonucleotide for all experiments can be about 300 nM.

[0645] Antisense oligonucleotides are prepared as described above (see Example 60). Cells are transfected overnight at 37° C. and the transfection mixture is replaced with fresh medium the next morning. Transfection is carried out as described above in Example 60.

[0646] Those antisense oligonucleotides inhibit proliferation of SW620 cells indicate that the corresponding gene plays a role in production or maintenance of the cancerous phenotype in cancerous colon cells. Those antisense oligonucleotides that inhibit proliferation in SKOV3 cells represent genes that play a role in production or maintenance of the cancerous phenotype in cancerous breast cells. Those antisense oligonucleotides that result in inhibition of proliferation of MDA-MB-231 cells indicate that the corresponding gene plays a role in production or maintenance of the cancerous phenotype in cancerous ovarian cells. Those antisense oligonucleotides that inhibit proliferation in LNCaP, PC3, 22Rv1, MDA-PCA-2b, or DU145 cells represent genes that play a role in production or maintenance of the cancerous phenotype in cancerous prostate cells.

### Example 62

### Effect of Gene Expression on Cell Migration

[0647] The effect of gene expression on the inhibition of cell migration can be assessed in SW620 colon cancer cells using static endothelial cell binding assays, non-static endothelial cell binding assays, and transmigration assays.

[0648] For the static endothelial cell binding assay, antisense oligonucleotides are prepared as described above (see Example 60). Two days prior to use, colon cancer cells (CaP) are plated and transfected with antisense oligonucleotide as described above (see Examples 60 and 61). On the day before use, the medium is replaced with fresh medium, and on the day of use, the medium is replaced with fresh medium containing 2 μM CellTracker green CMFDA (Molecular Probes, Inc.) and cells are incubated for 30 min. Following incubation, CaP medium is replaced with fresh medium (no CMFDA) and cells are incubated for an additional 30-60 min. CaP cells are detached using CMF PBS/2.5 mM EDTA or trypsin, spun and resuspended in DMEM/1% BSA/10 mM HEPES pH 7.0. Finally, CaP cells are counted and resuspended at a concentration of 1×106 cells/mi.

[0649] Endothelial cells (EC) are plated onto 96-well plates at 40-50% confluence 3 days prior to use. On the day of use, EC-are washed 1× with PBS and 50λ DMDM/1% BSA/10 mM HEPES pH 7 is added to each well. To each well is then added 50K (50□) CaP cells in DMEM/1% BSA/10 mM HEPES pH 7. The plates are incubated for an additional 30 min and washed 5× with PBS containing Ca++ and Mg++. After the final wash, 100 μL PBS is added to each well and fluorescence is read on a fluorescent plate reader (Ab492/Em 516 nm).

[0650] For the non-static endothelial cell binding assay, CaP are prepared as described above. EC are plated onto 24-well plates at 30-40% confluence 3 days prior to use. On the day of use, a subset of EC are treated with cytokine for 6 hours then washed 2× with PBS. To each well is then added 150-200K CaP cells in DMEM/1% BSA/10 mM HEPES pH 7. Plates are placed on a rotating shaker (70 RPM) for 30 min and then washed 3× with PBS containing Ca++ and Mg++. After the final wash, 500 μL PBS is added to each well and fluorescence is read on a fluorescent plate reader (Ab492/Em 516 nm).

[0651] For the transmigration assay, CaP are prepared as described above with the following changes. On the day of use, CaP medium is replaced with fresh medium containing 5 μM CellTracker green CMFDA (Molecular Probes, Inc.) and cells are incubated for 30 min. Following incubation, CaP medium is replaced with fresh medium (no CMFDA) and cells are incubated for an additional 30-60 min. CaP cells are detached using CMF PBS/2.5 mM EDTA or trypsin, spun and resuspended in EGM-2-MV medium. Finally, CaP cells are counted and resuspended at a concentration of 1×106 cells/ml.

[0652] EC are plated onto FluorBlok transwells (BD Biosciences) at 30-40% confluence 5-7 days before use. Medium is replaced with fresh medium 3 days before use and on the day of use. To each transwell is then added 50K labeled CaP. 30 min prior to the first fluorescence reading, 10 μg of FITC-dextran (10K MW) is added to the EC plated filter. Fluorescence is then read at multiple time points on a fluorescent plate reader (Ab492/Em 516 nm).

[0653] Those antisense oligonucleotides that result in inhibition of binding of SW620 colon cancer cells to endothelial cells indicate that the corresponding gene plays a role in the production or maintenance of the cancerous phenotype in cancerous colon cells. Those antisense oligonucleotides that result in inhibition of endothelial cell transmigration by SW620 colon cancer cells indicate that the corresponding gene plays a role in the production or maintenance of the cancerous phenotype in cancerous colon cells.

### Example 63

### Effect of Gene Expression on Colony Formation

[0654] The effect of gene expression upon colony formation of SW620 cells, SKOV3 cells, MD-MBA-231 cells, LNCaP cells, PC3 cells, 22Rv1 cells, MDA-PCA-2b cells, and DU145 cells can be tested in a soft agar assay. Soft agar assays are conducted by first establishing a bottom layer of 2 ml of 0.6% agar in media plated fresh within a few hours of layering on the cells. The cell layer is formed on the bottom layer by removing cells transfected as described above from plates using 0.05% trypsin and washing twice in media. The cells are counted in a Coulter counter, and resuspended to 10⁶ per ml in media. 10 μl aliquots are placed with media in 96-well plates (to check counting with WST1), or diluted further for the soft agar assay. 2000 cells are plated in 800 μl 0.4% agar in duplicate wells above 0.6% agar bottom layer. After the cell layer agar solidifies, 2 ml of media is dribbled on top and antisense or reverse control oligo (produced as described in Example 60) is added without delivery vehicles. Fresh media and oligos are added every 3-4 days. Colonies form in 10 days to 3 weeks. Fields of colonies are counted by eye. WST-1 metabolism values can be used to compensate for small differences in starting cell number. Larger fields can be scanned for visual record of differences.

[0655] Those antisense oligonucleotides that result in inhibition of colony formation of SW620 cells indicate that the corresponding gene plays a role in production or maintenance of the cancerous phenotype in cancerous colon cells. Those antisense oligonucleotides that inhibit colony formation in SKOV3 cells represent genes that play a role in production or maintenance of the cancerous phenotype in cancerous breast cells. Those antisense oligonucleotides that result in inhibition of colony formation of MDA-MB-231 cells indicate that the corresponding gene plays a role in production or maintenance of the cancerous phenotype in cancerous ovarian cells. Those antisense oligonucleotides that inhibit colony formation in LNCaP, PC3, 22Rv1, MDA-PCA-2b, or DU145 cells represent genes that play a role in production or maintenance of the cancerous phenotype in cancerous prostate cells.

### Example 64

### Induction of Cell Death Upon Depletion of Polypeptides by Depletion of mRNA (“Antisense Knockout”)

[0656] In order to assess the effect of depletion of a target message upon cell death, SW620 cells, or other cells derived from a cancer of interest, can be transfected for proliferation assays. For cytotoxic effect in the presence of cisplatin (cis), the same protocol is followed but cells are left in the presence of 2 μM drug. Each day, cytotoxicity is monitored by measuring the amount of LDH enzyme released in the medium due to membrane damage. The activity of LDH is measured using the Cytotoxicity Detection Kit from Roche Molecular Biochemicals. The data is provided as a ratio of LDH released in the medium vs. the total LDH present in the well at the same time point and treatment (rLDH/tLDH). A positive control using antisense and reverse control oligonucleotides for BCL2 (a known anti-apoptotic gene) is included; loss of message for BCL2 leads to an increase in cell death compared with treatment with the control oligonucleotide (background cytotoxicity due to transfection).

### Example 65

### Reduction of Colon Cancer In Vivo

[0657] In order to assess the effect of depletion of a target message upon colon cancer metastasis and the growth of metastasized colon cancer cells in vivo, a mouse model is utilized. Mouse models for cancer metastasis are well known in the art (e.g. Hubbard et al Dis Colon Rectum. 2002 45:334-41; Rashidi et al Clin Cancer Res. 2000 6:2556-61; Rashidi et al Anticancer Res. 2000 20:715-22; Rho et al Anticancer Res. 1999 19:157-61; Hasegawa et al, Int J Cancer 1998 76-812-6; and Warren et al J Clin Invest. 1995 95:1789-97.

[0658] In one model, before, at the same time as, or sometime after the intravenous or intraperitoneal administration of cancer cells to a model mouse, antisense molecules of Example 60 or other inhibitory molecules are administered to the model mouse. Cancer progression, including establishment and growth of tumors derived from the administered cells and longevity of mice, are monitored.

### Example 66

### Functional Analysis of Gene Products Differentially Expressed in Colon Cancer in Patents

[0659] The gene products of sequences of a gene differentially expressed in cancerous cells can be further analyzed to confirm the role and function of the gene product in tumorigenesis, e.g., in promoting or inhibiting development of a metastatic phenotype. For example, the function of gene products corresponding to genes identified herein can be assessed by blocking function of the gene products in the cell. For example, where the gene product is secreted or associated with a cell surface membrane, blocking antibodies can be generated and added to cells to examine the effect upon the cell phenotype in the context of, for example, the transformation of the cell to a cancerous, particularly a metastatic, phenotype. In order to generate antibodies, a clone corresponding to a selected gene product is selected, and a sequence that represents a partial or complete coding sequence is obtained. The resulting clone is expressed, the polypeptide produced isolated, and antibodies generated. The antibodies are then combined with cells and the effect upon tumorigenesis assessed.

[0660] Where the gene product of the differentially expressed genes identified herein exhibits sequence homology to a protein of known function (e.g., to a specific kinase or protease) and/or to a protein family of known function (e.g., contains a domain or other consensus sequence present in a protease family or in a kinase family), then the role of the gene product in tumorigenesis, as well as the activity of the gene product, can be examined using small molecules that inhibit or enhance function of the corresponding protein or protein family.

[0661] Additional functional assays include, but are not necessarily limited to, those that analyze the effect of expression of the corresponding gene upon cell cycle and cell migration. Methods for performing such assays are well known in the art.

### Example 67

### Contig Assembly and Additional Gene Characterization

[0662] The sequences of the polynucleotides provided in the present invention can be used to extend the sequence information of the gene to which the polynucleotides correspond (e.g., a gene, or mRNA encoded by the gene, having a sequence of the polynucleotide described herein). This expanded sequence information can in turn be used to further characterize the corresponding gene, which in turn provides additional information about the nature of the gene product (e.g., the normal function of the gene product). The additional information can serve to provide additional evidence of the gene product's use as a therapeutic target, and provide further guidance as to the types of agents that can modulate its activity.

[0663] In one example, a contig is assembled using a sequence of a polynucleotide of the present invention, which is present in a clone. A “contig” is a contiguous sequence of nucleotides that is assembled from nucleic acid sequences having overlapping (e.g., shared or substantially similar) sequence information. The sequences of publicly-available ESTs (Expressed Sequence Tags) and the sequences of various clones from several cDNA libraries synthesized at Chiron can be used in the contig assembly.

[0664] The contig is assembled using the software program Sequencher, version 4.05, according to the manufacturer's instructions and an overview alignment of the contiged sequences is produced. The sequence information obtained in the contig assembly can then be used to obtain a consensus sequence derived from the contig using the Sequencher program. The consensus sequence is used as a query sequence in a TeraBLASTN search of the DGTI DoubleTwist Gene Index (DoubleTwist, Inc., Oakland, Calif.), which contains all the EST and non-redundant sequence in public databases.

[0665] Through contig assembly and the use of homology searching software programs, the sequence information provided herein can be readily extended to confirm, or confirm a predicted, gene having the sequence of the polynucleotides described in the present invention. Further the information obtained can be used to identify the function of the gene product of the gene corresponding to the polynucleotides described herein. While not necessary to the practice of the invention, identification of the function of the corresponding gene, can provide guidance in the design of therapeutics that target the gene to modulate its activity and modulate the cancerous phenotype (e.g., inhibit metastasis, proliferation, and the like).

[0666] While the present invention has been described with reference to the specific embodiments thereof, it should be understood by those skilled in the art that various changes may be made and equivalents may be substituted without departing from the true spirit and scope of the invention. In addition, many modifications may be made to adapt a particular situation, material, composition of matter, process, process step or steps, to the objective, spirit and scope of the present invention. All such modifications are intended to be within the scope of the claims appended hereto.

That which is claimed is:

1. A method for inhibiting a cancerous phenotype of a cell, said method comprising:
contacting a cancerous mammalian cell with an agent for inhibition of a product of a gene identified by any of SEQ ID NOS:1-13996.

2. The method of claim 1, wherein said cell is a breast cell.

3. The method of claim 1, wherein said cancerous phenotype is aberrant cellular proliferation relative to a normal cell.

4. The method of claim 1, wherein said cancerous phenotype is loss of contact inhibition of cell growth.

5. The method of claim 1, wherein said agent is selected from the group consisting of a small molecule, an antibody, an antisense polynucleotide, and an RNAi molecule.

6. The method of claim 1, wherein said inhibition is associated with a reduction in a level of protein encoded by a gene identified by any of SEQ ID NOS:1-13996.

7. The method of claim 1, wherein said inhibition is associated with a reduction in a level of an RNA encoded by a gene identified by any of SEQ ID NOS:1-13996.

8. The method of claim 1, wherein said inhibition is associated with a reduction in a level of activity of a protein encoded a gene identified by any of SEQ ID NOS:1-13996.

9. A method for detecting a cancerous cell, said method comprising:
detecting a level of a product of a gene identified by any of SEQ ID NOS:1-13996 or fragment thereof in a test sample obtained from a cell of a subject,
comparing the level of said gene product to a control level of said gene prudoduct, wherein the presence of a cancerous cell is indicated by detection of said level and comparison to said control level.

10. The method of claim 9, wherein said cancerous cell is a cancerous breast cell.

11. The method of claim 9, wherein said gene product is nucleic acid.

12. The method of claim 9, wherein said gene product is a polypeptide.

13. The method of claim 9, wherein said detecting step uses a polymerase chain reaction.

14. The method of claim 9, wherein said detecting step uses hybridization.

15. The method of claim 9, wherein said sample is a sample of breast tissue.

16. The method of claim 9, wherein said level of said product is indicative of the cancerous state of the cell of the test sample.

17. A method of treating a subject with cancer, said method comprising:
administering to a subject a pharmaceutically effective amount of an agent,
wherein said agent modulates the activity of a product of a gene identified by any of SEQ ID NOS:1-13996.

18. The method of claim 17, wherein said cancer is breast cancer.

19. The method of claim 17, wherein said agent is selected from the group consisting of a small molecule, an antibody, an antisense polynucleotide, and an RNAi molecule.

20. A method for assessing the tumor burden of a subject, said method comprising:
detecting a level of a product of a gene identified by any of SEQ ID NOS:1-13996 in a test sample from a subject,
wherein the level of said gene product in the test sample is indicative of the tumor burden in the subject.

21. A method for identifying an agent that modulates a biological activity of a gene product differentially expressed in a cancerous cell as compared to a normal cell, said method comprising:
contacting a candidate agent with a product of a gene identified by any of SEQ ID NOS:1-13996; and
detecting modulation of a biological activity of said product relative to a level of biological activity in the absence of the candidate agent.

22. The method of claim 21, wherein said cancerous cell and said normal cell are breast cells.

23. The method of claim 21, wherein said detecting is by assessing expression of said gene product.

24. The method of claim 23, wherein expression is assessed by detecting a polynucleotide gene product.

25. The method of claim 23, wherein expression is assessed by detecting a polypeptide gene product.

26. The method of claim 21, wherein said candidate agent is selected from the group consisting of a small molecule, an antibody, an antisense polynucleotide, and an RNAi molecule.

27. The method of claim 21, wherein said biological activity is modulation of a cancerous phenotype.

28. The method of claim 27, wherein said cancerous phenotype is abnormal cellular proliferation.

29. The method of claim 27, wherein said cancerous phenotype is loss of contact inhibition.

The application's sequence listing, which the Patent Office published only in electronic form, follows.

SEQUENCE LISTING (13996 sequences)

SEQ ID NO: 1 - DNA, 300 bp, Homo sapiens
ctcggcagcatggcgtccgtgacgctgagcgaggcggagaaggtgtacatcgtgcatggcgtccaggaagacctccgtgtggatggccgtggctgtgaggactaccgatgtgtcgaagtggaaactgatgtggtgtccaacactagtgggtccgccagggtcaagctgggtcacacagacatcttggtgggagtgaaagcagaaatggggacgccgaagctggagaaaccaaatgaaggctacttggagttctttgttgactgttcagccagtgctacccctgaatttgaaggtagagga

SEQ ID NO: 2 - DNA, 760 bp, Homo sapiens
  misc_feature 2, 3, 338, 381, 391, 395, 408, 425, 434, 452, 461, 490, 512,570, 577, 584, 597, 599, 613, 656, 692, 707, 711, 725, 742,745: n = A,T,C or G
tnnaatatacagctacttgttctttttgcaggatcccatcgattcgaattccgttgctgtcgcacgaggccaccagggtgactgcgggattccgatctgcgccggagctgcgatgctagagcactcttgccacccccaccccacggacgtgttgcagtgatatcagaattttgcgtgcggtttacccgtgtttaacctctttgcgtctcgcttctgaatcgtatccacttgagcatcactagactgatctattttaacactggtggggggcagcgaggatggacagattcctggtgaaaggggctcaagggggccttttgaggaagcaggatgagcangagccaactggagaagagccagctgtgttgggaggagacaaanaaagcacaangaanaggcccatgaganagccccagggaatggangccactcancaagccctagctggcggnacattcggncttagggcctggactgcagttacacagtnctgtttggcaaagctgaggcanatgagattttccaagagttggagaaagaagtagaatattttacaggagcactggccanagtccangtattcnggaagtggcacantntgcccaggaagcangccaacgtattggcgacgcttgggctgaactacacattttcangccttacgctgtcttccaaagccctgggatcccaanttcttagaaccccantccnggatcaaccttttntgggggtgactgggacngancctttaacttttttg

SEQ ID NO: 3 - DNA, 754 bp, Homo sapiens
  misc_feature 1, 9, 12, 16, 22, 271, 463, 550, 606, 608, 620, 659, 660,667, 694, 695, 712, 734, 739, 749: n = A,T,C or G
ntatccttncanttcntatatnaggctacttgttctttttgcaggatcccatcgattcgaattcggcacgagggcagcatggcgtccgtggcgctgagcgaggcggagaaggtgtacatcgtgcatggcgtccaggaagacctccgtgtggatggccgtggctgtgaggactaccgatgtgtcgaagtggaaactgatgtggtgtccaacactagtgggtccgccagggtcaagctgggtcacacagacatcttggtgggagtgaaagcanaaatggggacgccgaagctggagaaaccaaatgaaggctacttggagttctttgttgactgttcagccagtgctacccctgaatttgaaggtagaggaggtgatgaccttggcaccgagatcgctaacaccctctatcggatatttaacaataaaagcagtgtcgacttaaagaccctctgcattagtcctngggagcactgctgggttctctatgtggatgtgctgcttctggaatgtggtggaaatttgttttgatgccatttccattgctgtaaangctgctctcttcaatacaagggataccaaagggttcgagtttttggaaggatgaanangggtctaaggancatttgaattgtccagatgacccttatgactgcattacnnactaaantgtgggaagaatgtcccctggcattgnnacttttgttgcaaaganttggcttttcggcatgttggtnggatncctactcttnaagga

SEQ ID NO: 4 - DNA, 234 bp, Homo sapiens
aaccctctctcctcagcgcttcttctttcttggtttgatcctgactgctgtcatggcgtgccctctggagaaggccctggatgtgatggtgtccaccttccacaagtactcgggcaaagagggtgacaagttcaagctcaacaagtcagaactaaaggagctgctgacccgggagctgcccagcttcttggggaaaaggacagatgaagctgctttccagaagctgatgagcaa

SEQ ID NO: 5 - DNA, 149 bp, Homo sapiens
  misc_feature 4, 34, 69: n = A,T,C or G
gctncagtctggtcatgtcacagcccctcctggnaccgcacggccctagtatttacacaaccttcacgnacagttggtgattggctggatgccatcaagatggggcggtacaaggagagcttcgtcagtgcggggtttgcatcttttga

SEQ ID NO: 6 - DNA, 224 bp, Homo sapiens
ggcaaaatggtggtggcatccagtaagaaaggagagcccgtcagtgccgaagatctgggggtgagtggtgcactgacagtgcttatgaaggacgcaatcaagcccaatctcatgcagacactggagggcactccagtgtttgtccatgctggcccgtttgccaacatcgcacatggcaattcctccatcattgcagaccagatcgcactcaagcttgttggccc

SEQ ID NO: 7 - DNA, 259 bp, Homo sapiens
caaacctgaatccaaagttgctaagttggacacgtctcagtggccccttttgctaaagaattttgataagctgaatgtaaggacaacacactatacacctcttgcatgtggttcaaatcctctgaagagagagattggggactatatcaggacaggtttcattaatcttgacaagccctctaacccctcttcccatgaggtggtagcctggattcgacggatacttcgggtggagaagacagggcacagtggtactctg

SEQ ID NO: 8 - DNA, 281 bp, Homo sapiens
gcctgaagcagcctgcggactgtctggatggactgtatgccttgatgtcgcggtgctgggagctaaatccccaggaccggccaagttttacagagctgcgggaagatttggagaacacactgaaggccttgcctcctgcccaggagcctgacgaaatcctctatgtcaacatggatgagggtggaggttatcctgaaccccctggagctgcaggaggagctgaccccccaacccagccagaccctaaggattcctgtagctgcctcatgcggctgaggtcc

SEQ ID NO: 9 - DNA, 282 bp, Homo sapiens
cgtggttttgtctgctgcgcccgctcttcgcgctctcgtttcattttctgcggcgcgccagcaggatggcccacaagcagatctactactcggacaagtacttcgacgaacactacgagtaccggcatgttatgttacccagagaactttccaaacaagtacctaaaactcatctgatgtctgaagaggagtggaggagacttggtgtccaacagagtctaggctgggttcattacatgattcatgagccagaaccacatattcttctctttagacgacctc

SEQ ID NO: 10 - DNA, 260 bp, Homo sapiens
gcgagcaggactagcccaggccgagtggacctcccaggatcaagcaccactcttacaaagtctttcactagctcttctccttcttccccatcaagagcaaaagaccgtgagtcccctagaagttactcatccactttgactgacatggggagaagtgcaccaagggaaagaagaggaactccagaaaaagagaaattgcctgcaaaagctgtttatgattttaaggctcagacatctaaggagttgtcatttaagaaagg

SEQ ID NO: 11 - DNA, 239 bp, Homo sapiens
  misc_feature 168, 190, 203, 229: n = A,T,C or G
gttgccctgcctctggctccagaacagaaagggagcctcacgctggctcacacaaaacagctgacactgactaaggaactgcagcatttgcacaggggaggggggtgcctccttcctagaggccctgggggccaggctgattggggggcagattgacataggccccantcatcagatgtctgaaattcancacgggggtaacntggggggttagggactatttttaaantaggggtggc

SEQ ID NO: 12 - DNA, 160 bp, Homo sapiens
gcggtgacgacggggaccattttaccatcaccacccaccctgagagcaaccagggcatcctgacaaccaggaagggtttggattttgaggccaaaaaccagcacaccctgtacgttgaagtgaccaacgaggccccttttgtgctgaagctcccaacctc

SEQ ID NO: 13 - DNA, 260 bp, Homo sapiens
  misc_feature 224, 225, 231, 232: n = A,T,C or G
ctccaagaccacaagcccccaaggccaatggcacctctgcactgactgcccagaatggaaaagcagctaagaacagtgaggaggaggaagaagaaaagaaaaaggcggcagtggtagtttccaaatcaggttcattaaagaagcggaagcagaatgaggctgccaaggaggcagagactcctcaggccaagaagataaagcttcagacccctaacacatttccnnaaaggnngaaaggagaaaaaagggcatcatccccc

SEQ ID NO: 14 - DNA, 264 bp, Homo sapiens
  misc_feature 115, 141, 143, 164, 165, 168, 214, 219, 234, 238, 251, 256,259, 261, 262: n = A,T,C or G
aacaaattgaaggttaacaccttaagagttgtagttactgaccagaaatatggacagacttcttagacttggaggaggtatgcctggactgggccaggggccacctacagatgcncctgcagtggacacagcagaacaagncnatatctcttccctggcactgnnaanaatgttaaaacatggccgtgctggagttccaatggaagttatgggnttgangcttggagaatttgntgangattataccgtcngagtnatngnngt

SEQ ID NO: 15 - DNA, 259 bp, Homo sapiens
  misc_feature 111: n = A,T,C or G
cgtggccaaggagttgggtgagaacctgactgatgaggagctgcaggaaatgattgatgaagctgatcgagatggagatggagaggtcagtgagcaagagttcctgcgcanatgaaaaagaccagcctctattaagatcagtgtcttctttttctactgcaagcacatgtaactagatttagtgcctgccatggtgtgaaatctggcttttgagaacacaaacttttcccccacggacctccctttatcactttaatag

SEQ ID NO: 16 - DNA, 233 bp, Homo sapiens
gctgcccactgcaaaaaaccgaatcttcaggtcttcctggggaagcataaccttcggcaaagggagagttcccaggagcagagttctgttgtccgggctgtgatccaccctgactatgatgccgccagccatgaccaggacatcatgctgttgcgcctggcacgcccagccaaactctctgaactcatccagccccttcccctggagagggactgctcagccaacaccaccag

SEQ ID NO: 17 - DNA, 188 bp, Homo sapiens
aaggcccgtgagcagctcatctgcgagtgtggcctctttgacaaggccaacgccacagggggcggtgggcacgtgcagatggtgcagagggccatgaaggacctgacctatgcctccctgtgctttcccgaggccatcaaggcccggggcatggagagcaaagaagacatcccctactacttctaccg

SEQ ID NO: 18 - DNA, 200 bp, Homo sapiens
gtagcagtcacaccctagccactgctgggaccttgtgttccccaagagtatctgattcctctgctgtccctgccaggagctgaagggtgggaacaacaaaggcaatggtgaaaagagattaggaaccccccagcctgtttccattctctgcccagcagtctcttaccttccctgatctttgcagggtggtccgtgtaaat

SEQ ID NO: 19 - DNA, 647 bp, Homo sapiens
  misc_feature 580, 646: n = A,T,C or G
gcggcctacggctgcgagaagacgacagaagggagttgcagctgatatgaatgaatgctgtctgtgtggaacaagcgtcgcaatgaggactctctacaggacccgatatggcatccctggatctatttgtgatgactatatggcaactctttgctgtcctcattgtactctttgccaaatcaagagagatatcaacagaaggagagccatgcgtactttctaaaaactgatggtgaaaagctcttaccgaagcaacaaaattcagcagacacctcttcagcttgagttcttcaccatcttttgcaactgaaatatgatggatatgcttaagtacaactgatggcatgaaaaaaatcaaatttttgatttattataaatgaatgttgtccctgaacttagctaaatggtgcaacttagtttctccttgctttcatattatcgaattcgaatttcctggcttataaactttttaaattacatttgaaatataaaccaaatgaaatattttactgataagattcttcatgcttctttgctctccttaaaatgtctttttcactagttagttccaagggacagnctcataattttggtcttatactttgatttcctttttcttttttttttttaaaaaaagggggggganc

SEQ ID NO: 20 - DNA, 218 bp, Homo sapiens
tgattggtgtggggaagctgttgcgtgtctatgacctgggaaagaagaagttactccgaaaatgtgagaataagcatattgccaattatatctctgggatccagactatcggacatagggtaattgtatctgatgtccaagaaagtttcatctgggttcgctacaagcgtaatgaaaaccagcttatcatctttgctgatgatacctacccccgatgg

SEQ ID NO: 21 - DNA, 207 bp, Homo sapiens
  misc_feature 77: n = A,T,C or G
gctgcccttgtagcttccccagaccccaactcactgcagttcatctgaacaacctgagctcctgggccggggtgganggagggggataaacctaaggccctgatccaaagcagcctgttgagctggttctccagggctgcagtctctccaggtgtacagctgctgtccctgccctgtcctgtccttgcacagtctcctatgtctgag

SEQ ID NO: 22 - DNA, 204 bp, Homo sapiens
cccgagcaacgcactgctgcagcttccctgagcctttccagcaagtttgttcaagattggctgtcaagaatcatggactgttattatatgccttgttttctgtcaagacaccatgattcctggtaaccgaatgctgatggtcgttttattatgccaagtcctgctaggaggcgcgagccatgctagtttgatacctgagacggg

SEQ ID NO: 23 - DNA, 224 bp, Homo sapiens
  misc_feature 62, 199, 212, 220: n = A,T,C or G
agcaaatctggctatcttctccatccagtggacctaagcgttatgactggactgggaaaaantgggtgtactcccacgacggcgtgtccctccatgagctgctggccgcagagctcactaaagccttaaaaaccaaactggacttgtcttccttggcctattccggaaaagatgcttgatgcccagcccggtttaaagncattaaaagtatnaggccagncccc

SEQ ID NO: 24 - DNA, 228 bp, Homo sapiens
aaagatgtttatatctttggaagttttacataaatcaaaggaagaaagcacatttaaaatgagaaactaagaccaatttctgtttttaagaggaaaaagaatgattgatgtatcctaagtattgttatttgttgtctttttttgctgccttgcttgagttgcttgtgactgatcttttgaggctgtcatcatggctagggttcttttatgtatgttaaattaaaacct

SEQ ID NO: 25 - DNA, 234 bp, Homo sapiens
  misc_feature 146: n = A,T,C or G
ctcgagccgctcgagccgaattcggctcgaggccaaaagatgttattggagctattttgtaaggtcccacatttgaccaaggagtgcctggtagcgttgagatgtgggagagaatgcactgatctgaaggcagccctgcgtcaggnattcagcaacctggaagagattcttgagtatcagaacaccaccttctttggtggaacctgtatatccatgattgattacctcctctgg

SEQ ID NO: 26 - DNA, 239 bp, Homo sapiens
cggctcgaggcccagatgtggagtgccagatgttgcagaatactcactatttccaaatagcccaaaatggacttccaaagtggtcacctacaggatcgtatcatatactcgagacttaccgcatattacagtggatcgattagtgtcaaaggctttaaacatgtggggcaaagagatccccctgcatttcaggaaagttgtatggggaactgctgacatcatgattggctttgcgcgag

SEQ ID NO: 27 - DNA, 225 bp, Homo sapiens
  misc_feature 147: n = A,T,C or G
ccaaggcgcctggcagtccgcctcggggcccaggccctcctgggggctgccaagatgctgctgcactcagaacagcacccaggccagctcaaggacaacgtcagctctcctggtggggccaccatccatgccttgcatgtgctgganagtgggggcttccgctccctgctcatcaacgctgtggaggcctcctgcatccgcacacgggagctgcagtccatggct

SEQ ID NO: 28 - DNA, 200 bp, Homo sapiens
cggctcgagcccagatttcctctatattcgttcttggctcccttgtatatttttctcaggaggcgtcacggtggggaacataggacgacagttagctatgggtgttcctgaaaagccccatagtgattgagtcttcaaaaccaccgattctgagagcaaggaagattttggaagaaaatctgactgtggattatgacaaa

SEQ ID NO: 29 - DNA, 178 bp, Homo sapiens
tctggctgcacctggcatgactgtttgtttctccaagcctgctttgtgcttctcacctttgggtgggatgccttgccagtgtgtcttacttggttgctgaacatcttgccacctccgagtgctttgtctccactcagtaccttggatcagagctgctgagttcaggatgcctgcgtgt

SEQ ID NO: 30 - DNA, 233 bp, Homo sapiens
  misc_feature 8, 70, 81, 232: n = A,T,C or G
ggaaagangttttgatataaacaaaacaaatgcactttgggtgtgttttggtatttttctggggatacanggggtggggtnagggatgtccctgtagattagttccagaatggggtgtctgtatatactgtattaataggcatgtttgactctcgtaaagggacgttagtagctgctgcaggtcctgtttggaaaccccatgtacaattcccagttttttgtaagtgtcagng

SEQ ID NO: 31 - DNA, 762 bp, Homo sapiens
  misc_feature 615, 632, 709, 710, 711, 712, 713, 714, 715, 716, 717, 718,719, 720, 721, 722, 723, 724, 725, 726, 727, 728, 729, 730,731, 732, 761: n = A,T,C or G
gcggcctacggctgcgagaagacgacagaaggggagatgaatgcggctgttaagacctgcaataatccagaatggctactctgatctatgttgataaggaaaatggagaaccaggcacccgtgtggttgctaaggatgggctgaagctggggtctggaccttcaatcaaagccttagatgggagatctcaagtttcaacaccacgttttggcaaaacgttcgatgccccaccagccttacctaaagctactagaaaggctttgggaactgtcaacagagctacagaaaagtctgtaaagaccaagggacccctcaaacaaaaacagccaagcttttctgccaaaaagatgactgagaagactgttaaagcaaaaagctctgttcctgcctcagatgatgcctatccagaaatagaaaaattctttcccttcaatcctctagactttgagagttttgacctgcctgaagagcaccagattgcgcacctccccttgagtggagtgcctctcatgatccttgacgaggagagagagcttgaaaagctgtttcagctgggccccccttcacctgtgaagatgccctctccaccatgggaatccaatctgttgcagtctncttcaagcattctgtcnaccctggatgttgaattgccacctgtttgctgtgacatagatatttaaatttcttagtgcttcagagtttgggtggnnnnnnnnnnnnnnnnnnnnnnnnaacaaaaaaaaaaaaaaaaaaaaaaaaang

SEQ ID NO: 32 - DNA, 315 bp, Homo sapiens
aacgcccacaacaatgggaaccacacatttaaaatggcactgaaccaattttcagacatgagctttgctgaaataaaacacaagtatctctggtcagagcctcagaattgctcagccaccaaaagtaactaccttcgaggtactggtccctacccaccttccgtggactggcggaaaaaaggaaattttgtctcacctgtgaaaaatcagggtgcctgcggcagttgctggactttctccaccactggggccctggagtctgcgatcgccatcgcaaccggaaagatgctgtccttggcggaacagcagtggtgg

SEQ ID NO: 33 - DNA, 275 bp, Homo sapiens
ggagttgtacgaaggcctgaggctgaacaacatgaataaatatgactacgtgctcacaggttatacgagggacaagtcgttcctggccatggtggtggacattgtgcaggagctgaagcagcagaaccccaggctggtgtacgtgtgtgatccagtcttgggtgacaagtgggacggcgaaggctcgatgtacgtcccggaggacctccttcccgtctacaaagaaaaagtggtgccgcttgcagacattatcacgcccaaccagtttgaggccg

SEQ ID NO: 34 - DNA, 206 bp, Homo sapiens
gggattcctggtcatcatgcagctatcaagcccgctcctccacaaaccgagcaagtagagagcaagaggaagtcagggggaaatgaggttagcattgaggaacgtctgggagcaatggatatagacacacacaaaaaaggaaaggaagacctccagacgaatagctttccagttcttcttacccagggcttagaaagtaacgattc

SEQ ID NO: 35 - DNA, 257 bp, Homo sapiens
  misc_feature 74: n = A,T,C or G
gagccaccaccaccatagcccagccagatgagtgctctgtggacccacagcctaagctgagtgtgaccccagangccacgatgtgctctgtatccagaacacacttggcagatggaggaagcatctgagtttgagaccatggctgttacagggatcatgtaaacttgctgtttttgttttttcctgccgggtgttgtatgtgtggtgacttgcggatttatgtttcagtgtactggaaactttccattttattcaag

SEQ ID NO: 36 - DNA, 235 bp, Homo sapiens
  misc_feature 109: n = A,T,C or G
ctcgagccgggattttctgttttcggaagttgctgggttcgttttattcagcggcagtggtgctttcccgaatctcagaatgcctgttaaaagatcactgaagttgganggtctgttagaagaaaattcatttgatccttcaaaaatcacaaggaagaaaagtgttataacttattctccaacaactggaacttgtcaaatgagtctatttgcttctcccacaagttctgaagag

SEQ ID NO: 37 - DNA, 277 bp, Homo sapiens
  misc_feature 191: n = A,T,C or G
ggagagtttggggaagtgtatcgagggaccctgaggctccccagccaggactgcaagactgtggccattaagaccttaaaagacacatccccaggtggccagtggtggaattccttcgagaggcaactatcatgggccagtttagccacccgcatattctgcatctggaaggcgtcgtcacaaagcgaaanccgatcatgatcatcacagaatttatggagaatggagccctggatgccttcctgagggagcgggaggaccagctggtccctgggca

SEQ ID NO: 38 - DNA, 291 bp, Homo sapiens
cggagatcttcaaaaaggagcacccggaccgcttcatcgagtgctacattgctgagcagaacatgcacttttgcagccttcttcacgcgggcctttgaccagattcgcatggccgccatctccgagagcaacatcaacctctgcggctcccactgcggcgtttccatcggggaagacgggccctcccagatggccctagaagatctggctatgtttcggtcagtccccacatcaactgtcttttacccaagtgatggcgttgctacagagaaggcagtggaatagccgcca

SEQ ID NO: 39 - DNA, 211 bp, Homo sapiens
  misc_feature 85: n = A,T,C or G
tggaggtctaaattacctccagggtttttctgggggtttatcaccagtgtgggtcccttctgataccaccaggttcactccaggncagagtggggcacaaggctgctgaggatatgggtcagttacagcagccctcacctcaaagggctggcctgcttctcagcctacattcatttgcaagcttcaatctctggaccatctggtgttcaca

SEQ ID NO: 40 - DNA, 253 bp, Homo sapiens
caaaggatgacgtgatactcaatgccttcagcaaatcagagactagcaagctgggaaaacaaagctcctgtgaggttagcctactactctctgaagacgggaccacgcccaaatccaagaagactcaagctggcctttccccttatccccagaaacccagttcctcaaaggacagtgaggacaccagcaaagagcccagcctttctacccagacgttacctgtgatcaagtgctctgggcagacttcaagact

SEQ ID NO: 41 - DNA, 271 bp, Homo sapiens
gccaagagctccatatattgggtgtgagttcaggttgcctctcacaatgaaggaagttggtctttgtctgcaggtgggctgctgagggtctgggatctgttttctggaagtgtgcaggtataaacacaccctctgtgcttgtgacaaactggcaggtaccgtgctcattgctaaccactgtctgtccctgaactcccagaaccactacatctggcttgggcaggtctgagataaaacgatctaaaggtaggcagaccctggacccagcctc

SEQ ID NO: 42 - DNA, 249 bp, Homo sapiens
ctcccaagacccagccgccgccgttgagggctgagtccttgctgtgggatgtgccagtgtccccaccaacaccaggaatttagaccttttccctgcaccactctcttcatcctgggggctctgttacactaatttgaataaactctcccctttctttgcaacttcccagcaacaataatgattttcttgccaggccgtctcttgctccctaattcatttcccaggaagctgtgatacagggtgaaataa

SEQ ID NO: 43 - DNA, 269 bp, Homo sapiens
acacaatactatgatcatatttctaaacaaaaggaagaaattcgcagatgcatacaagactttttcaagaaacacatacagtacaaattcttagatgaagactttgtgttcgatatatacagagacagtagggggaaggtgtggctcattgactttaatccatttggtgaagtcacagattcactgctgttcacctgggaagaactgatatctgagaacaacttaaacggcgattttagtgaagttgacgctcaagagcaggattcccc

SEQ ID NO: 44 - DNA, 307 bp, Homo sapiens
ggacattgtggacagcataaaaggagaattatctgggcattttgaagacttactgttggccatagttaattgtgtgaggaacacgccggcctttttagccgaaagactgcatcgagccttgaagggtattggaactgatgagtttactctgaaccgaataatggtgtccagatcagaaattgaccttttggacattcgaacagagttcaagaagcattatggctattccctatattcagcaattaaatcggatacttctggagactatgaaatcacactcttaaaaatctgtggtggagatgactga

SEQ ID NO: 45 - DNA, 254 bp, Homo sapiens
atcaccacctccctcccagccccagcgcctcagccccagccccagctccagccctgaggacagctctgatgggagagctgggccccctgagcccactgggtcttcagggtgcactggaagctggtgttcgctgtcccctgtgcacttctcgcactggggcatggagtgcccatgcatactctgctgccggtcccctcacctgcacttgaggggtctgggcagtccctcctctccccagtgtccacagtcactga

SEQ ID NO: 46 - DNA, 254 bp, Homo sapiens
  misc_feature 93: n = A,T,C or G
gttcagtaagggacaaactgtccacccaaggaacagcctggcgatctttttaatgaggactgggactcggagttgaaagcagatcaagggaanccatatgatgctgacgacatccaggagagcatttctcaagagcttaaaccttgggtgtgctgtgccccacaaggagacatgatctatgaccccagctggcaccatccgcctccactgataccctattattccaagatggtctttgaaacaggacagtttga

SEQ ID NO: 47 - DNA, 221 bp, Homo sapiens
aagaggagcaggaaaatggcaaagcctattgtgtgcttgttactggaccaaatatggggggcaagtctacgcttatgagacaggctggcttattagctgtaatggcccagatgggttgttacgtccctgctgaagtgtgcaggctcacaccaattgatagagtgtttactagacttggtgcctcagacagaataatgtcaggtgaaagtacattttttgtt

SEQ ID NO: 48 - DNA, 123 bp, Homo sapiens
  misc_feature 18: n = A,T,C or G
ataccatcaatagcattnacctagacagaattcttctggatatccacattttcatgaaggtcttccccaaagagaaactgaagcaatgcaaaagtgaatttcccataaggaccctaaagaccc

SEQ ID NO: 49 - DNA, 248 bp, Homo sapiens
caaaggccttcctggatgctctgcagaaccaggctgaggccagcagcaagatcatcggccagtttggagtgggtttctactcagctttcatggtggctgacagagtggaggtctattcccgctcggcagccccggggagcctgggttaccagtggctttcagatggttctggagtgtttgaaatcgccgaagcttcgggagttagaaccgggacaaaaatcatcatccacctgaaattggactgcaag

SEQ ID NO: 50 - DNA, 178 bp, Homo sapiens
ggaaataatttaaagatttaagctctggtggatgattatctgctaagtaagtctgaaaatgtaatattttgataatactgtaatacctgtcacacaaatgcttttctaatgttttaaccttgagtattgcagttgctgctttgtacagaggttactgcaataaaggaagtggatcatt

SEQ ID NO: 51 - DNA, 245 bp, Homo sapiens
  misc_feature 65: n = A,T,C or G
atttatattctttgagtgtgagctttgaatagatggcattatcactttattgtttttttaacaanaactttttctcaattattctattgcaatgttattctgagcaagtcctatgccaaatatcttgtataatgtttgtatggaagattaaattttactcttgtgtggtaagactatttcagttactgattttatagttggaatttgatattccagcacaaagtccacagtgtattcagaaatcc

SEQ ID NO: 52 - DNA, 251 bp, Homo sapiens
gtaaccacaattaagttgttgtagcccttgcacttcaagagatctagtctttactttcagttgtctgttaggtccattctgtttactagacggatgttaataaaaactatgcgagcctgaatgaattctcagccaaatttagtcttgtctctcatcttgattggattaattccaaattctaaaatgattcagtccacaatagctctaggggatgaagaatttgccttactttgcccagttcctaagactgt

SEQ ID NO: 53 - DNA, 268 bp, Homo sapiens
ccctaccaatgcccctttaagtgctgcaggggtctggggttggcaactcctgaggcctgcatgggtgacttcacattttcctacctctccttctaatctcttctagagcacctgctatccccaacttctagacctgctccaaactagtgactaggatagaatttgatcccctaactcactgtctgcggtgctcattgctgctaacagcattgcctgtgctctcctctcaggggcagcatgctaacggggcgacgtcctaatccaactg

SEQ ID NO: 54 - DNA, 248 bp, Homo sapiens
gcgtcatggagctgacctggttcccatctactcctttggagagaatgaagtgtacaagcaggtgatcttcgaggagggctcctggggccgatgggtccagaagaagttccagaaatacattggtttcgccccatgcatcttccatggtcgaggcctcttctcctccgacacctgggggctggtgcctactccaagcccatcaccactgttgtgggagagcccatcaccatccccaagctggagcacca

SEQ ID NO: 55 - DNA, 268 bp, Homo sapiens
  misc_feature 39, 203, 219, 231, 246, 253, 260: n = A,T,C or G
aaaagacatttacaactaggccagggattagccactgtnggagggtggacaggcaatggttcagtggcctggctgttggcaggaactccaagtgcccaggcctcttgggcagcttagggccctgcctctgtttcatgatgcatgggtcattgtcttgggtgtcctatcccatatggagaagaaagggggtctaaattctggcncttctttctttggggntctctgtacctnaggaaaccaggcccngggtgantttgcanatctgctc

SEQ ID NO: 56 - DNA, 168 bp, Homo sapiens
aagatctagcatgtggattttaaaagatttgccctcattaacaagaataacatttaaaggagattgtttcaaaatatttttgcaaattgagataaggacagaaagattgagaaacattgtatattttgcaaaaacaagatgtttgtagctgtttcagagagagtacgg

SEQ ID NO: 57 - DNA, 287 bp, Homo sapiens
gcaacacccaaaggtggcctgcggggagccatcacctaggactgactcggcagtgtgcagtggtgcatgcactgtctcagccaacccgctccactacccggcagggtacacattcgcacccctacttcacagaggaagaaacctggaaccagagggggcgtgcctgccaagctcacacagcaggaactgagccagaaacgcagattgggctggctctgaagccaagcctcttcttacttcacccggctgggctcctcatttttacgggtaacagtgaggctgggaag

SEQ ID NO: 58 - DNA, 256 bp, Homo sapiens
gccgggaagaccgtaattgtggctgcactggatgggaccttccagaggaagccatttggggccatcctgaacctggtgccgctggccgagagcgtggtgaagctgacggcggtgtgcatggagtgcttccgggaagccgcctataccaagaggctcggcacagagaaggaggtcgaggtgattgggggagcagacaagtaccactccgtgtgtcggctctgctacttcaagaaggcctcaggccagcctgccgggc

SEQ ID NO: 59 - DNA, 216 bp, Homo sapiens
  misc_feature 120: n = A,T,C or G
atcctgggcgacccagaagccctgagagacctgctgaacaaccacatcttgaagtcagctatgtgtgctgaagccatcgttgcggggctgtctgtagagaccctggagggcacgacactngaggtgggctgcagcggggacatgctcactatcaacgggaaggcgatcatctccaataaagacatcctagccaccaacggggtgatccactacatt

SEQ ID NO: 60 - DNA, 252 bp, Homo sapiens
attacaacgggctatacggtgaaaatcagtaattatggatgggatcagtcagataagtttgtgaaaatctacattaccttaactggagttcatcaagttcccactgagaatgtgcaggtgcatttcacagagaggtcatttgatcttttggtaaagaatctaaatgggaagagttactccatgattgtgaacaatctcttgaaacccatctctgtggaaggcagttcaaaaaaagtcaagactgatacagtt

SEQ ID NO: 61 - DNA, 262 bp, Homo sapiens
  misc_feature 3, 16, 27, 67, 68, 74, 81, 95, 96, 99, 106, 110, 144, 147,221, 226, 232, 241: n = A,T,C or G
canggttgtacaaaanaattttaatgnattaactcatactgcctgtcttttataggggaaaaaaatnnaccttntttattntaaagttataaggnnttnacctttnagtngcttggatgacagggaattagcctaccccatttnggnctggaacagaagactttcaaatttaatatggtccaagtgtcttcctactcaaggtaaacattatctccaaaatnacatntatgantctaatatntggcattgtgtctgtatctaa

SEQ ID NO: 62 - DNA, 68 bp, Homo sapiens
  misc_feature 3, 26, 27, 51, 52, 53, 58, 60: n = A,T,C or G
ccngcctggtgaaatacatgcactcnnggccggtagttgccatggtctggnnngggcngnatgtggtg

SEQ ID NO: 63 - DNA, 262 bp, Homo sapiens
ggagccagagccgtgggttttggtggggactttgatggtgttccaagggtccctgaggggctggaggacgtctccaagtatccagacctgatcgctgagctgctcaggaggaactggacggaggcggaggtcaagggcgcactggctgacaacctgctgagggtcttcgaggctgtggaacaggccagcaacctcacacaggctcccgaggaggagcccatcccgctggaccagctgggtggctcctgcaggacccattacg

SEQ ID NO: 64 - DNA, 266 bp, Homo sapiens
tgtacattctgtttgccattgttacttgtactatacatctgtatatagtgtacggcaaaagagtattaatccactatctctagtgcttgactttaaatcagtacagtacctgtacctgcacggtcacccgctccgtgtgtcgccctatattgagggctcaagctttcccttgttttttgaaaggggtttatgtataaatatattttatgcctttttattacaagtcttgtactcaatgacttttgtcatgacattttgttctactt

SEQ ID NO: 65 - DNA, 232 bp, Homo sapiens
cggctgggaagtcagttcgttctctcctctcctctcttcttgtttgaacatggtgcggactaaagcagacagtgttccaggcacttacagaaaagtggtggctgctcgagcccccagaaaggtgcttggttcttccacctctgccactaattcgacatcagtttcatcgaggaaagctgaaaataaatatgcaggagggaaccccgtttgcgtgcgcccaactcccaagtgg

SEQ ID NO: 66 - DNA, 238 bp, Homo sapiens
ggcctcctcatccggcatccccaccaccgctgctgctgccacggtcccacagcgacccaggcatcacgacctccagtgacactgctgacttcagggacctttataccaaagtgcttgaggaagaagctgcttctgtttcctctgcagatacagggctctgctctgaagcctgcctcttccgcctagcccgctgcccttcccccaagttgctacgtgcccggtcagccgagaaacggcg

SEQ ID NO: 67 - DNA, 255 bp, Homo sapiens
ctccgctggaaatgcaaagtgattctagagagtgaagtaattgcagaagcagttggggtgaagaaaactgtcaaatatgaagctgctggggaagctgtgaaaaccctcaaaaagacccagccaactgtcattaacaacttgaagaaaggagctgttgaagatgtgatttcaagaaatgaaattcagggccgctcagcagaggaggcttacaaacagcaaatcaaagaagataatattggaaatcagctgctgaga

SEQ ID NO: 68 - DNA, 259 bp, Homo sapiens
  misc_feature 157, 239: n = A,T,C or G
gaacggcggccgtttcaacttttaaagggagcggtccacggcctccagcgtggggagcgcccgagtcctctcggccacgagctggacgctcttcaggacgtttcaccgccccctcgccccgcacctccagccttcccgactcgcagagtctcccgangccccttttcgcctcgggtttatttattgactgtctttccccctgtcctcgacagaagagtgggaggtgagaagcccgtctnctcagtgagccagcatttca

SEQ ID NO: 69 - DNA, 267 bp, Homo sapiens
cgcgagcaagatggccaccaccaagcgcgtcttgtacgtgggtggactggcagaggaagtggacgacaaagttcttcatgctgcgttcattccttttggagacatcacagatattcagattcctctggattatgaaacagaaaagcaccgaggatttgcttttgttgaatttgagttggcagaggatgctgcagcagctatcgacaacatgaatgaatctgagctttttggacgtacaattcgtgtcaatttggccaaaccaatgag

SEQ ID NO: 70 - DNA, 256 bp, Homo sapiens
gaaaaatgcattttttgtgggagatcttggaaagattgtgaagaaacacagtcaatggcagaatgtagtggctcagataaagccattctacacagtgaagtgcaactctgctccagctgtacttgagattttggcagctcttggaaccggatttgcttgttccagtaaaaatgaaatggctttagtgcaagagttgggtgtacctccagaaaacattatttacataagtccttgcaagcaagtgtctcagataaag

SEQ ID NO: 71 - DNA, 244 bp, Homo sapiens
ggagcagacgggtcgcggcgagcgcgcctatgacatctactcgcggctgctgcgggagcgcatcgtgtgcgtcatgggcccgatcgatgacagcgttgccagccttgttatcgcacagctcctcttcctgcaatccgagagcaacaagaagcccatccacatgtacatcaacagccctggtggtgtggtgaccgcgggcctggccatctacgacacgatgcagtacatcctcaacccgatctgc

SEQ ID NO: 72 - DNA, 768 bp, Homo sapiens
  misc_feature 7, 8, 11, 12, 13, 14, 15, 16, 21, 24, 25, 27, 28, 32, 593,668, 713: n = A,T,C or G
tttggannccnnnnnntttgnaanncnncagnctacttgttctttttgcaggatcccatcgattcgaattcggcacgagggaacctctatgctggggactattaccgtgtgcagggccgggcagtgctgcccatccgctggatggcctgggagtgcatcctcatggggaagttcacgactgcgagtgacgtgtgggcctttggtgtgaccctgtgggaggtgctgatgctctgtagggcccagccctttgggcagctcaccgacgagcaggtcatcgagaacgcgggggagttcttccgggaccagggccggcaggtgtacctgtcccggccgcctgcctgcccgcagggcctatatgagctgatgcttcggtgctggagccgggagtctgagcagcgaccacccttttcccagctgcatcggttcctggcagaggatgcactcaacacggtgtgaatcacacatccagctgcccctccctcagggagcgatccaggggaagccagtgacactaaaacaagaggacacaatggcacctctgcccttcccctcccgacagcccatcacctctaatagaggcagtgagactgcangtgggctgggcccacccagggagctgatgccccttctcccttctggacacactctcatgtcccttcctgttcttncttctagaaccctgtcgccaccactggtctgtggatgggatcctntcaccttctctaccatccttgggaaggtggggagaaattaggatagacactggct

SEQ ID NO: 73 - DNA, 788 bp, Homo sapiens
  misc_feature 4, 8, 20, 22, 26, 723: n = A,T,C or G
gaanctcngccttttgaccnangcangatccctcgattcgaattcggcacgaggagaaatactcactacgccaaatcgttacactacaccctcaaaagctagaaaccagtgcctgaaagaaactccaattaaaataccagtaaattcaacaggaacagacaagttaatgacaggtgtcattagccctgagaggcggtgccgctcagtggaattggatcttaaccaagcacatatggaggagactccaaaaagaaagggagccaaagtgtttgggagccttgaaagggggttggataaggttatcactgtgctcaccaggagcaaaaggaagggttctgccagagacgggcccagaagactaaagcttcactataatgtgactacaactagattagtgaatccagatcaactgttgaatgaaataatgtctattcttccaaagaagcatgttgactttgtacaaaagggttatacactgaagtgtcaaacacagtcagattttgggaaagtgacaatgcaatttgaattagaagtgtgccagcttcaaaaacccgatgtggtgggtatcaggaggcagcggcttaaagggccgatgcctgggtttacaaaaagattagtgggaagacatcctatctagcttgcaaggtataaattggatggattcttccatcctgccggatgaattgtgggtgtgattacagcctacttaaagactggtatganccgctttgattttaaagttcattggaactaccaacttggtttcttaagaacctttcttaagaact

SEQ ID NO: 74 - DNA, 701 bp, Homo sapiens
  misc_feature 1, 3, 4, 13, 31, 43, 91, 619, 668, 691: n = A,T,C or G
ncnnaggaaaacnctttgcaaactcttgganccctttgcaggnatcccatcgattcgaattcggcacgagggacagtgtacaaggcccgtnttccccacagtggccactttgtggccctcaagagtgtgagagtccccaatggaggaggaggtggaggaggccttcccatcagcacagttcgtgaggtggctttactgaggcgactggaggcttttgagcatcccaatgttgtccggctgatggacgtctgtgccacatcccgaactgaccgggagatcaaggtaaccctggtgtttgagcatgtagaccaggacctaaggacatatctggacaaggcacccccaccaggcttgccagccgaaacgatcaaggatctgatgcgccagtttctaagaggcctagatttccttcatgccaattgcatcgttcaccgagatctgaagccagagaacattctggtgacaagtggtggaacagtcaagctggctgactttggcctgccagaatctacagctaccagatggcacttacacccgtggttggtacactctggtacccgagctcccgaagttcttctgcaagtccacatatgcaacacctgtggacatgtggaagtgntggctggatctttgcagagatgtttcgtcgaaagcctctcttctgtggnaacttgaaaccgaccagttggcnaaatctttga

SEQ ID NO: 75 - DNA, 694 bp, Homo sapiens
  misc_feature 4, 7, 11, 21, 27: n = A,T,C or G
gaantcntttncaagctattngatctntttgcaggatcccatcgattcgaattcggcacgaggccagacaagcctgactctgaggagcaagccaagatagcaaagcttggacttaagctgggtttgctcacctctgacgctgactgcgaaattgagaagtgggaagatcaggagaatgagattgttcaatatggacggaacatgtccagtatggcctattctctgtatttatttactagaggagaggggccactgaaaacttcccaggatttaattcatcaactagaggtttttgctgcagagggtttaaagcttacttccagtgttcaagctttttcaaaacagctgaaagacgatgacaagcttatgcttctcctggaaataaacaagctaattcctctatgccaccagctccagacagtaactaagacttctttgcagaataaagtatttctaaaggttgacaagtgtattacgaagacaagatccatgatggctctcttagtccaacttctttcactttgttataaactgctgaagaagatggaaaataacggatgggtctcagttacaaataaggacactatggatagtaaaacttgagaagcttttggggtcagatctcttggaacatcatgtgatgaagctgacatttttaaaaatcaaatgatcctttatcttttcagaaattcat

SEQ ID NO: 76 - DNA, 738 bp, Homo sapiens
  misc_feature 2, 3, 4, 5, 6, 7, 8, 9, 10, 11, 12, 13, 17, 20, 21, 23, 24,25, 26, 27, 28, 40, 45: n = A,T,C or G
gnnnnnnnnnnnntttnaanncnnnnnnttttgaatcccntacantctacttgttctttttgcaggatcccatccgattcgaattcggcacgagccagagccttctctctcctgtgcaaaatggcaactcttaaggaaaaactcattgcaccagttgcggaagaagaggcaacagttccaaacaataagatcactgtagtgggtgttggacaagttggtatggcgtgtgctatcagcattctgggaaagtctctggctgatgaacttgctcttgtggatgttttggaagataagcttaaaggagaaatgatggatctgcagcatgggagcttatttcttcagacacctaaaattgtggcagataaagattattctgtgaccgccaattctaagattgtagtggtaactgcaggagtccgtcagcaagaaggggagagtcggctcaatctggtgcagagaaatgttaatgtcttcaaattcattattcctcagatcgtcaagtacagtcctgattgcatcataattgtggtttccaacccagtggacattcttacgtatgttacctggaaactaagtggattacccaaacaccgcgtgattggaagtggatgtaatctggattctgctagatttcgctaccttatggctgaaaaacttggcattcatcccagcagctgccatggatggattttgggggaacatggcgactcaagtgtggctgtgtggaatggtgtgaat

SEQ ID NO: 77 - DNA, 244 bp, Homo sapiens
  misc_feature 5, 12, 19, 31, 124, 169, 200: n = A,T,C or G
accgntctcggnggctttnacccagtttggntcttccttgtggtgggaggagtgatgttcattttgggatttgcagggtgcattggagcgctacgggaaaacactttccttctcaagttttttnctgtgttcctgggaattattttcttcctggagctcactgccgganttctagcatttgtcttcaaagactggatcanagaccagctgtatttctttataaacaacaacatcagagcatatc

SEQ ID NO: 78 - DNA, 305 bp, Homo sapiens
  misc_feature 2: n = A,T,C or G
gnccagtggagccccaaaatagaagcaagatgaatattccattccgcattggcaatgccaaaggagatgatgcttagaaaaaagatttcttgataaagctcttgaactcaatatgttgtccttgaaagggcataggtctgtgggaggcatccgggcctctctgtataatgctgtcacaattgaagacgttcagaagctggccgccttcatgaaaaaatttttggagatgcatcagctatgaacacatcctaaccaggatatactctgttcttgaacaacatacaaagtttaaagtaacttgggga

SEQ ID NO: 79 - DNA, 260 bp, Homo sapiens
  misc_feature 102: n = A,T,C or G
ttcactttgaatctatctgcaccgtttattagccagttctacaaggaatcattgatgaaagttatgccttatgttgatatactttttggaaatgagacagangctgccacttttgctagagagcaaggctttgagactaaagacattaaagagatagccaaaaagacacaagccctgccaaagatgaactcaaagaggcagcgaatcgtgatcttcacccaagggagagatgacactataatggctacagaaagtgaagt

SEQ ID NO: 80 - DNA, 120 bp, Homo sapiens
  misc_feature 98, 108, 117: n = A,T,C or G
ggggaaaggaggtctcactgagcaccgtcccagcatccggacaccacagcgggcccttcgctccacgcagaaaaaccacactttctcaaacctttcantcaacacttncctttcccnaaa

SEQ ID NO: 81 - DNA, 282 bp, Homo sapiens
  misc_feature 42, 45, 118, 159, 178, 200, 202, 214, 221, 235, 248, 256,259, 265, 270, 280, 281: n = A,T,C or G
atgattatcaaggaagaggaagaagatactgcagagaagccntgnaaggaagaggatgtcgtgactccaaaaccaggcaagagaaagagagaccaggcagaggaggagcccaacagantaccaagccgcagcctccgacggaccaaacttaaccaagantcaacagcccccaaagtgnttttccaggagtggtggatgcncngggaaaacgggnttgtgcntggctctggggggnttctggcggtttngcggcagnggntccccncttgncattattggnnc

SEQ ID NO: 82 - DNA, 231 bp, Homo sapiens
cggcatcgtgtgataaaactgccaaaatgtgggacctcagcagtaaccaagcgatacagatcgcacagcatgatgctcctgttaaaaccatccattggatcaaagctccaaactacagctgtgtgatgactgggagctgggataagactttaaagttttgggatactcgatcgtcaaatcctatgatggttttgcaactccctgaaagtgttacgtgctgacgtgatatac

SEQ ID NO: 83 - DNA, 294 bp, Homo sapiens
agtcactaggatgcagatggaccacactttgagaaacaccacccatttctactttttgcaccttattttctctgttcctgagcccccacattctctaggagaaacttagaggaaaagggcacagacactacatatctaaagctttggacaagtccttgacctctataaacttcagagtcctcattataaaatgggaagactgagctggagttcagcagtgatgcttttagttttaaaagtctatgatctggacttcctataatacaaatacacaatcctccaagaattgacttg

SEQ ID NO: 84 - DNA, 518 bp, Homo sapiens
  misc_feature 2, 3, 4, 5, 6, 11, 14, 18, 26, 27, 49, 50, 59, 97, 104, 110,127, 132, 151, 180, 195, 199, 201, 217, 228, 251, 280, 292,301, 304, 309, 318, 349, 361, 374, 379, 388, 389, 394, 399,409, 420, 423, 435, 436, 441, 459, 465, 474, 482: n = A,T,C or G
  misc_feature 489, 499, 506, 507, 509, 510, 512, 514: n = A,T,C or G
gnnnnntaatnaanaacntttgcctnntaaaccctttttgaaaaccatnnaagctcaangggactacgggaagcagcgggcagcggcccgcggtttncattttngagatntgggtgcaaaagcccanggttnggaaccgtaagcatgctgngccccaaaggtttggcccatgtgctaagncaagccaacactggnggcntncagagcaccctgctgntgaataacganggatcactgctggcctactctgnttacggggacactgacgcccgggtcaccnatgacatagccngttacatcnggnccgantactaccgngaacgggaaccaatcttttaatgaagacaanctcaaattcatnctcatggactgcntgganggccgtgtnnccatnacccnagtggccaancttatgctgtnaanatatgccaaagnnaccgngggctttggaatgctcancgccantgcccaagnttttgtgnactaccnggaggagccncttaaannanncncncccc

SEQ ID NO: 85 - DNA, 515 bp, Homo sapiens
  misc_feature 3, 4, 13, 20, 95, 464: n = A,T,C or G
ttnntttgaaaancatttanctacttgttttttatgcaggatcccatcgattcggacacattggagctggagagcccctcgctgacatccacccnagtgtgcagccagaaggtggtggtcaccacaccactgcaccgggacaagacacccctgcaccagaaacatgctgcgtttgtaaccccagatcagaagtactccatggacaacactccccacacgccaaccccgttcaagaacgccctggagaagtacggacccctgaagcccctgccacagaccccgcacctggaggaggacttgaaggaggtgctgcgttctgaggctggcatcgaactcatcatcgaggacgacatcaggcccgagaagcagaagaggaaacctgggctgcggcggagccccatcaagaaagtccggaagtttctggctcttgacattgtggatgaggatgtgaagctgatgatgtncacactgcccaagtctctatccttgccgacaaccctttgggggccccccct

SEQ ID NO: 86 - DNA, 757 bp, Homo sapiens
  misc_feature 1, 469, 577, 619, 643: n = A,T,C or G
ngtatttatcactcttgtctttttgcaggatccctcgattcgaattcggcacgaggtcaaaagctgtcgaaaccgttcacaatttgtgttgcaacgagaacaaaggggcctctgaactagtggcagaattgagcacactttatcagtgtattaggtttccagtgggtagcaatggggtgtgctgaagtgggtggattggactgtatcagaaccaaggtactttcagctgcagactgaccatacccctgtccacctggcgttgctggatgagatcagcacctgccaccagctcctgcacccccaggtcctgcagctgcttgttaagctttttgagactgagcactcccagctggacgtgatggagcagcttgagttgaagaagacactgctggacaggatggttcacctgctgagtcgaggttatgtacttcctgttgtcagttacatcccgaaaaaagggttttggggntttctggagaagctggacactgacatttcactcattcgctattttgtcactgaggtgctggacgtcattgctcctccttatacctctgacttcgtgcaacttttcctncccatcctggagaatgacagcatcgcaggtaccatcaaaacngaaggcgagcatgaccctgtgacngagtttatagctcactgcaaatctaacttcatcatggtgaactaatttagagcatccttcagactgaacagaacattccagaacccgttgtggaaaacccttcaagaactgttt

SEQ ID NO: 87 - DNA, 732 bp, Homo sapiens
  misc_feature 1, 3, 10, 12, 17, 19, 24, 344, 359, 417, 428, 429, 468, 543,552, 555, 582, 617, 621, 627, 636, 650, 658, 672, 677, 686,695, 702, 710: n = A,T,C or G
ngncttttanantacananacaanctacttgttctttttgcaggatcccatcgattcgaattccgttgctgtcgcccgcgccccgggcaggccagtcatgtgttaagttgcgcttctttgctgtgatgtgggtgggggaggaagagtaaacacagtgctggctcggctgccctgagggtgctcaatcaagcacaggtttcaagtctgggttctggtgtccactcacccaccccaccccccaaaatcagacaaatgctactttgtctaacctgctgtggcctctgagacatgttctatttttaaccccttcttggaattggctctcttcttcaaaggaccaggtnctgttcctctttctncccgactccaccccagctccctgtgaagagagagttaatatatttgttttatttattngctttttgcgnngggatgggttcgtgtccagtcccgggggtctgatatggncatcacaggctgggtgttcccagcagccctggcttgggggcttgacgcccttcccttgccccaggccatcatctncccactctnctnccctcttcttagtattgccgactgctnttcatctgagtcaccatttactccaagcatgtatnccanacttgncactgactnttcttctggagcangtggctanaaaaaaaagctgtnggcangaaaaaaangctcctgtntctcatntgtgaagncagcctctgggcttttctgccg

SEQ ID NO: 88 - DNA, 541 bp, Homo sapiens
  misc_feature 6: n = A,T,C or G
attatntcagctcttgttctttttgcaggatccctcgattcgaattcggcacgagccgtcacttacggccggagctgtttgtgctgggagctggtggcgcggtgcagggctcttaagaacgaacggcttgggcgcggactggtatccggggactgtgacttgcagggtccgccatggagccagagcagatgctggagggacaaacgcaggttgcagaaaatcctcactctgagtacggtctcacagacaacgttgagagaatagtagaaaatgagaagattaatgcagaaaagtcatcaaagcagaaggtagatctccagtctttgccaactcgtgcctacctggatcagacagttgtgcctatcttattacagggacttgctgtgcttgcaaaggaaagaccaccaaatcccattgaatttctagcatcttatcttttaaaaaacaaggcacagtttgaagatcgaaactgacttaatgggaagaacagaaaaatttagttgctactgtagatttacatgattaaggaaaggggccccca

SEQ ID NO: 89 - DNA, 715 bp, Homo sapiens
  misc_feature 22, 30, 86, 249, 463, 471, 562, 568, 573, 631, 682, 690: n = A,T,C or G
tttattccattcacctattcanctacttgntctttttgcaggatcccatcgattcgaattccgttgctgtcggcggctgcagcggncttgtaggtgtccggctttgctggcccagcaagcctgataagcatgaagctcttatctttggtggctgtggtcgggtgtttgctggtgcccccagctgaagccaacaagagttctgaagatatccggtgcaaatgcatctgtccaccttatagaaacatcagngggcacatttacaaccagaatgtatcccagaaggactgccctgtctctctctgttgtagcaactgcctgcacgtggtggagcccatgccagtgcctggccatgacgtggaggcctactgcctgctgtgcgagtgcaggtcgaggagcgcagcaccaccaccatcaaagtcatcattgtcatctacctgtccgtggtgggtgccctgtttggccntttccccnttcatggccttctgatgctggtggacctctgatccgaaagccggatgcatacactgagcaactgacaatgaggaggagaatgaggccccangagggnagggncccatctgagatctcagaactaagcttcacaacctgcacactgtgtcactctgaatgnaaggaaggtctcagctgacattgggagccagctccagctgggaagatctcnttatgcanactgtgatcctcgggacccacaact

SEQ ID NO: 90 - DNA, 762 bp, Homo sapiens
  misc_feature 1, 617, 713, 717: n = A,T,C or G
nttatcagctcttgttctttttgcaggatcccatcgattcgaattcggcacgaggccactgccgtctccgccgccactgggcccccagagccccagccccagagcctaggaacctggggcccgctcctcccccctccaggccatgaggattctgcagttaatcctgcttgctctggcaacagggcttgtagggggagagaccaggatcatcaaggggttcgagtgcaagcctcactcccagccctggcaggcagccctgttcgagaagacgcggctactctgtggggcgacgctcatcgcccccagatggctcctgacagcagcccactgcctcaagccccgctacatagttcacctggggcagcacaacctccagaaggaggagggctgtgagcagacccggacagccactgagtccttcccccaccccggcttcaacaacagcctccccaacaaagaccaccgcaatgacatcatgctggtgaagatggcatcgccagtctccatcacctgggctgtgcgacccctcaccctctcctcacgctgtgtcactgctggcaccagctgcctcatttccggctggggcaacacgttcagcccccaattacgcctgcctnaaccttgcgatgcgccaacataccatcattgacaccagaatgtgagaacgcctacccggcaacatcacagacaccatggtgtgtgccaacgtgcangaanggggcaaggattctggcaggtgacttcggggcccttttggttgta

SEQ ID NO: 91 - DNA, 315 bp, Homo sapiens
  misc_feature 209, 215, 249, 257, 261, 267, 272, 279, 284, 290, 301: n = A,T,C or G
gtcctgcaggccatctacgtgattgacttcttctggaacgaaacctggtacctgaagaccattgacatctgccatgaccacttcgggtggtacctggggctggggcgactgtgtctggctgccttatctttacacgctgcagggtctgtattggtgtaccaccccgtgcagtgtccaacccgcaagccgtggcgtcctgtgcttggctngtgggnaatacatctccgggtggcaaccacaagaagactnttcgcggnagantggccntgctnattgggnagaanccaagntcatcgaggcnctaaaatcgggagg

SEQ ID NO: 92 - DNA, 79 bp, Homo sapiens
  misc_feature 23: n = A,T,C or G
ggaaagatggcgtcccgcaaggnaggtaccggcttctactgccacctctttccagcttccaccggccggcgcagcaggg

SEQ ID NO: 93 - DNA, 831 bp, Homo sapiens
  misc_feature 2, 4, 6, 9, 11, 12, 14, 33, 93, 95, 102, 372, 486, 531, 547,630, 641, 652, 671, 681, 697, 711, 714, 759, 763, 766, 791,796, 829: n = A,T,C or G
tncntnttngnntntaatcccttccccattccnctacttgttctttttgcaggatcccatcgattcgtcactactcagcttttggctctgtgntntagtggnttcgggccatcaaaatgggaagatacgaagaaagtttcgcagccgctggctttggctccttcgagctggtcagccagatctctgctgaggacctgctccgaatcggagtcactctggcgggacaccagaagaaaatcttggccagtgtccagcacatgaagtcccaggccaagccgggaaccccgggtgggacaggaggaccggccccgcagtactgacctgcaggaactccccaccccagggacaccgcctccccattttccggggcanagtggggactcacagaggcccccagccctgtgccccgctggattgcactttgagcccgtggggtgaggagttggcaatttggagagacaggatttgggggttctgccataatangaggggaaaatcaccccccaccacctcggggaacttcagaccaanggtgagggcgcctttncctcaagactgggtgtgaccagaggaaaaggaagtgcccaacatcttccaaccttcccaagtgcccccctcaccttgatgggngcgttcccgcngaccaaaaaanagtgtgacttcccttgccngcttccaaantgggggggggcttgtncccagggggcaaanaangggtgttaagggccccatgaccaaaaacaattggggtttggtggncccnaanttggtggttgtcaccaccaaacttnaatanttttttttcccttgtaaatgccccttcccccantg

SEQ ID NO: 94 - DNA, 806 bp, Homo sapiens
  misc_feature 2, 3, 6, 11, 13, 14, 22, 26, 29, 30, 32, 36, 81, 88, 99,107, 123, 130, 141, 148, 214, 216, 375, 420, 445, 447, 452,486, 506, 534, 559, 627, 633, 636, 662, 666, 685, 686, 692,698, 699, 721, 724, 749, 777: n = A,T,C or G
annttnattgnanngaaatccnttcnacnngncccnttgcaggatccctcgattcgaattcggcacgagcccaccatcacngaggccntggtagcacgntttcgganaagccatccctgcctnagaagcngagcaggctgnggagcangaagcttcctgacatgggctgcagtcttcctgagcacagggcacaccaagaagcaagccataggcngntctgtgagtcaaagaatgggcccccttatccccagggagctggccagttagattatgggtccaaagggattccagacacttctgagccagtcagctaccacaactctggagtaaaatatgctgcatccgggcaagaatctttaagactgaaccacaaanaggtaaggctctccaaagagatggagcgaccctgggttaggcagncttctgccccagagaaacactccananactgntacaaggaggaagaacacctcactcagtcaatcntcccaccccctaaaccaganaggagtcatagcctgaaactccatcatncccagaacgtggagagggaccccantgtgctgtaccagtaccaaccacacggcaagcgccagagcagtgtgactgttgtgtcccagtatgatnacctgnaanattaccacttgctgcctcagcaccancgangagtcttttggagggggcnngtatgngggacnntttgtgccccccttgggttttnccnattcacaaaaagcaaggaccttatnctttcagcgttgggtcaagggggctttnctgccccccaaaatttttccttgcacatt

SEQ ID NO: 95 - DNA, 314 bp, Homo sapiens
cggacggtggggaaacgctctatctagtttacctagcaaaagctcaaaactgcgctagtatggactttttggacagacttagtttttgcacataaccttgtacaatcttgcaacagaggccagccacgtaagatatatatctggactctcttgtattataggatttttcttgttctgaatatccttgacattacagctgtcaaaaacaaaaactggtatttcagatctgttttctgaaatcttttaagctaaaatcacatgcaagaattgactttgcagctactaattttgacaccttttagatctgtataaaa

SEQ ID NO: 96 - DNA, 255 bp, Homo sapiens
ccacaacctgctcatgggtgacaccaaggagcagcgcatcctgaaccatgtgctgcagcatgcggagcccgggaacgcacagagcgtgctggaggccattgacacctactgcgagcagaaggagtgggccatgaacgtgggcgacaagaaaggcaagatcgtggacgccgtgattcaggagcaccagccctccgtgctgctggagctgggggcctactgtggctactcagctgtgcgcatggcccgcctgctgtc

SEQ ID NO: 97 - DNA, 261 bp, Homo sapiens
ccaacctggagctccactccctctccactggccgtcttcccagagttgtgacagccaatcggatgctgaagcagatgcttttcaggtatcaaggttacattggtgcagccctagttttagggggagtagatgttactggacctcacctctacagcatctatcctcatggatcaactgataagttgccttatgtcaccatgggttctggctccttggcagcaatggctgtatttgaagataagtttaggccagacatggagg

SEQ ID NO: 98 - DNA, 734 bp, Homo sapiens
  misc_feature 651, 706, 708, 722, 727: n = A,T,C or G
ttttcttcaactacttgttctttttgcaggatcccatcgattcgaattccgttgctgtcgaggggacaagcttcgtttcaggggtctgccgttccatcctggttcagagaaggccgagcgtggctttctctagccttgtcactgtctccctgcctgtcaatcaccacctttcctccagaggaggaaaattatctcccctgcaaagcccggttctacacagatttcacaaattgtgctaagaaccgtccgtgttctcagaaagcccagtgtttttgcaaagaatgaaaagggaccccatatgtagcaaaaatcagggctgggggagagccgggttcattccctgtcctcattggtcgtccctatgaattgtacgtttcagagaaattttttttcctatgtgcaacacgaagcttccagaaccataaaatatcccgtcgataaggaaagaaaatgtcgttgttgttgtttttctggaaactgcttgaaatcttgctgtactatagagctcaaaaggacacagcccgtcctcccctgcctgcctgattccatggctgttgtgctgattccaatgctttcacgttggttcctggcgtgggaactgctcttctttgcagccccatttccaagctctgttcaagttaaacttatgtnagctttccgtggcattgcggggcgcgcaccccgttcccgctgcgtaagactcttntntttggatgccaatncacangcctgaa

SEQ ID NO: 99 - DNA, 736 bp, Homo sapiens
  misc_feature 5, 11, 16, 22, 198, 241, 466, 470, 506, 590, 612, 626, 632,662, 673, 694, 705: n = A,T,C or G
agtcnttgganttcanatacangctacttgttctttttgcaggatcccatcgattcgaattccgttgctgtcggctggcgtcaagagcagttgactcactgatgaaggccctggtgaggagaaagcactctgttcttcgcctactctgtaatcgttttgtcataatgagccatgaaaaaagtaatgaacttgtgctgntaatcgtcactgtaatgagaagtcttacgtacaacatagctgnggtggctgcgtggtttaatggctgcattagataggatcctcacatcccattcagaaccaaaactgatacagtgaaacaattaaggtgagcaaatagttttaacctttctttttttttttttaagtttcattcttcctagaatatttttctaacaatttttatttcagctttaaagatgggtcatatagccaaacgggccatataatccaacattgttgagatgtnttangacatctaaggcaaaactggcacatttgttctgcanactattgcaggaatgttttttcctagcatttctatattatctgtccattctgaggaaccagtgaatgtcctataaatgcacctnctgtcaaaaccatgcctgatangtcccggctgggantgacanggtgcttcttaaattctattggcccttctntcattctccgnacttactcctttttatgggtnaggtcaaatanggttacagtcccttttttttaatgcctaagt

SEQ ID NO: 100 - DNA, 732 bp, Homo sapiens
  misc_feature 2, 3, 7, 12, 13, 16, 18, 37, 75, 328, 365, 394, 427, 442,447, 448, 451, 455, 462, 479, 515, 517, 529, 531, 540, 614,643, 649, 667, 699, 716, 721, 725, 731: n = A,T,C or G
tnncatntaganntcnanctacttgttctttttgcangatcccatcgattcgaattccgttgctgtcgccggctngagctcaccacctacctctttggccaggacccttgaccagccaggcctgaaggaagacctgcggatggacaggagcgggcaggcccgcacatatccacttgctggagcccatgtttacagacagggacatacaccatgcagatcctgagttcctgctgtatgagcagggatatccatgcttatgtatccaaacacagagacccatgggaacaaatgagacacatatagatactgagacctgtgtgtacagtangaccatgcactcacacccatctggagagggagccccnggtataccaagggagccagttgtgttcanacacacacatcacagcttgactcactaactgangcctttccatagctncacannttnccanctcctcnccaccaaaccggggttntagagttaaggatgggggagggtattatactgcctnantctgacttctcnanccaacaatnaattttaggggatgatggggaagaagagctgcctttaggaggccctcttcacctgcagctatgatgcccttccnttttccttgtcctcaccatatgcttatcnccattntactcccatgttatgctngagcccctgtggcttgttcacaagccctaagnaacaaaaatcatctggngaaanaagnatttant

SEQ ID NO: 101 - DNA, 706 bp, Homo sapiens
  misc_feature 2, 7, 28, 36, 129, 167, 178, 245, 349, 412, 467, 527, 573,588, 628: n = A,T,C or G
tngattngatacagctctagtctatacncgctactngttctttttgcaggatcccatcgattcgaattccgttgctgtcgagcaaaaccatactccaagaaagcatcatcaacatcaccaccagcagcngcaccaccagcagcaacagcagcagccgccaccaccgncaatacctgcnaatgggcaacaggccagcagccaaaatgaaggcttgactattgacctgaagaattttagaaaaccangagagaagaccttcacccaacgaagccgctttttgtgggaaatcttcctcccgacatcactgaggaagaaatgaggaaactatttgagaaatatggaaaggcangcgaagtcttcattcataaggataaaggatttggctttatccgcttggaaacccgaaccctancggagattgccaaagtggagctggacaatatgccactccgtggaaagcagctgcntgtgcgctttgcctgccatagtgcatcccttacagttcgaaaccttcctcagtatgtgtncaacgaactgctggaagaagccttttctgtgtttggccatgtaganagggctgtagtcatngtggatgatcgaggaaggccctcaggaaaaggcattggtnagttctcaagggaagccacttgctcggaaaaagctctggacagatgcagtgaaagcttcttttctggttaaccacatt

SEQ ID NO: 102 - DNA, 924 bp, Homo sapiens
  misc_feature 2, 3, 4, 5, 6, 8, 9, 10, 11, 13, 14, 15, 16, 17, 18, 19,21, 22, 23, 24, 25, 26, 27, 28, 29, 30, 31, 32, 33, 34,35, 36, 37, 38, 39, 40, 41, 42, 43, 44, 45, 46, 47, 48,49, 50, 51, 52, 53, 54, 55, 56, 57, 58, 61, 62, 65, 67,68, 69: n = A,T,C or G
  misc_feature 70, 71, 72, 73, 74, 75, 76, 77, 78, 79, 85, 86, 87, 88, 89,91, 92, 93, 95, 96, 97, 98, 99, 100, 101, 103, 105, 106,107, 108, 109, 110, 111, 112, 113, 114, 115, 116, 117, 118,119, 120, 121, 122, 123, 134, 141, 149, 166, 311, 354: n = A,T,C or G
  misc_feature 369, 411, 423, 438, 450, 461, 462, 471, 523, 538, 554, 565,594, 595, 618, 619, 626, 631, 637, 640, 641, 642, 654, 689,706, 732, 740, 759, 772, 794, 797, 801, 804, 815, 816, 820,830, 838, 839, 858, 875, 890, 893, 901, 905, 906, 916: n = A,T,C or G
  misc_feature 919, 922, 924: n = A,T,C or G
annnnnannnngnnnnnnnannnnnnnnnnnnnnnnnnnnnnnnnnnnnnnnnnnnnnacnnacngnnnnnnnnnnnnngggggnnnnncnnncnnnnnnnancnnnnnnnnnnnnnnnnnnncgagcggtttntttgtancaacctcncaaactacctgggttcnttttgcaaggaacccatcgattcgaattccgttgctgtcgagccagccaggcctgtcgtctgggacccaggaggcctctgatgaccaagggctttcacatcctaagtcatttggaaggaggccttgagaacaaagtcacctttgncactcccagtgaactgaatgaggaacatgctggctcctgtctnggcctcccctttcangagatactggggagaagagaacattcctcctggcttaggtgnagcaagacccangacctggtgcccagntttggtcccccntcccaacttcnnaaagcacgnggctgcagagccaccttggtctgagccacctgagggaccaagccccctcctncctcagaaggcgggncatctcttaggggganattcttaaagntgaaaaaaaggggggggggggaaccatanntgcccctccctccccatcaaaannttccttncattnaacttngcnnnaaaatgagtcantataaagaaaactctatttgggtggaggggatatnccacttctggggaaaancattacaaattcaaacccgcttctcntcagtttnattttaagaatgctttttngttgcagaaccgnggagctcctaaaagtggaaagnccncccnagnggtgtggtggnngaanaaaaaaaaanaccttggnnaacctccatttacaggctngggcccttatcttaacnattaaacccaagganccngaagcccnggcnngggaatttgnctnaancn

SEQ ID NO: 103 - DNA, 511 bp, Homo sapiens
  misc_feature 2, 3, 4, 5, 6, 7, 8, 9, 10, 15, 21, 28, 182, 417, 500: n = A,T,C or G
gnnnnnnnnnttttnaatttncatacangctacttgttctttttgcaggatcccatcgattccgaattccgttgctgtcgatcctgggccacccctacgacgtggccattgacatgtggagcctgggctgcatcacggcggagttgtacacgggctaccccctgttccccggggagaatgangtggagcagctggcctgcatcatggaggtgctgggtctgccgccagccggcttcattcagacagcctccaggagacagacattctttgattccaaaggttttcctaaaaatataaccaacaacagggggaaaaaaagatacccagattccaaggacctcacgatggtgctgaaaacctatgacaccagcttcctggactttctcagaaggtgtttggtatgggaaccttctcttngcatgaccccggaccaggccctcaagcatgcttggattcatcagtctcggaacctcaaaagggccccaaccagggcccccccnaagggcccccc

SEQ ID NO: 104 - DNA, 715 bp, Homo sapiens
  misc_feature 2, 3, 4, 7, 10, 15, 21, 626: n = A,T,C or G
gnnnttnaantatanatacanctacttgttctttttgcaggatcccatcgattcgaattccgttgctgtcgctcagctgagttttgaactgagtgaatttcgaagaaaatatgaagaaacccaaaaagaagttcacaatttaaatcagctgttgtattcacaaagaagggcagatgtgcaacatctggaagatgataggcataaaacagagaagatacaaaaactcagggaagagaatgatattgctaggggaaaacttgaagaagagaagaagagatccgaagagctcttatctcaggtccagtttctttacacatctctgctaaagcagcaagaagaacaaacaagggtagctctgttggaacaacagatgcaggcatgtactttagactttgaaaatgaaaaactcgaccgtcaacatgtgcagcatcaattgcatgtaattcttaaggagctccgaaaagcaagaaatcaaataacacagttggaatccttgaaacagcttcatgagtttgccatcacagagccattagtcactttccaaggagagactgaaaacagagaaaaagttgccgcctcaccaaaaagtcccactgctgcactcaatgaaagcctggtggaatgtnccaagtgcaatatacagtatccagccactgagcatcgcgatctgcttgtccatgtggaatactggtcaaagtacaaaataagtatttgt

SEQ ID NO: 105 - DNA, 715 bp, Homo sapiens
  misc_feature 17, 82, 97, 685, 699, 709, 712: n = A,T,C or G
tttttttaaaatacatncaactacttgttctttttgcaggatcccatcgattcgaattccgttgctgtcgagcatgaccaancagctgggtgacttntggacacggatggaggactccgccaccaagcccggcagcagggggcagaggcagtccaggcccagcagcttgcggaaggtgccagcgagcaggcattgagtgcccaagagggatttgagagaataaaacaaaagtatgctgagttgaaggaccggttgggtcagagttccatgctgggtgagcagggtgcccggatccagagtgtgaagacagaggcagaggagctgtttggggagaccatggagatgatggacaggatgaaagacatggagttggagctgctgcggggcagccaggccatcatgctgcgctcagcggacctgacaggactggagaacgtgtggagcagatccgtgaccacatcaatgggcgcgtgctctactatgccacctgcaagtgatgctacagcttccacccgttgccccactcatctgccgctttgcttttggttgggggcagattgggttggaatgctttccatcttcaggagactttcatgtagcctaaagtacagcctggaccacccctggtgtgtacttagtaaaaataccctgaacttgcaacttaaccttgacccaatgggacaantacactttgacaanacaaaagatngtngga

SEQ ID NO: 106 - DNA, 728 bp, Homo sapiens
  misc_feature 9, 20, 25, 450, 476, 486, 543, 557, 568, 589, 592, 606, 672,721: n = A,T,C or G
tggcttttnaaaacccttanacaanctacttgttctttttgcaggatcccatcgattcgaattccgttgctgtcggccaggaactgcatgctgaatgagaacatgtccgtgtgtgtggcggacttcgggctctccaagaagatctacaatggggactactaccgccagggacgtatcgccaagatgccagtcaagtggattgccattgagagtctagctgaccgtgtctacaccagcaagagcgatgtgtggtccttcggggtgacatgtgggagattgccacaagaggccaaaccccatatccgggcgtggagaacagcgagatttatgactatctgcgccagggaaatcgcctgaagcagcctgcggactgtctggatggactgtatgccttgatgtcgcggtgctgggagctaaatccccaggaccggccaagttttacagagctgngggaagatttggagaacacactgaangccttgcctnctgcccaggagcctgacgaaattctctatgtcaacatggatgagggtggaggttatncttgaaccccctgnacttgcaggangactgacccccccaacccaancanaccctaagggattnctgtacttgcctcacttgcgggctgaggtccatcctggttggacgcttttgtccttttgccctttncaacaaccccttaaccccgcttaaacctgtttataaggggcttccccancagccct

SEQ ID NO: 107 - DNA, 656 bp, Homo sapiens
  misc_feature 2, 11, 12, 13, 18, 122, 130: n = A,T,C or G
gncttttgaannnccttnaccactacttgtgtctttttgcaggatcccatcgattcgaattccgttgctgtcggactatgatgccaactttaaaataaaggacttccctgaaaaactaaggntatctttnttgaagctcacctttgtctaaataactcagaccatgaccgacttcataccttggtaactgaacactgttttccagacatgacttgggacatcaaatataagaccgtccgctggagctttgtggaatctttagagccctctcatgttgttcaagttcgctgttcaagtatgatgaaccagggcaacgtgtacggccagatcaccactctggccatctatgaccggtttggccggttgatgtatggacaggaagatgtacccaaggatgtcctggagtatgttgtattcgaaaagcagttgacaaacccctatggaagctggagaatgcataccaagatcgttcccccatgggcaccccctaagcagcccatccttaagacggtgatgatccctggccctcagctgaaaccagaagaagaatatgaagaggcacaaggagaggcccagaagcctcagctagcctgatgacaaaaatgacttctagggtgaagcctgggtgatgaggctgctggaagctttgaagtctc

SEQ ID NO: 108 - DNA, 880 bp, Homo sapiens
  misc_feature 2, 9, 14, 190, 236, 476, 486, 516, 535, 544, 572, 580, 608,615, 621, 647, 677, 720, 724, 759, 793, 811, 830, 842, 846,863, 866, 870, 878: n = A,T,C or G
tnttattanatcanctcttgtctttttgcaggatccctcgattcgaattcggcacgaggccggctccagggccatgaagcccccaggaggagaatcgagcaatctttttggaagtccagaagaagctactccttccagcaggcctaataggatggcatctaatatttttggaccaacagaagaacctcanaacatacccaagaggacaaatcccccagggggtaaaggaagcggtntctttgacgaatcaacccccgtgcagactcgacagcacctgaacccacctggagggaagaccagcgacatttttgggtctccggtcactgccacttcacgcttggcacacccaaacaaacccaaggatcatgttttcttatgtgaaggagaagaaccaaaatcggatcttaaagctgcaaggagcatcccggctggagcagaccaggtgagaaaggcagcgccagaaaagcaggccccgncaaggagcangaacccatgcccacagtctacagccatganccccggctggggccgcggnctcgctctnacaacaaggtcctgaaccccaccgggangcaaaatncagcatcttccttctacttaagagaaanccactgnttcaancccggagcccagacccagaaaacttnaaagaagaataggggtaagcccatggtttntcaaattttcccttttgggccccaaaatggaacccgggggttngggnaaaaaaaggggtttaagtcccttaattgttgaaancccttgggcttcgctccatctctctctcttcttngcctctctcccattgganccctcctttgccttttggnaaacaacccccnttgnccctttcccaaaaattnggncttnggccaaanat

SEQ ID NO: 109 - DNA, 668 bp, Homo sapiens
  misc_feature 3, 8, 9, 10, 12, 14, 17, 25, 537, 560, 582, 585, 604, 609,622, 631, 644: n = A,T,C or G
cgnttaannncntnatntacatcanctacttgttctttttgcaggatcccatcgattcgcgcgagcgtctgggcgggtggtaggtgagtgggtattgcgggctagtatccgagcaaaagatggtggcgcaggccgagttaagagctttaatcctgtgaagacatcttagtgaagagtttagagtgctgagagttgaaagcttgcacgtgggaaacgtgcggccggactgccacatgtactgaggttgagtcgtgacggccacaggctccgagttttggcgtgaggaaccgctgatcggccacgggcgccgaacttgctggcctccggcatgtgcctgagcggcggcggaaaaaccaccttaattggggcggagggttagttttaacagcaaagggcctttactaaaatggcgaacgccttccgtcggcgttgttttaaaatgggaagcctcgaccctgtattgaaactgagctgttcgaaggcggcgttgtgtgcaattccgattaatgaaggggaagggttttgtgtggaaaaacnccttggagtgtgacatttctgcnagaatgcttaaataccgatttnccncaggaacaatggcgctgtnttcantggcacagtggancagctctgnagatgcaaagatnccccaaaaaaaaaaaccttttttt

SEQ ID NO: 110 - DNA, 276 bp, Homo sapiens
  misc_feature 14: n = A,T,C or G
gtcagagctgcctncgatttggtaaaatgtgctgcgagaagtggagccgcgtggcggcaaatgtttctcttcactgaggagcgggaggattgtaagatactgtgcctttgctccagggcatttgtggaggatcgaaaattgtacaatttgggattaaaaggctattacatcagagacagtggcaacaattcaggagaccaggcgacagaagaagaggaaggtggttattcctgtggtactgcagaatcacatgacagcaaaggcataggcctggct

SEQ ID NO: 111 - DNA, 701 bp, Homo sapiens
  misc_feature 3, 8, 12, 13, 14, 251, 269, 280, 378, 381, 413, 454, 496,547, 584, 598, 600, 636, 651, 659, 692, 695: n = A,T,C or G
ttnatccntttnnnatacaagctacttgttctttttgcaggatcccatcgattcgaattcggcacgaggagaaactcaaaagtaggaagctcctccttcctggagaactgtcacagtgacttcaggtcaccaaagggaggaggtacagaaagatgctggtgtatgtgacgaggctggtggccactgaagcaccacagtgcagtgggaagaaacaaggagagacaagctgggtccccacctaggaaacagangtgtggcaaccgggccanggctggcacangctgggggccaaggggaggagctccctgacgaccagtgcttttcggggcctcggtggtggttgcaagaaattgcctaccaaaacttcacccactgcancangccaagttgcacccgggaagccgaggaagaangtgagactcccccctttgcaggggtcttgactgagtacttnccaccatagcagtgggatacgcatgctggttgtaattgtagntctgatcggctctgctgcacgtttctgcagtgatgacgcgtccgcaccctnaataattgctttccagttgaagaaaggaatgttctgnttgaaatcctccanantcggctgaataaaagaggctcgggtgctggggggcnggacctggttcttgntatgcatnccattgatgaaacccacttggattaaaatcttncanaaaggg

SEQ ID NO: 112 - DNA, 227 bp, Homo sapiens
  misc_feature 94, 102, 152, 154, 199, 214: n = A,T,C or G
gccaaggagtggcaggccctctgtgcctaccaagcagagccaaacaactgtgccaccgcgcagggggagggcaacatcaaaaagaaccggcatnctgacttnctgccctatgaccatgcccgcataaaactgaaggtggagagcagcccttntnggagcgattacattaacggcagccccattattgagcatgaccctnggatgccagctacgnaggcaaggagggt

SEQ ID NO: 113 - DNA, 243 bp, Homo sapiens
agaaaacacatgaaaccctgagtcacgcagggcaaaaggcaactgcagctttcagcaacgttggaacggccatcagcaagaagttcggagacatgagttactccattcgccattccataagtatgcctgctatgaggaattctcctactttcaaatcatttgaggagagggttgagacaactgtcacaagcctcaagacgaaagtaggcggtacgaaccctaatggaggcagttttgaggagg

SEQ ID NO: 114 - DNA, 310 bp, Homo sapiens
  misc_feature 232, 240, 258, 300: n = A,T,C or G
taagatggaagcgtttttggggtcgcggtccggactttgggcggggggtccggccccaggacagttttaccgcattccatccactcccgattccttcatggatccggcgtctgcactttacagaggtccaatcacgcggacccagaaccccatggtgaccgggacctcagtcctcggcgttaagttcgagggcggagtggtgattgccgcagacatgctgggatcctacggntccttggntcgtttccgcaacatctntcgcattatgcgagtcaacaacagtaccatgctgggtgcctntggcgactac

SEQ ID NO: 115 - DNA, 706 bp, Homo sapiens
  misc_feature 1, 4, 573, 642, 655, 691, 701: n = A,T,C or G
nttnagatacaagctacttgttctttttgcaggatcccatcgattcgaattcggcacgagggaacctctatgctggggactattaccgtgtgcagggcccgggcagtgctgcccatccgctggatggcctgggagtgcatcctcatggggaagttcacgactgcgagtgacgtgtgggcctttggtgtgaccctgtgggaggtgctgatgctctgtagggcccagccctttgggcagctcaccgacgagcaggtcatcgagaacgcgggggagttcttccgggaccagggccggcaggtgtacctgtcccggccgcctgcctgcccgcagggcctatatgagctgatgcttcggtgctggagccgggagtctgagcagcgaccacccttttcccagctgcatcggttcctggcagaggatgcactcaacacggtgtgaatcacacatccagctgcccctcctcagggagcgatccaggggaagccagtgacactaaaacaagaggacacaatggcacctctgcccttccctcccgacagcccatcacctctaatagaggcagtgagactgcangtgggctgggcccacccagggagctgatgccccttctccccttcctggacacactctcatgtccccttnctgttcttccttnctaaaacccctgtcgccaccactggtcctgtggatnggatcttttncacct

SEQ ID NO: 116 - DNA, 731 bp, Homo sapiens
  misc_feature 2, 3, 10, 82, 94, 157, 191, 198, 369, 493, 538, 545, 578,581, 672, 678, 700: n = A,T,C or G
tnntttaganacagctcttgttctttttgcaggatcccatcgattcgaattcggcacgaggagtaaatactcactacgccanatcgttacactncaccctcaaaagctagaaaccagtgcctgaaagaaactccaattaaaataccagtaaattcancaggaacagacaagttaatgacaggtgtcattanccctganaggcggtgccgctcagtggaattggatcttaaccaagcacatatggaggagactccaaaaagaaagggagccaaagtgtttgggagccttgaaagggggttggataaggttatcactgtgctcaccaggagcaaaaggaagggttctgccagagacgggcccagaagactnaagcttcactataatgtgactacaactagattagtgaatccagatcaactgttgaatgaaataatgtctattcttccaaagaagcatgttgactttgtacaaaagggttatacactgaagtgtnaaacacagtcagattttgggaaagtgacaatgcaatttgaattanaagtgtncccacttcaaaaacccgatgtggtgggtatcangangcaacggcttaagggcgatgcctgggtttacaaaagattagtggaagacatcctatctagctgcaaggtataattgatggattcttccatnctgccngatgaatgtgggtgtgatacancctacataaaaactgttatgatcgcttttga

SEQ ID NO: 117 - DNA, 821 bp, Homo sapiens
  misc_feature 4, 6, 9, 14, 15, 17, 22, 59, 68, 118, 142, 165, 194, 208,231, 270, 283, 291, 314, 321, 421, 442, 457, 509, 542, 544,547, 548, 607, 614, 627, 635, 640, 671, 688, 712, 743, 762,789, 803: n = A,T,C or G
tttnanttntaccnntntcgantccgtgctgtcggaaagtggtactaccagatagaaantctgaaatnggaaattggaggccaaagccttaatctggactgcagagagtataacgcanacaaggccatcgtggacagtggcnccacgctgctgcgcctgccccanaaggtgtttgatgcggtggtggaagctgnggcccgcgcatctntgattccagaattctctgatggnttctggactgggtcccagctggcgtgctggacgaattcngaaacaccttggncttacttncctaaaatctccatctacctganagatganaactccagcaggtcattccgtatcacaatcctgcctcagctttacattcacccatgatgggggccggcctgaattatgaatgttaccgattcggcatttncccatccacaaatgcgctggngatcggtgccacggngatggagggcttctacgtcatcttcgacagacccataagaaggtgggctttnaacgaacccctgtgcaaaaattgcaagtgctgnantgnntgaaatttccgggcctttctcaacagaagatgtaaccagcaactgtgtccccctcaatnttttganccgacccaatttngggggatnggggncctatgcccctcatgaaccgtttgttggagnccatccctcctttgtcnttaaatcggcccttgcttgcttgntggccgtttcccggtggttaagcggtaaagnccccgtggaaccttgaggnccgtccaatggatgaaattcctctctnggacaaaaaatttncttgggaaattgaattac

SEQ ID NO: 118 - DNA, 898 bp, Homo sapiens
  misc_feature 4, 5, 17, 131, 138, 263, 371, 391, 417, 424, 438, 478, 518,525, 529, 554, 562, 568, 587, 589, 592, 604, 612, 615, 623,624, 645, 646, 647, 680, 683, 685, 687, 688, 693, 694, 710,714, 719, 733, 743, 751, 759, 760, 771, 772, 773, 781: n = A,T,C or G
  misc_feature 782, 788, 790, 791, 792, 798, 803, 804, 811, 830, 834, 835,842, 846, 848, 853, 854, 873, 878, 889: n = A,T,C or G
gtcnncttgaaaccttnaacacttccgttgctgtcggtcctaatgtgtcagcagcaaatccccgaggtgtcttcatgatgtgcatcccaccccccaatgtgacaggctccctgcacctgggccatgcactnaccaacnccatccaggactccctgactcgatggcaccgcatgcgtggggagaccaccctgtggaaccctggctgtgaccatgcaggtattgccacccaggtggtggtggagaagaagctatggcgtgagcanggactgagccggcaccagctgggccgcgaggcctttctacaggaagtctggaagtggaaggaggagaaaggtgaccggatttaccaccagttgaagaagctttggcangctccttggactggggatcnagcctgtttcaccatggaccctaaanctctcancaggctgttgacanaagcctttgtccggcttcacgaggaaaggcaatcatctantcgcaatacccgccttgttaactggttctgcaccctcaanttccggncatnttttgacatttgaaggtgggataanaaaggaancttganaagggtccgcaacccttgntnttncgttgccttggnctaccaanggnagaaaggnngggaagttctggggttccttnnntgttccttttgcccttattaaaggttcccaaangtntntnngaatnnccctaacaaatggaangttngttgngttgggccaaacanacttcgggtntcggaagnaaaaattnnttgggaagaannntgggcttnntacctntnnncctctntaaannaatactngtaatcccaaccatccttncaanngggaaangaantnggatnncaaccaattcctggtttcngaaanctttcccattngttttggat

SEQ ID NO: 119 - DNA, 244 bp, Homo sapiens
gccctgcacaaggtgggccagatcgtgtttgagttcgtgggcgagcctgagctcatggacgtgcatgtcttctgcacagacagcatccaggggacccccgtggagagcgacgaaatgcgcccatgctggttccagctggatcagatccccttcaaggacatgtggcccgacgacagctactggtttccactcctgcttcagaagaagaaattccacgggtacttcaagttccagggtcaggaca

SEQ ID NO: 120 - DNA, 247 bp, Homo sapiens
  misc_feature 178, 207, 212, 246: n = A,T,C or G
atacatgcaaatgccccttgttcatctgtgtcttctgcaaactagtctcatgaagaattctggcgtgcagccagggtagctgaagtttgggtctgggactggagattggccattaggcctcctgagattccagctcccttccaccaagcccagtcttgctacgtggcacagggcaaanctgacttcctttggggctcagtttccctnccttnatgaaatgaaaagatactactttttcttgttggnt

SEQ ID NO: 121 - DNA, 303 bp, Homo sapiens
gtttcatccaagtgcctgtctatactggttcagctgtatggaggggaaaacccggacagcctctctcctgaaaatgtggaaatttttgctcatttactgacatccaaggaggacccaaaggagcagaagcttctgttaaggattctcagaagaatgatcacctccaatgagaagcacttggagagcctcaagaatgcaggcagcctcctgcgggctctggagcggctggcccctgggagtggttcatttgccgacagtgcggtggctcccttggccctggaaatcctccaagccgttgggcac

SEQ ID NO: 122 - DNA, 297 bp, Homo sapiens
  misc_feature 261: n = A,T,C or G
gcaggtggtggaaaagcagaaccttagcaaagaggagctgatagcggagtgcaggtgaccgctgatgtcatcaacgcagctgagaaactccaggtggtgggcagggctggcacaggtgtggacaatgtggatctggaggccgcaacaaggaagggcatcttggttatgaacacccccaatgggaacagcctcagtgccgcagaactcacttgtggaatgatcatgtgcctggccaggcagattccccaggcgacggttcgntgaaggacggcaaatgggagcggaagaagttcatgg

SEQ ID NO: 123 - DNA, 750 bp, Homo sapiens
  misc_feature 4, 601, 632, 697, 708, 717: n = A,T,C or G
tcgntcgattcggccgaggatggcacctcaggctgagggccccaatgtatgtgtggctgtgggtgtgggtgggagtgtgtctgctgagtaaggaacacgattttcaagattctaaagctcaattcaagtgacacattaatgataaactcagatctgatcaagagtccggatttctaacagtccttgctttggggggtgtgctgacaacttagctcaggtgccttacatcttttctaatcacagtgttgcatatgagcctgccctcactccctctgcagaatccctttgcacctgagaccctactgaagtggctggtagaaaaaggggcctgagtggaggattatcagtatcacgatttgcaggattcccttctgggcttcattctggaaacttttgttagggctgcttttcttaagtgcccacatttgatggagggtggaaataatttgaatgtatttgatttataagttttttttttttgggttaaaagatggttgtagcatttaaaatggaaaattttctccttggtttgctagtatcttgggtgtattctctgtaagtgtagctcaaataggtcatcatgaaagggtaaaaaagcgangtggccatgttatgctggtggttaaagccanggcctctccaaccactgtgccactgacttgctgtgtgaccctggcaagtcacttaactataaggngccccaatttncttctgttnaaatgggggataataatacctgacctacctcaa

SEQ ID NO: 124 - DNA, 756 bp, Homo sapiens
  misc_feature 18, 651, 727: n = A,T,C or G
tttttaaccccattcgantcgcacgaggatggcacctcaggctgagggccccaatgtatgtgtggctgtgggtgtgggtgggagtgtgtctgctgagtaaggaacacgattttcaagattctaaagctcaattcaagtgacacattaatgataaactcagatctgatcaagagtccggatttctaacagtccttgctttggggggtgtgctgacaacttagctcaggtgccttacatcttttctaatcacagtgttgcatatgagcctgccctcactccctctgcagaatccctttgcacctgagaccctactgaagtggctggtagaaaaaggggcctgagtggaggattatcagtatcacgatttgcaggattcccttctgggcttcattctggaaacttttgttagggctgcttttcttaagtgcccacatttgatggagggtggaaataatttgaatgtatttgatttataagttttttttttttgggttaaaagatggttgtagcatttaaaatggaaaattttctccttggtttgctagtatcttgggtgtattctctgtaagtgtagctcaaataggtcatcatgaaagggtaaaaaagcgaggtggccatgttatgctggtggttaaagccagggcctcttcnaccactgtgccactgacttgctgtgtgaccctgggcaagtcacttaactataagggccccaattttccttctgttnaaaaggggataataatactgcctacctcg

SEQ ID NO: 125 - DNA, 793 bp, Homo sapiens
  misc_feature 2, 3, 4, 5, 6, 10, 11, 12, 13, 25, 30, 631, 735, 763, 783: n = A,T,C or G
gnnnnntttnnnnttttgaacccgnttgantccgttgctgtcgacctggtccagcagcagcccccctcgcagccgcagccgcagccgcagctccagccccaaccccagcctcagcctcagccgcaaccccagccccaatcacaaccccagcctcagccccaacccaagcctcagccccagcagctccacccgtatccgcatccacatccacatccacactctcatcctcactcgcacccacaccctcacccgcacccgcatccgcaccaaataccgcacccacacccacagccgcactcgcagccgcacgggcaccggcttctccgcagcacctccaactctgcctaaaaggggcagctcccgggcaagacaaggttttgaggacttgaggaagtgggacgagcacatttctattgtcttcacttggatcaaaagcaaaacagtctctccgccccgcaccagatcaagtagtttggacatcaccctactgaaaacttgcgattcttcttagttttctgcatacttttcatcacgatgcaggaaacgatttcgagtcaagaagacttttatttatgaacctttgaaaggatcgtcttgtatggtgaattttctaggagcgatgatgtactgnaattttattttaatgtattttgatttatgattatttattagtttttttttaaatgcttggttctaagaacatttttggaatgtagaccattttttccaaaaaanggaaacttttatttttcaaaaaaacctnaatcccgggaggtaaatttnccttaatctt

SEQ ID NO: 126 - DNA, 769 bp, Homo sapiens
  misc_feature 11, 78, 675, 750, 763: n = A,T,C or G
ttgaaacccgntcgattccgtgctgtcgacctggtccagcagcagcccccctcgcagccgcagccgcagccgcagctncagccccaaccccagcctcagcctcagccgcaaccccagccccaatcacaaccccagcctcagccccaacccaagcctcagccccagcagctccacccgtatccgcatccacatccacatccacactctcatcctcactcgcacccacaccctcacccgcacccgcatccgcaccaaataccgcacccacacccacagccgcactcgcagccgcacgggcaccggcttctccgcagcacctccaactctgcctaaaaggggcagctcccgggcaagacaaggttttgaggacttgaggaagtgggacgagcacatttctattgtcttcacttggatcaaaagcaaaacagtctctccgccccgcaccagatcaagtagtttggacatcaccctactgaaaacttgcgattcttcttagttttctgcatacttttcatcacgatgcaggaaacgatttcgagtcaagaagacttttatttatgaacctttgaaaggatcgtcttgtatggtgaattttctaggagcgatgatgtactgtaattttattttaatgtattttgatttatgattatttattagttttttttttaaatgctnggtctaagacattttttgaatgtaggaccattttccaaaaaggaaacttttattttttcaaaaaccttaatccgnaagtaaattcctnaatctt

SEQ ID NO: 127 - DNA, 752 bp, Homo sapiens
  misc_feature 6, 10, 557, 628, 632, 634, 662, 669, 672, 703, 707, 720,737, 738, 741: n = A,T,C or G
cctcgntcgntcggcacgaggaaatgttcatggtatcaattttgtcagtcctgttcgaaaccaagcatcctgtggcagctgctactcatttgcttctatgggtatgctagaagcgagaatccgtatactaaccaacaattctcagaccccaatcctaagccctcaggaggttgtgtcttgtagccagtatgctcaaggctgtgaaggcggcttcccataccttattgcaggaaagtacgcccaagattttgggctggtggaagaagcttgcttcccctacacaggcactgattctccatgcaaaatgaaggaagactgctttcgttattactcctctgagtaccactatgtaggaggtttctatggaggctgcaatgaagccctgatgaagcttgagttggtccatcatgggcccatggcagttgcttttgaagtatatgatgacttcctccactacaaaaaggggatctaccaccacactggtctaagagaccctttcaacccctttgagctgactaatcatgctgttctgcttgtgggctatggcactgactcancctctgggatggattactggattgttaaaaacaagctggggcacccgctggggtgagaatggctactttcngatncncaaaagaactgatgagtgtgcaattganagcatancantggcagcccaccaatttctaaattgtagggnatgncttccaatatttnataatgatctggatcanntgnaaaaggggaat

SEQ ID NO: 128 - DNA, 754 bp, Homo sapiens
  misc_feature 4, 8, 556, 626, 634, 661, 676, 688, 697, 703, 715, 737, 744,754: n = A,T,C or G
tcgntcgnttcggcacgaggaaatgttcatggtatcaattttgtcagtcctgttcgaaaccaagcatcctgtggcagctgctactcatttgcttctatgggtatgctagaagcgagaatccgtatactaaccaacaattctcagaccccaatcctaagccctcaggaggttgtgtcttgtagccagtatgctcaaggctgtgaaggcggcttcccataccttattgcaggaaagtacgcccaagattttgggctggtggaagaagcttgcttcccctacacaggcactgattctccatgcaaaatgaaggaagactgctttcgttattactcctctgagtaccactatgtaggaggtttctatggaggctgcaatgaagccctgatgaagcttgagttggtccatcatgggcccatggcagttgcttttgaagtatatgatgacttcctccactacaaaaaggggatctaccaccacactggtctaagagaccctttcaacccctttgagctgactaatcatgctgttctgcttgtgggctatggcactgactcancctctgggatggattactggattgttaaaaacagctggggcacccgctggggtgagaatggctactttcngatcccanaagaactgatgagtgtgcaattgaaancataacaatggcagncacacccaattnctaaattgnaagggnattgccttccanatttcataatgatctgcatcantgtaaangggaattggn

SEQ ID NO: 129 - DNA, 780 bp, Homo sapiens
  misc_feature 2, 3, 4, 5, 6, 7, 8, 9, 10, 11, 12, 16, 769: n = A,T,C or G
gnnnnnnnnnnntttntacctcgttcgatttccgttgctgtcggaaaacccccactgatgaacctgaaaaggctgtggaggatattaatgaacatattacccgatgctcagttagaagcaatgactgaactccatgacagaacagcagtaatcaaggagaatgaaagagagaagaggcccaagcttgaaaatctgcctgacacagaagaccaagaaactgtggacattaattcagtcagtgaaggaaaagagaataatataatgataaccttagaaacaaatattgaacataatctaaaatctgaggaagaaaaggatcaggaaaagcaacagatgtttgaaaataagcttataaaatctgaagaaattaaagatactattttgcaaacagtagatttagtttctcaagagactggagaaaaagaggcaaatattcaggcagttgatagtgaagttgggcttacaaaggaagacacccaagagaaattgggggaagacgacaaaactcaaaaagatgtgatcagcaatacaagtgatgtgataggaacatgtgaggcagcagatgtggctcagaaagtggatgaagacagtgctgaggatacgcagagtaatgatgggaaagaagtggtcgaagtaggccagaaattaattaataagcccatggtgggtcctgaggctggtggtactaaggaagttcctattaaagaaatagttgaaatgaatgaaatagaagaaggtaaaaataaggaccaagccattaacagttcanagaacataatg

SEQ ID NO: 130 - DNA, 773 bp, Homo sapiens
  misc_feature 2, 5, 754: n = A,T,C or G
cnccnttcgaattcggcacgagcccggcccctgcagtccggatactcacgccagaaagtgcggctgggatccggcggccacctgcacctgcgtatctctcgggccgcccttcccgaggggctccccgaggcctcccgccttcaccgggctctgttccggctgtccccgacggcgtcaaggtcgtgggacgtgacacgacctctgcggcgtcagctcagccttgcaagaccccaggcgcccgcgctgcacctgcgactgtcgccgccgccgtcgcagtcggaccaactgctggcagaatcttcgtccgcacggccccagctggagttgcacttgcggccgcaagccgccagggggcgccgcagagcgcgtgcgcgcaacggggaccactgtccgctcgggcccgggcgttgctgccgtctgcacacggtccgcgcgtcgctggaagacctgggctgggccgattgggtgctgtcgccacgggaggtgcaagtgaccatgtgcatcggcgcgtgcccgagccagttccgggcggcaaacatgcacgcgcagatcaagacgagcctgcaccgctgaagcccgacacggtgccaagcgccctgctgcgtgcccgccagctacaatcccatggtgctcattcaaaagaccgacaccggggtgtcgctccaaaacctatgatgacttgttagccaaaagactgccacttgcatatgaacaagtcctggtcccttcacttgtgcaccttgcgccgggggangcgaacctcagttgtcctt

SEQ ID NO: 131 - DNA, 300 bp, Homo sapiens
  misc_feature 54: n = A,T,C or G
gccagacaagcctgactctgaggagcaagccaagatagcaaagcttggacttangctgggtttgctcacctctgacgctgactgcgaaattgagaagtgggaagatcaggagaatgagattgttcaatatggacggaacatgtccagtatggcctattctctgtatttatttactagaggagaggggccactgaaaacttcccaggatttaattcatcaactagaggtttttgctgcagagggtttaaagcttacttccagtgttcaagctttttcaaaacagctgaaagacgatgacaa

SEQ ID NO: 132 - DNA, 263 bp, Homo sapiens
cccaccatcacggaggccatggtagcacgcagccggagaagccatccctgcctcagaagcagagcagcctgaggagcaggaagcttcctgacatgggctgcagtcttcctgagcacagggcacaccaagaagcaagccataggcagttctgtgagtcaaagaatgggcccccttatccccagggagctggccagttagattatgggtccaaagggattccagacacttctgagccagtcagctaccacaactttggagtaaaa

SEQ ID NO: 133 - DNA, 300 bp, Homo sapiens
actccctgcctcagcaccagcgaggagtctttggagggggcggcatggggacgtatgtgccccctggctttccccatccacagagcaggacctatgctacagcgttgggtcaaggggccttcctgcccgcagagttgtccttgcagcatcctgaaacacagatccatgcagaatgagccctgcgagcaatagagttgaagcagcctctgctggacagtggactgttctattttttttcaataaccaaaaagattaaacaaaaaatactataaaacccctgaccacatttaaaaaatgata

SEQ ID NO: 134 - DNA, 300 bp, Homo sapiens
aagacaagatccatgatggctctcttagtccaacttctttcactttgttataaactgctgaagaagatggaaaataacggatgggtctcagttacaaataaggacactatggatagtaaaacttgagaagcttttggggtcagatctctggaacatcatgtgatgaagctgacatttttaaaaatcaaatgatcctttatcttttcagaaattcatcaattttataaagaaaacaatattgaaattttgctctattttctgatcatgaaactgattgtaaagctttttgacaactaataa

SEQ ID NO: 135 - DNA, 300 bp, Homo sapiens
ctgacttccacaatcctggctatcccaagtacctgggcaccccccacctggaactgtacttgagtgactcacttagaaacttgaacaaagagcggcaattccacttcgctggtatcaggtcccggctcaaccacatgctggctatgctgtcaaggagaacactctttactgaaaaccaccttggccttcattctggcaatttcagcagagttaatttgcttgctgttagagatgtagcactttatccttcctatcagtaactgctccgtgttcagactcctggtttcttccaggcttaca

SEQ ID NO: 136 - DNA, 300 bp, Homo sapiens
  misc_feature 27, 37, 39, 80: n = A,T,C or G
gactccctatacaagctcttgggattnctgcaggatncnatcgattcgtcactactcagcttttggctctgtgggcgagnggcttcgggccatcaaaatgggaagatacgaagaaagcttcgcagccgctggctttggctccttcgagctggtcagccagatctctgctgaggacctgctccgaatcggagtcactctggcgggacaccagaagaaaatcttggccagtgtccagcacatgaagtcccaggccaagccgggaaccccgggtgggacaggaggaccggccccgcagtactg

SEQ ID NO: 137 - DNA, 262 bp, Homo sapiens
  misc_feature 221, 222, 233, 236, 239, 245, 246, 250, 251, 252, 253, 254,255, 256, 258, 259: n = A,T,C or G
ggcgagagaggctggctgaggatcgtgaccagcacctataaggatgggaagggcgccagatacaaccttgccatcgaggagcactgtacatttggggaccccatcgtttaaggccatgtcactagaagcgcagtttaagaaaaggcatggtgacccatgaccagaggggatcctatggttatgtgtgccaggctggctggcaggaactggggtggctatcnntattgtatggngangantgtgtnntctnnnnnnnanngtt

SEQ ID NO: 138 - DNA, 300 bp, Homo sapiens
aattccgttgctgtcgcacgaggccaccagggtgactgcgggattccgatctgcgccggagctgcgatgctagagcactcttgccacccccaccccacggacgtgttgcagtgatatcagaattttgcgtgcggtttacccgtgtttaacctctttgcgtctcgcttctgaatcgtatccacttgagcatcactagactgatctattttaacactggtggggggcagcgaggatggacagattcctggtgaaaggggctcaagggggccttttgaggaagcaggaggagcaagagccaac

SEQ ID NO: 139 - DNA, 300 bp, Homo sapiens
ggtcaggattcagctgaagagcaagtgggatgagtccatcttcacgaaaggctgcatccaggcgctggaaagctggctcccgcggaacatttacattgtggctggcgtcttcatcgccatctcgctgttgcagatatttggcatcttcctggcaaggacgctgatctcagacatcgaggcagtgaaggccggccatcacttctgaggagcagagttgagggagccgagctgagccacgctgggaggccagagcctttctctgccatcagccctacgtccagagggagaggagccgacacc

SEQ ID NO: 140 - DNA, 358 bp, Homo sapiens
gagaatttttgggaagttggttttccttccactcagacttgtatggaaagaggttatattaaggaagatcttgatccttgtcctcgtccaaaaagacgtcagccttacaacgcaatattttctccaaaaggcaaggagcagaagacatagacgttgaaacagaaacagaaggatgaaggacagttttttccttcttagttatttatagttaaagttggtactaaacattgatttttttgatcttctgtaaatggatttataaatcagttttctattgaaaatgtttgtgatattttgcttttgcacctttaaaacaataaggcgctttcattttgcactctaacttaagagtttttac

SEQ ID NO: 141 - DNA, 365 bp, Homo sapiens
ggggtttcaccatgttggccaggctggtctcaaactcctgacctcaggtgatccacccacctctgtctcccaaagtgctgggattacaggagtgtgccactgcgcctgaccagctttataaagtttatagggacagtgtcaccactttacagaagagggactgaggctctgaggaggaagttccttgccagggtccgagtgtcgccaccctgagaactccaacacccacctccctactctgctcatggcgtctcccccacctttccacagccagaagttgccaggtgaatacttccggtacaagggcgtccccttcccgtcggcctgtactcgctcgagagcatcaacttggcggagaacaccca

SEQ ID NO: 142 - DNA, 405 bp, Homo sapiens
  misc_feature 390: n = A,T,C or G
gccacacgcagccagggcttcacacccttcaggctgcacccgggcaggcctcagaacggtgaggggccagggcaaagggtgtgtctcgtcctgcccgcactgcctctcccaggaactggaaaagccctgtccggtgagggggcagaaggactcagcgcccctggacccccaaatgctgcatgaacacattttcaggggagcctgtgcccccaggcgggggtcgggcagccccagcccctctccttttcctggactctggccgtgcgcggcagcccaggtgtttgctcagttgctgacccaaaagtgcttcatttttcgtgcccgccccgcgccccgggcaggccaagtcatgtgttaagttgcgcttctttgctgtgatgtgggtggggnagaagaagtaaaaca

SEQ ID NO: 143 - DNA, 377 bp, Homo sapiens
  misc_feature 332: n = A,T,C or G
cccgcgccccgggcaggccagtcatgtgttaagttgcgcttctttgctgtgatgtgggtgggggaggaagagtaaacacagtgctggctcggctgccctgagggtgctcaatcaagcacaggtttcaagtctgggttctggtgtccactcacccaccccaccccccaaaatcagacaaatgctactttgtctaacctgctgtggcctctgagacatgttctatttttaaccccttcttggaattggctctcttcttcaaaggaccaggtcctgttcctctttctccccgactccaccccagctccctgtgaagagagagttaatatatttgntttatttatttgctttttgcgttgggatgggttcgtgtccagtcc

SEQ ID NO: 144 - DNA, 391 bp, Homo sapiens
ccactgccgtctccgccgccactgggcccccagagccccagccccagagcctaggaacctggggcccgctcctcccccctccaggccatgaggattctgcagttaatcctgcttgctctggcaacagggcttgtagggggagagaccaggatcatcaaggggttcgagtgcaagcctcactcccagccctggcaggcagccctgttcgagaagacgcggctactctgtggggcgacgctcatcgcccccagatggctcctgacagcagcccactggctcaattcccctacatagttcacctggggcagcacaacctccagaaggaggagggctgtgagcagacccggacagccactgagtccttccccaccccggcttcaacaacagcctc

SEQ ID NO: 145 - DNA, 388 bp, Homo sapiens
ggcacgagagatggtgtacctgctcgagtgcctgcagaagacacccccgcctgtactcatctttgcagagaagaaggcagacgtggacgccatccacgagtacctgctgctcaagggggttgaggccgtagccatccatgggggcaaagaccaggaggaacggactaaggccatcgaggcattccgggagggcaagaaggatgtcctagtagccacagacgttgcctccaagggcctggacttccctgccatccagcacgtcatcaattatgacatgccagaggagattgagaactatgtacaccggattggccgcaccgggcgctcgggaaacacaggcatcgccactaccttcatcaacaaagcgtgtgatgagtcagtgctgatg

SEQ ID NO: 146 - DNA, 366 bp, Homo sapiens
  misc_feature 366: n = A,T,C or G
tacggctgcgagaagacgacagaagggtggttatctctgggtaacgagggttaaaagctatgttcattttcctcttctatctgcattttttaaattttctataaagatcatgaattttgtcatttcaaaagttaacaaaggctgggcgcgggggctcacgcctgtaatcccagcactttgggaggccgaggcggccggatcacaaggtcaggagatcgagaccatcttgtctaacacggtgaaaccccgtttctactaaaaatacacaaaattagccggccgccgttgcgatctcttgtaatttccaaaactcgggatgcttaagctttataattcggggcacttgtttgtccgcccttcaatttn

SEQ ID NO: 147 - DNA, 354 bp, Homo sapiens
  misc_feature 354: n = A,T,C or G
tacggctgcgagaagacgacagaagggggctttccactatggcttccagcactgtcccggtgagcgctgctggctcggctaatgaaactcccgaaataccggacaacgtgggagattggcttcggggcgtctaccgctttgccactgataggaatgacttccggaggaacttgatactaaatttgggactctttgctgcgggagtttggctggccaggaacttgagtgacattgacctcatggcacctcagccaggggtgtagccaagtagacaaatggaatcctgtgctgaacccgaatcttccaaaaaacagcctacaatctgtggccaccacaagatgtgccctgatggcn

SEQ ID NO: 148 - DNA, 351 bp, Homo sapiens
  misc_feature 351: n = A,T,C or G
tacggctgcgagaagacgacagaagggagttgcagctgatatgaatgaatgctgtctgtgtggaacaagcgtcgcaatgaggactctctacaggacccgatatggcatccctggatctatttgtgatgactatatggcaactctttgctgtcctcattgtactctttgccaaatcaagagagatatcaacagaaggagagccatgcgtactttctaaaaactgatggtgaaaagctcttaccgaagcaacaaaattcagcagacacctcttcagcttgagttcttcaccatcttttgcaactgaaatatgatggatatgcttaagtacaactgatggcatgaaaaaaatcn

SEQ ID NO: 149 - DNA, 414 bp, Homo sapiens
tacggctgcgagaagacgacagaaggggagagtcactcctgccttcaccatgaagtccagcggcctcttccccttcctggagctgcttgccctgggaactctggcaccttgggctgtggaaggctctggaaagtccttcaaagctggagtctgtcctcctaagaaatctgcccagtgccttagatacaagaaacctgagtgccagagtgactggcagtgtccagggaagaagagatgttgtcctgacacttgtggcatcaaatgcctggatcctgttgacaccccaaacccaacaaggaggaagcctgggaagtgcccagtgacttatggccaatgtttgatgcttaacccccccaatttctgtgagatggatggccagtgcaagcgtgacttgaagtgttgcatgggcatgtg

SEQ ID NO: 150 - DNA, 380 bp, Homo sapiens
tacggttgcgagattacgacagaaggggggaggttggcgaggctttgctgaaagctagcaaaccgagcgatcatgtcgcacaaacaaatttactattcggacaaatacgacgacgaggagtttgagtatcgacatgtcatgctgcccaaggacatagccaagctggtccctaaaacccatctgatgtctgaatctgaatggaggaatcttggcgttcagcagagtcagggatgggtccattatatgatccatgaaccagaacctcacatcttgctgttccggcgcccactacccaagaaaccaaagaaatgaagctggcaagctacttttcagcctcaagctttacacagctgtccttacttcctaacatctttctgata

SEQ ID NO: 151 - DNA, 396 bp, Homo sapiens
tacggctgcgagaagacgacagaaggggagatgaatgcggctgttaagacctgcaataatccagaatggctactctgatctatgttgataaggaaaatggagaaccaggcacccgtgtggttgctaaggatgggctgaagctggggtctggaccttcaatcaaagccttagatgggagatctcaagtttcaacaccacgttttggcaaaacgttcgatgccccaccagccttacctaaagctactagaaaggctttgggaactgtcaacagagctacagaaaagtctgtaaagaccaagggacccctcaaacaaaaacagccaagcttttctgccaaaaagatgactgagaagactgttaaagcaaaaagctctgttcctgcctcagatgatgcct

SEQ ID NO: 152 - DNA, 336 bp, Homo sapiens
tacggctgcgagaagacgacagaagggtacggctgcgagaagacgacagaagggtacggctgcgagaagacgacagaagggtacggctgcgagaagacgacagaagggtacggctgcgagaagacgacagaagggctgtaatccctgcactttgggaggctgaggcaggcggatcacctgaagccaggagttcaaaatcagcctgaccaacatggagaaaccccatctctactaaaaatacaaaattagccgggcatggtggtggcgcatgcctgtaatcccagctactcgggaagctgaggcaggagaatcacttgaacctgggatgtggaggct

SEQ ID NO: 153 - DNA, 340 bp, Homo sapiens
  misc_feature 340: n = A,T,C or G
tacggttgcgagaagacgacagaagggtacggctgcgagaagacgacagaagggtacggctgcgagaagacgacagaagggtacggctgcgagaagacgacagaagggtacggctgcgagaagacgacagaagggctgtaatccctgcactttgggaggctgaggcaggcggatcacctgaagccaggagttcaaaatcagcctgaccaacatggagaaaccccatctctactaaaaatacaaaattagccgggcatggtggtggcgcatgcctgtaatcccagctactcgggaagctgaggcaggagaatcacttgaacctgggatgtggaggttgcgn

SEQ ID NO: 154 - DNA, 339 bp, Homo sapiens
tacggctgcgagaagacgacagaagggaacaatgcatgatgctgttttgcatattttgatgaagaaagattacagtacttcaaagtttaatcccagtcaggaaaaagatggaaaaattgattttaccataaatacaaatggaggattacgtaatcgggtatatgaggtgccagttgaaacaaaattctaatcaacatataattcagaaggatcttcatctgactatgacataaaaacaactttatacccagaaagttattgataagttcatacattgtacgaagagtatttttgacagaatatgtttcaaactttggaacaagatgggtctagcatggc

SEQ ID NO: 155 - DNA, 403 bp, Homo sapiens
tacggctgcgagaagacgacagaaggggagttgcagtcgggttctccgagttcctgtctctctgccaacgccgcccggatggcttcccaaaaccgcgacccagccgccactagcgtcgccgccgcccgtaaaggagctgagccgagcgggggcgccgcccggggtccggtgggcaaaaggctacagcaggagctgatgaccctcatgatgtctggcgataaagggatttctgccttccctgaatcagacaaccttttcaaatgggtagggaccatccatggagcagctggaacagtatatgaagacctgaggtataagctctcgctagagttccccagtggctacccttacaatgcgcccacagtgaagttcctcacgccctgctatcaccccaacgtggacc

SEQ ID NO: 156 - DNA, 396 bp, Homo sapiens
tacggctgcgagaagacgacagaaggggattgagtaatgggatttgaatcaatgtattaatatctccatagctgggaaacgtgggttcaatttgccattggtttctgaaagtattcacatcatttgggataccagatagctcaatactctctgagtacattgtgcccttgatttttatctccaagtggcagtttttaaaattggccttttacctggatataaattaattgtgcctgccaccaccatccaacagacctggtgctctaatgccaagttatacacgggacagttgctggcatgtcttcattggctatataaaatgtggccaagaagataggctctcagtaagaagtctgatggtgagcagtaactgtccctgctttctggtataaagct

SEQ ID NO: 157 - DNA, 362 bp, Homo sapiens
tacggctgcgagaagacgacagaagggatatcaatgtttgcttgttcccacctctaacccaaggaaaaaagagaaaacatactatgcaaaggaagtttaaacttaagttttccttaagggtcagcccaacaatgactttcagtcaaatggattaaactggaaaatgtttttgtttctgttgtaaacagatcatcctaggcgaaagttttttttggtgggttgcttttaaattagtttatttctaaatcttagtcttccacatttctagaggccacctgacacaagtccctgtatctgaagtctagcatctcaaggctgatctggaagagcgctagaatgctccctagcggataacttagtct

SEQ ID NO: 158 - DNA, 379 bp, Homo sapiens
tacggctgcgagaagacgacagaagggagccatatgaagacaccctagctggacgatcagtccttgtcaaaagtctgacccctcaaactctacagcctcaatggaccagaccctacccggtcatttatagcacaccaactgccgtccatctgcaggaccctctccattgggttcaccattccagaataaagccatgcccatcagacagccagcttgatctctcctcttcctcctggaagccacaagattaggccgagagccgatcagacaaacaacctacaacccttaagctcctggcagcgcccagccaaggccatgcttccatgcaacactccttccaaatggccatcccagcatgcttccaagcaggcttcatccg

SEQ ID NO: 159 - DNA, 384 bp, Homo sapiens
  misc_feature 384: n = A,T,C or G
tacggctgcgagaagacgacagaaggggagagctctcagcgccgctcccagccacagcctcccgcgcctcgctcagctccaacatggcaaaaatctccagccctacagagactgagcggtgcatcgagtccctgattgctgtcttccagaagtatgctggaaaggatggttataactacactctctccaagacagagttcctaagcttcatgaatacagaactagctgccttcacaaagaaccagaaggaccctggtgtccttgaccgcatgatgaagaaactggacaccaacagtgatggtcagctagatttctcagaatttcttaatctgattgtggcctagctatggcttgccatgactccttcctcaaggctggcccttn

SEQ ID NO: 160 - DNA, 391 bp, Homo sapiens
  misc_feature 77, 391: n = A,T,C or G
tacggttgcgagaagacgacagaacggtaccgctgggagaggaccacagaagggggcttccgggtcgtacgcgctanctctgggcgcagaggtttctgggagccaagagtggtaatggcgtctgtatgatcttcggagcctgctgcatcggacctcggccagtcataaaagatgacaacagcagccaggccaacctttgaacctgccagaggtggaaggggaaaaggagaaggtgatttgagccaactttcaaagcagtattcaagcagagacctaccctctcatacaaagataaaatacagacagactactcaggatgcccctgaagagggtcgtaaccgtgacttcacgagagagttggaagaaagagagagagctgctgcaagagaan

SEQ ID NO: 161 - DNA, 389 bp, Homo sapiens
tacggctgcgagaagacgacagaagggcaagaaaacttacgaacaaccccatctccagacaaaggaagagcaacggaagaaacgcgagcaagaacgaaaggagaagaaagcaaaggttttgggaatgcgaaggggcctcattttggctgaagattaataattttttaacatcttgtaaatattcctgtattctcaacttttttccttttgtaaattttttttttttgctgccatccccactttagtcacgagatctttttctgctaactgttcatagcctgtgtagggcccatgggttcttcatgggctatgatctctgaaaagacgttatcaccttaaagctcaaattctttgggagggtttttacttaagcccattaccaattcagg

SEQ ID NO: 162 - DNA, 392 bp, Homo sapiens
  misc_feature 72: n = A,T,C or G
tacggctgcgagaagacgacagaagggtacggctgcgagaagacgagagaagggtacggctgcgagaagacnacagaagggtacggctgcgagaagacgacagaagggtacggctgcgagaagacgacagaagggtacggctgcgagaagacgacagaagggaacggatgagcacgatctcatgttgctgaagctggccaggcccgtagtgctggggccccgcgtccgggccctgcagcttccctaccgctgtgctcagcccggagaccagtgccaggttgctggctggggcaccacggccgcccggagagtgaagtacaacaagggcctgacctgctccagcatcactatcctgagccctaaagagtgtgaggtcttctaccctggcgtgg

SEQ ID NO: 163 - DNA, 382 bp, Homo sapiens
tacggctgcgagaagacgacagaagggggctctcgctcgggctttctggcgccatcttggttccgcgttccctgcacaaaatgcccggcgaagccacagaaaccgtccctgctacagagcaggagttgccgcagccccaggctgagacaaggtctggaacagaatctgacagtgatgaatcagtaccagagcttgaagaacaggattccacccaggcaaccacacaacaagcccagctggcggcagcagctgaaatcgatgaagaaccagtcagtaaagcaaaacagagtcggagtgaaaagaaggcacggaaggctatgtccaaactgggtcttcggcaggttacaggagttactagagtcactatccggaaatctaagag

SEQ ID NO: 164 - DNA, 407 bp, Homo sapiens
tacggctgcgagaagacgacagaagggcaagctccaggacatgcaagagatcatctcccactatgaggaggaactggcgcagctacgccacgaactggagcggcagaacaatgaataccaagtgctgctgggcatcaaaacccacctggagaaggaaatcaccacgtaccgacggctcctggagggagagagtgaagggacacgggaagaatcaaagtcgagcatgaaagtgtctgcaactccaaagatcaaggccataacccaggagaccatcaacggaagattagttctttgtcaagtgaatgatatccaaaagcacgcatgagaccaatgaaagtttccgcctgttgtaaaatctattttcccccaaggaaagtccttgcacagacaccagtgagtgagttcta

SEQ ID NO: 165 - DNA, 407 bp, Homo sapiens
tacgtcttcgataagacgacagaaggggagacgttcgcacacctgggtgccagcgccccagaggtcccgggacagcccgaggcgccgcgcccgccgccccgagctccccaagccttcgagagcggcgcacactcccggtctccactcgctcttccaacacccgctcgttttggcggcagctcgtgtcccagagaccgagttgccccagagaccgagacgccgccgctgcgaaggaccaatgagagccccgctgctaccgccggcgccggtggtgctgtcgctcttgatactcggctcaggccattatgctgctggattggacctcaatgacacctactctgggaagcgtgaaccattttctggggaccacagggctgatggatttgaggttacctccagaagggagg

SEQ ID NO: 166 - DNA, 366 bp, Homo sapiens
tacggctgcgagaagacgacagaaggggagagcttttgaaaggcggcgggaggcggcgagcgccatggccagtccgggctgcctgctgtgcgtgctgggcctgctactctgcggggcggcgagcctcgagctgtctagaccccacggcgacaccgccaagaagcccatcatcggaatattaatgcaaaaatgccgtaataaaggcatgaaaaactatggaagatactatattgctgcgtcctatgtaaagtacttggagtctgcaggcgcgagagttgtaccagtaaggctggatcttacagagaaagactatgaaatacttttcaaatctattaatggaatccttttccctggaggaagtgttgg

SEQ ID NO: 167 - DNA, 392 bp, Homo sapiens
tacggctgcgagaagacgacagaagggggcgcattcttacctgtcggggtgcggcgagtgtctcacctctctgcacttccaaggactcttgtcatctgccttaggcgggaaatgctgttgctggattgcaaccccgaggtggatggtctgaagcatttgctggagacaggggcctcggtcaacgcacccccggatccctgcaagcagtcgcctgtccacttagccgcaggaagcggccttgcttgctttcttctctggcagctgcaaacgggcgctgacctcaaccagcaggatgttttaggagaagctccactacacaaggcagcaaaagttggaagcctggagtgcctaagcctgcttgtagccagtgatgcccaaattgatttatgtag

SEQ ID NO: 168 - DNA, 392 bp, Homo sapiens
tacggctgcgagaagacgacagaaggggaaatgtgctcatagccaaaacattttactctctcctcctagaatgctgcccttgacatttcccattgctgtatgttatttcttgctctgttatcttttgccctcttagaatgtccctctcttgggacttgcttagatgatgggatatgaatattattagacagtaattttgctttccatccagtatgctagttcttattcgagaactatggtcagagcgtatttggatatgagtatcctttgcttatctttgtagtactgaaaatttgccgaagtaactggctgtgcagaatgtaatagaagcttttcttattcttttattcttaagatcgagatctttttacagcattctttctacatgatcg

SEQ ID NO: 169 - DNA, 400 bp, Homo sapiens
tacggcttcgataagacgacagaagggggctttttataatactgtgtaaatagtgaccatctcatgggcattgttttcttctctgctttgtctgaggtttgagtctgctttcttttgtctttaaaacctgatttttaagttcttctgaactgtagaaatagctatctgatcacttcagcgtaaagcagtgtgtttattaaccatccactaagctaaaactagagcagtttgatttaaaagtgtcactcctcctccttttctactttcagtagatatgagatagagcataattatctgttttatcttagctgtatacataatttaccatcagatagaactgtatggttctagtacagaaactctactaccctcagcctcttatgtgccaagatttctttag

SEQ ID NO: 170 - DNA, 386 bp, Homo sapiens
tacggctgcgagaagacgacagaagggtacggctgcgagaagacgacagaaggggtgctctgaaggcacagacttggaagcaccagctggaagaagaactgagacagcagaaagaagcagcttgtttcaaggctcgtccaaacaccgtcatctctcaggagccctttgttcccaagaaagagaagaaatcagttgctgagggcctttctggttctctagttcaggaaccttttcagctggctactgagaagagagccaaagagcggcaggagctggagaagagaatggctgaggtagaagcccagaaagcccagcagttggaggaggccagactacaggaggaagagcagaaaaaagaggagctggccaggctacggagagaactg

SEQ ID NO: 171 - DNA, 372 bp, Homo sapiens
  misc_feature 372: n = A,T,C or G
tacggctgcgagaagacgacagaaggggacagtgcttgttcggggcgctccgctggcttcttggacaattgcgccatgtgtgctgctcggctagcggcggcggcggcccagtcggtgtatgccttctcggcgcgcccgctggccggcggggagcctgtgagcctgggctccctgcggggcaaggtactacttatcgagaatgtggcgtccctctgaggcaccacggtccgggactacacccagatgaacgagctgcagcggcgcctcggaccccggggcctgtggtgctcggcttcccgtgcaaccagtttgggcatcaggagaacgccaagaacaaagagattctgaattccctcaagtacgtgcggcccn

SEQ ID NO: 172 - DNA, 380 bp, Homo sapiens
tacggctgcgagaagacgacagaaagggacagtgcttgttcggggcgctgcgctggcttcttggacaattgcgccatgtgtgctgctcggctagcggcggcggcggcccagtcggtgtatgccttctcggcgcgcccgctggccggcggggagcctgtgagcctgggctccctgcggggcaaggtactacttatcgagaatgtggcgtgcctctgaggcaccacggtccgggactacacccagatgaacgagctgcagcggcgcctcggaccccggggcctggaggtgctcggcttcccgtgcaaccagtttgggcatcaggagaacgccaagaacaaagagattctgaattccctcaagtacgtccggccctgtggggg

SEQ ID NO: 173 - DNA, 382 bp, Homo sapiens
  misc_feature 382: n = A,T,C or G
tacggctgcgagaagacgacagaaagggctttctctctcctcccgccgcccaagatgccgaaaggaaagaaggccaagggaaagaaggtggctccggccccagctgtcgtgaagaagcaggaggctaagaaagtggtgaatcccctgtttgagaaaaggcctaagaattttggcattggacaggacatccagcccaaaagagacctcacccgctttgtgaaatggccccgctatatcaggttgcagcggcagagagccatcctctataagcggctgaaagtgcctcctgcgattaaccagttcacccaggccctggaccgccaaacagctactcagctgcttaagctggcccacaagtacagaccagagacaaagcaagagn

SEQ ID NO: 174 - DNA, 387 bp, Homo sapiens
tacggctgcgagaagacgacagaaggggttttccctggtgtgattccgtcctgcgcggttgttctctggagcagcgttcttttatctccgtccgccttctctcctacctaagtgcgtgccgccacccgatggaagattcgatggacatggacatgagccccctgaggccccagaactatcttttcggttgtgaactaaaggccgacaaagattatcactttaaggtggataatgatgaaaatgagcaccagttatctttaagaacggtcagtttaggggctggtgcaaaggatgagttgcacattgttgaagcagaggcaatgaattacgaaggcagtccaattaaagtaacactggcaactttgaaaatgtctggtcaggccacgg

SEQ ID NO: 175 - DNA, 395 bp, Homo sapiens
tgtctacggttgcgagaagacgacagaagggaataaaagtttctttaaggcagataaagttacaatgctgtggaataaaaaagctactgctgtgttggtaatagctagcacagatgttgacaagacaggagcttcctactatggagaacaaactctacactacattgcaacaaatggagaaagtgctgtagtgcaattaccaaaaaatggccccatttatgatgtagtttggaattctagttctactgagttttgtgctgtatatggttttatgcctgccaaagcgacaattttcaacttgaaatgtgatcctgtatttgactttggaacctggcctcgtaatgcagcctactatagccctcatggacatatattagcattagctggatttggaa

SEQ ID NO: 176 - DNA, 404 bp, Homo sapiens
  misc_feature 288: n = A,T,C or G
tacggctgcgagaagacgacagaaggggacgctcggtaccaggcgcagatcatggcaggcagccggctggaaaccgtagggagcatcttctctcggactcgggacctggttcgggccggggtgctgaaggagaagcccctgtggtttgacgtatatgacgcctttcccccgctgagggagcccgtcttccaaaggcctcgagtgcgatatggcaaagccaaagctcccatccaagacatctggtaccacgaggatcggattatagcgaagttttattcactgtatggntctggcctaacagcttttgatctatttatctccaacttcttgttctacctgattacggctttgtggataattacaccttgcttctgtagcatcttttatgaggcgaccttcttact

SEQ ID NO: 177 - DNA, 389 bp, Homo sapiens
tacggttgcgagaagacgacagaagggggctgttggagccgctgtggttgctgtccgcggagtggaagcgcgtgcttttgtttgtgtccctggccatggcgctgcagctctcccgggagcagggaatcaccctgcgcgggagcgccgaaatcgtggccgagttcttctcattcggcatcaacagcattttatatcagcgtggcatatatccatctgaaacctttactcgagtgcagaaatacggactcaccttgcttggaactactgatcttgagctcataaaatacctaaataatgtggcggaacaactgacagattggttataccaaccgttcaagaacacaccccggagtgggaggattcccacacaattcagtcgaggtgaagcg

SEQ ID NO: 178 - DNA, 391 bp, Homo sapiens
ttacggttgcgagaagacgacagaagggatctcagattcaaatctggacggccaaccgccatgtgatgtaagcctccatacgaaagcactgttgcagatagaagaagaggtggttgctgctcatgtagatctataaatatgtgttgtatgtcttttttgctttttttttaaaaaaaagaataactttttttgcctctttagattacatagaagcattgtagtcttggtagaaccagaatttttgttgtttatttataaggaaattgtgagtggggataattcgcttaccttcccgccctatctcattttctccctaacttaactcgttttatatatttactctactctggttttatcactcccagtttttctatacactcaccaacatgcg

SEQ ID NO: 179 - DNA, 369 bp, Homo sapiens
tacggctgcgagaagacgacagaagggggctgccgctgggaccccgtgacatcgtccatgccgagcacgatgccctctaaaaagggaggggatggaattaaaccacccccaatcattggaagatttggaacctcactgaaaattgcgattgttggattgcccaatgttgggaaatctaccttcttctatgagttaaccaggaggcaggctatagcagaaaacttcccgttctgcactattgatcctaatgagagcacatgacctgcgccagatgaaaggtctgactttctttgtgaataccacaaaccagcaagcaaaattcctgcctttctaaaatgaggtggatactgctgggcttgagaaaggagg

SEQ ID NO: 180 - DNA, 369 bp, Homo sapiens
  misc_feature 369: n = A,T,C or G
tacggctgcgagaagacgacagaaggggatgccattgtgtgtaacattggacactttgacgtggagatcgatgtcaagtggctcaacgagaacgccgtggagaaggtgaacatcaagccgcaggtggaccggtatcggttgaagaatgggcgccgcatcatcctgctggccgagggtcggctggtcaacctgggttgtgccatgggccaccccagcttcgtgatgagtaactccttcaccaaccaggtgatggcgcagatcgagctgtggacccatccagacaagtaccccgttggtgttcatttcctgcccaagaagctggatgaggcagtggctgaagcccacctgggcaagctgaatgtgaagttn

SEQ ID NO: 181 - DNA, 384 bp, Homo sapiens
tacggctgcgagaagacgacagaagggggcgcttccgccatctttccagcctcagtcggacgggcgcggagacgcttctggaaggaacgccgcgatggctgcgcagggagagccccaggtccagttcaaacttgtattggttggtgatggtggtaccggaaaaacgaccttcgtgaaacgtcatttgactggtgaatttgagaagaagtatgtagccaccttgggtgttgaggttcatcccctagtgttccacaccaacagaggacctattaagttcaatgtatgggacacagccggccaggagaaattcggtggactgagagatggctattatatccaagcccagtgtgccatcataatgtttgatgtaacatcgagaggtag

SEQ ID NO: 182 - DNA, 359 bp, Homo sapiens
tacggctgctagaagacgacagaagggctctctggccgttccttacactttgcttcaggctccagtgcaggggcgtagtgggatatggccaactcgggctgcaaggacgtcacgggtccagatgaggagagttttctgtactttgcctacggcagcaacctgctgacagagaggatccacctccgaaacccctcggcggcgttcttctgtgtggcccgcctgcaggcaagaaggggttaaaagtggaatgtatgttgtaatagaagttaaagttgcaactcaagaaggaaaagaaataacctgtcgaagttatctgatgacaaattacgaaagtgctcccccatccccacagtataaaa

SEQ ID NO: 183 - DNA, 364 bp, Homo sapiens
tacggctgcgagaagacgacagaagggtacggctccgagaatacgacagaaggggctggcgagagtttgtgcggcgacatgaaactgcttacccacaatctgctgagctcgcatgtgcggggggtggggtcccgtggcttccccctgcgcctccaggccaccgaggtccgtatctgccctgtggaattcaaccccaacttcgtggcgcgtatgatacctaaagtggagtggtcggcgttcctggaggcggccgataacttgcgtctgatccaggtgccgaaagggccggttgagggatatgaggagaatgaggagtttctgaggaccatgcaccacctgctgctggaggtggaagtgatagagg

SEQ ID NO: 184 - DNA, 411 bp, Homo sapiens
  misc_feature 367: n = A,T,C or G
tacggctgcgagaagacgacagaaggggacattttctcggccctgccagcccccaggaggaaggtgggtctgaatctagcaccatgacggaactagaggcagccatgggcatgatcatagacgtcttttcccgatattcgggcagcgagggcagcacgcagaccctgaccaagggggagctcaaggtgctgatggagaaggagctaccaggcttcctgcagagtggaaaagacaaggatgccgtggataaattgctcaaggacctggacgccaatggagatgcccaggtggacttcagtgagttcatcgtgttcgtggctgcaatcacgtctgcctgtcacaagtactttgagaaggcaggactcanatgatgccctggagatgtcacagattcctggcagagccatggtc

SEQ ID NO: 185 - DNA, 355 bp, Homo sapiens
tacggctgcgagaagacgacagaaggggacattttctcggccctgccagcccccaggaggaaggtgggtctgaatctagcaccatgacggaactagaggcagccatgggcatgatcatagacgtcttttcccgatattcgggcagcgagggcagcacgcaaaccctgaccaagggggagctcaaggtgctgatggagaaggagctaccaggcttcctgcagagtggaaaagacaaggatgccgtggataaattgctcaaggacctggacgccaatggagatgcccaggtggacttcagtgagttcatcgtgttcgtggctgcaatcacgtctgcctgtcacaagtactttgagaa

SEQ ID NO: 186 - DNA, 413 bp, Homo sapiens
  misc_feature 90, 377: n = A,T,C or G
tacggctgcgagaagacgacagaagggggagaccagagatctagcgactgaagcagcatggccaagccgtgtggggtgcgcctgagcggngaagcccgcaaacaggtggaggtcttcaggcagaatcttttccaggaggctgaggaattcctctacagattcttgccacagaaaatcatatacctgaatcagctcttgcaagaggactccctcaatgtggctgacttgacttccctccgggccccactggacatccccatcccagaccctccacccaaggatgatgagatggaaacagataagcaggagaagaaagaagtccctaagtgtggatttctccctgggaatgagaaaagtctgtccctgcttgccctggntaaggccagaagtctggactctcaaagagaaatgca

SEQ ID NO: 187 - DNA, 362 bp, Homo sapiens
  misc_feature 362: n = A,T,C or G
tacggctgcgagaagacgacagaagggggagaccagagatctagcgactgaagcagcatggccaagccgtgtggggtgcgcctgagcggggaagcccgcaaacaggtggaggtcttcaggcagaatcttttccaggaggctgaggaattcctctacagattcttgccacagaaaatcatatacctgaatcagctcttgcaagaggactccctcaatgtggctgacttgacttccctccgggccccactggacatccccatcccagaccctccacccaaggatgatgagatggaaacagataagcaggagaagaaagaagtccctaagtgtggatttctccctgggaatgagaaagtcctgtn

SEQ ID NO: 188 - DNA, 419 bp, Homo sapiens
  misc_feature 419: n = A,T,C or G
tacggctgcgagaagacgacagaagggggagaccagagatctagcgactgaagcagcatggccaagccgtgtggggtgcgcctgagcggggaagcccgcaaacaggtggaggtcttcaggcagaatcttttccaggaggctgaggaattcctctacagattcttgccacagaaaatcatatacctgaatcagctcttgcaagaggactccctcaatgtggctgacttgacttccctccgggccccactggacatccccatcccagaccctccacccaaggatgatgagatggaaacagataagcaggagaagaaagaagtccctaagtgtggatttctccctgggaatgagaaagtcctgtccctgcttgccctggttaagccagaagtctggactctcaaagagaaatgcattctggn

SEQ ID NO: 189 - DNA, 408 bp, Homo sapiens
tacggctgcgagaagacgacagaagggggagaccagagatctagcgactgaagcagcatggccaagccgtgtggggtgcgcctgagcggggaagcccgcaaacaggtggaggtcttcaggcagaatcttttccaggaggctgaggaattcctctacagattcttgccacagaaaatcatatacctgaatcagctcttgcaagaggactccctcaatgtggctgacttgacttccctccgggccccactggacatccccatcccagaccctccacccaaggatgatgagatggaaacagataagcaggagaagaaagaagtccctaagtgtggatttctccctgggaatgagaaagtcctgtccctgcttgccctgggtaagccagaagtctggactctcaaagagaaa

SEQ ID NO: 190 - DNA, 412 bp, Homo sapiens
  misc_feature 378: n = A,T,C or G
tacggctgcgagaagacgacagaagggcaagctaccaatgactttcttcacggaactggaaaaaactactttaaagttcatatggaaccaaaaaagagcccgcattgccaagacaatcctatgccaaaagaacaaagctggaggcatcacgctacctgacttcaaactatactgcaaggctacagtaaccaaaacagcatgatactggtaccaaaacagagatatagaccaatggaacagaacagagccctcagaaataataccaccgcacatctacaaccatcttatctttgacaaagctgacacatacaagcaatggggaaaggattccctattcaataaatggtgttgggaaaactggccagccatatgcagaanactgaaactggagcccttccttacacattacacg

SEQ ID NO: 191 - DNA, 345 bp, Homo sapiens
tacggctgcgagaagacgacagaagggcaagctaccaatgactttcttcacggaactggaaaaaactactttaaagttcatatggaaccaaaaaagagcccgcattgccaagacaatcctatgccaaaagaacaaagctggaggcatcacgctacctgacttcaaactatactgcaaggctacagtaaccaaaacagcatgatactggtaccaaaacagagatatagaccaatggaacagaacagagccctcagaaataataccaccgcacatctaacaccattttatttttgacaaagctgacacataccagccatggggaaagggatccctattcaataaatg

SEQ ID NO: 192 - DNA, 359 bp, Homo sapiens
gcctacggctgcgagaagacgacggaagggaccaacaacagccaagtcaagtgtcaagaacacactcctattcacaactgcccccaaaagaataaaatacagctaagaatacagctaactagggagatgaaatatctctacaatgagaattataaaacactgctcaaagaaatcagagattatacaaacatatgaaaaaacattccatgctcatgaataggcaagaatcaaattctttaaaatggccatactgcccaaggcaatatacagattaaatgctattcctatcaagctaccaatgacattcttcatagaaccagaaaatactattttaaaattcatatggaaccaaaaaagag

SEQ ID NO: 193 - DNA, 354 bp, Homo sapiens
tacggctgcgagaagacgacagaagggcggggccaggacccttgccagagtgactctggaggccccctggtctgtgacgagaccctccaaggcatcctctcgtggggtgtttacccctgtggctctgcccagcatccagctgtctacacccagatctgcaaatacatgtcctggatcaataaagtcatacgctccaactgatccagatgctacgctccagctgatccagatgttatgctcctgctgatccagatgcccagaggctccatcgtccatcctcttcctccccagtcggctgaactctccccttgtctgcactgttcaaacctctgccgccctccacacctctaaaca

SEQ ID NO: 194 - DNA, 340 bp, Homo sapiens
tacggttgcgagaagacaacagaaggggctcttttccggttagcgcggcgtgagaagccatgagcagcaaagtctctcgcgacaccctgtacgaggcggtgcgggaagtcctgcacgggaaccagcgcaagcgccgcaagttcctggagactgtggagttgcagatcagcttgaagaactatgatccccagaaggacaagcgcttcttgggcaccgtcaggcttaagtccactccccgccctaagttctctgtgtgtgtcctgggggaccagcagcactgtgacgaggctaaggccgtggatatcccccacatggacatcgaggcgctgaaaaaaactca

SEQ ID NO: 195 - DNA, 343 bp, Homo sapiens
tacggctgcgagaagacgacagaaggggacagacgagatctcgatcgaaggcgagatggcggacgtgctagatcttcacgaggctgggggcgaagatttcgccatggatgaggatggggacgagagcattcacaaactgaaagaaaaagcgaagaaacggaagggtcgcggctttggctccgaagaggggtcccgagcgcggatgcgtgaggattatgacagcgtggagcaggatggcgatgaacccggaccacagcgctctgttgaaggctggattctctttgtaactggagtccatgaggaagccaccgaagaagacatacacgacaaattcgcagaatat

SEQ ID NO: 196 - DNA, 345 bp, Homo sapiens
tacggctgcgagaagacgacagaagggggttttgtgctgggagctggtggcgcggtgcagggctcttaagaacgaacggcttgggcgcggactggtatccggggactgtgacttgcagggtccgccatggagccagagcagatgctggagggacaaacgcaggttgcagaaaatcctcactctgagtacggtctcacagacaacgttgagagaatagtagaaaatgagaagattaatgcagaaaagtcatcaaagcagaaggtagatctccagtctttgccaactcgtgcctacctggatcagacagttgtgcctatcttattacagggacttgctgtgcttgcg

SEQ ID NO: 197 - DNA, 379 bp, Homo sapiens
tacggctgcgagaagacgacagaaggggaattcggtatgtaaaaaggggttagtggtatttcattgctgctaaaaatgacaactccctctgtgtcctgtttttcttaaagctgtcagtgtacaagtgggtatttgaataccagaccttactgtaaaaaataaaaaaggtggtatctagagcatgtaaattggatataaagttctgctcttaaagagttgatctaagagtatggctaaacatctatatatgcaatctattaaaagaacttaattcggctattatgtcttgatttgattgcagatttttcctaattataacaaatttttcctcattggcctgtttttaatcctgtgcctagaaggagtacaaaatgcacac

SEQ ID NO: 198 - DNA, 396 bp, Homo sapiens
  misc_feature 396: n = A,T,C or G
tacgctgcgagaagacgacagaagggcaacttccccatcctagcaagacaggccaaaattcaaattcaggaaagacagagaacaccataaagatattcctcgagaatagcaagaccaagacacataattgtcagattcaccaagactgaaacaaagaaaaaaatcttaagggaagctagagagaaaggttgggttacccacaaagggaaacccatcagactaacagcgatctctctgcagaaaccctacaagccagaagagagtgggggccaatagtcaacattcttaaagaaaataattttcaacccagaattgcatatccagcaaaactaagcttcataagcaaaggagaaataaaatcctttacagacaagcaaatgctgagagattttgtcn

SEQ ID NO: 199 - DNA, 386 bp, Homo sapiens
  misc_feature 386: n = A,T,C or G
tacggctgcgagaagacgacagaagggtacggctgcgagaagacgacagaagggtacggctgcgagaagacgacagaagggtacggctgcgagaagacgacagaagggtacggctgcgagaagacgacagaagggggcgcaatctcggctcactgcaagctctgcctcccgggttcacgccattcttctgcctcagcctcctgagtagttgggactacaggcgcccgccaccacgcccagctaatttttttgtatttttagtagagacggggtttcactgtgttagccaggaactgaccgcaaacgaggccgccagacctacacccgctaccagaccctggagctggagaaagaatttcactacaatcgctacctgacgcggcggn

SEQ ID NO: 200 - DNA, 361 bp, Homo sapiens
gcctacggctgcgagaagacgacagaaggggcacctctcgccccgcaggaccatggccaacctggagcgcaccttcatcgccatcaagccggacggcgtgcggcgcggcctggtgggcgagatcatcaagcgcttcgagcagaagggattccgcctcgtggccatgaagttcctccgggcctctgaagaacacctgaagcagcactacattgacctgaaagaccgaccattcttccctgggctggtgaagtacatgaactcagggccggttgtggccatggtctgggaggggctgaacttggtgaagacaggccgagtgatgcttggggagaccaatccagcagattcaaagccaggcacg

SEQ ID NO: 201 - DNA, 341 bp, Homo sapiens
tacggctgcgataagacgacagaagggacacggttaaaagagaccatagataataattctgtgagttctccacttcagtctcttcagcagagaacatggctcattcactggtctctgtttgttttcttcaatcaccccaaaggtcgcgataatattattgacctcttcctttatcagccacaatatcttaatgcaattcagacaatgtgtccacacattcttcgctatttgactacagcagtcataacaaacaaggatgttcgaaaacgtcggcaggttctaaaagatctagttaaaggtattcaacaggagtcttacacatattaagacccaattacagg

SEQ ID NO: 202 - DNA, 350 bp, Homo sapiens
tacggctgcgagaagacgacagaagggggcctttgcaggcctcaccgccgatgcaaggatagtcatcaacagggcccgggtggagtgccagagccaccggctgactgtggaggacccggtcactgtggagtacatcacccgctacatcgccagtctgaagcagcgttatacgcacagcaatgggcgcaggcgtttggcatctctgccctcatcgtgggtttcgactttgatggcactcctaggctctatcagactgacccctcgggcacataccatgcctggaaggccaatgccatatgccggggtgccaagtcagtgcgtgagttcctggagaagaactatactgacga

SEQ ID NO: 203 - DNA, 359 bp, Homo sapiens
tacggctgcgagaagacgacagaaggggactcttcgacgagacgacgcctgggctggacggggatatgactactgagcccagtcttgctgctctcgccacattgtatggcacgcgccaacatgaggtccctagaagcatacctactactcggacaagcactttgactgaacactactagtacacggatgttatgatacccagagaactttccaaacaagtacctaaaactcatctgatgtctgaagaggagtggaggagacttggtgtccaacagagtctaggctgggttcactacatgagtcatgagccagaaccacacattcttgtctttagacgagctcttccaaaagataacaag

SEQ ID NO: 204 - DNA, 353 bp, Homo sapiens
tacggctgcgagaagacgacagaagggtgccgagcttcgggtaactcttacggtggaggattcccagccatatgaagacaccctagctggacgatcagtccttgtcaaaagtctgacccctcaaactctacagcctcaatggaccagaccctacccggtcatttatagcacaccaactgccgtccatctgcaggaccctctccattgggttcaccattccagaataaagccatgcccatcagacagccagcttgatctctcctcttcctcctggaagccacaagattaggccgagagccgatcagacaaacaacctacaacccttaagctcctggcagcgcccagccaaggcc

SEQ ID NO: 205 - DNA, 356 bp, Homo sapiens
tacggctgctagaagacgacagaagggtgccgagcttcgggtaactcttacggtggaggattcccagccatatgaagacaccctagctggacgatcagtccttgtcaaaagtctgacccctcaaactctacagcctcaatggaccagaccctacccggtcatttatagcacaccaactgccgtccatctgcaggaccctctccattgggttcaccattccagaataaagccatgcccatcagacagccagcttgatctctcctcttcctcctggaagccacaagattaggccgagagccgatcagacaaacaacctacaacccttaagctcctggcagcgcccagccaaggccatg

SEQ ID NO: 206 - DNA, 367 bp, Homo sapiens
tacggctgcgagaagacgacagaagggggtgtctccaagcaagatggcggaggagccgcagtctgtgttgcagcttcctacttcaattgctgctggaggggaaggacttacggatgtctccccagaaacaaccaccccggagcccccgtcttccgctgcagtttccccgggaacagaggaacctgctggcgacaccaagaaaaaaattgacattttgctaaaggctgtgggagacactcctattatgaaaacaaagaagtgggcagtagagcgaacacgaaccatccaaggactcattgacttcatcaaaaagtttcttaaacttggggcctcagaacagttggttatttatgtgaatcagtccttt

SEQ ID NO: 207 - DNA, 367 bp, Homo sapiens
  misc_feature 314: n = A,T,C or G
tacggctgcgagaagacgacagaagggatccgattgttcttggcccaaacaataccaatctgcccaaaatatttagtataattgcggaaggagaaatgcacgaggcaattaaacatgaagatccttgtgccaaacgtctggccaatgtcgttcgccaagtacagacttctggaggactgtggactgagtgcatagcacagctcagtcctgagcagcaggccgccattcaggagctcctgaactctgcgtgaagggccttaatgtcacccaccagaaaactaactccaaataaacgcttaccctttcctttaggnttctttgttttggttttgagcaaaagagatcggtagtgttgtgggtaggccat

SEQ ID NO: 208 - DNA, 369 bp, Homo sapiens
tacggctgctagaagactacagaagggtatcttctggggtttcaattgctcagaaacaacttttttcacaacggaaaggaaagaacactagtgttctttcagtaaagtacaaagtgtttattttacaaaagagtaggtactcttgagagcaattcaaatcatgctgacaaggatactgatagaaaaagtgatttcttcttattataaagtacatttaaagttcaaggactaaccttatttatttgggaaaggggaggaggaaggaaatgatatggtacccagacactgggctaggctgcaactttatctcatttaatactcccagctgtcatgtgagaaagaaagcaggctaggcatgggaaatcactg

SEQ ID NO: 209 - DNA, 362 bp, Homo sapiens
tacggctgctagaagacgacagaaggggggacaagacccatctttatgcaaagccagcgttacagtaatgttccagcatctcataatctatcctggggaattcagctgcctcccagggtgaatacaggtattcctgatgacagtctgcctctatcttacagagcagcttgttgctatataccattgaaaagccttcagagctgagaggtactactaaccaataacctgcttggctcaaagggccagcaccttctctctaaagcccaagaggagtttgaggaaaactaggtgtctgtgttcactccaggctgaagttacaggtctgagcaaataaggtgtataaaaaatggaatctgtcttgg

SEQ ID NO: 210 - DNA, 364 bp, Homo sapiens
  misc_feature 364: n = A,T,C or G
tacggctgcgagaagacgacagaagggggcgtgcgtctgtgcctctgcgcgggtctcctggtccttctgccatcatgccgatgttcatcgtaaacaccaacgtgccccgcgcctccgtgccggacgggttcctctccgagctcacccagcagctggcgcaggccaccggcaagcccccccagtacatcgcggtgcacgtggtcccggaccagctcatggccttcggcggctccagcgagccgtgcgcgctctgcagcctgcacagcatcggcaagatcggcggcgctcagaaccgctcctacagcaagctgctgtgcggcctgctggccgagcgcctgcgcatcagcccggacagggtctacan

SEQ ID NO: 211 - DNA, 350 bp, Homo sapiens
tacggctgcgagaagacgacagaaggggccttttggctctctgaccagcaccatggcggttggcaagaacaagcgccttacgaaaggcggcaaaaagggagccaagaagaaagtggttgatccattttctaagaaagattggtatgatgtgaaagcacctgctatgttcaatataagaaatattggaaagacgctcgtcaccaggacccaaggaaccaaaattgcatctgatggtctcaagggtcgtgtgtttgaagtgagtcttgctgatttgcagaatgatgaagttgcatttagaaaattcaagctgattactgaagatgttcagggtaaaaactgcctggctaaat

SEQ ID NO: 212 - DNA, 365 bp, Homo sapiens
tacggctgcgagaagactacagaagggggacaactcaatgaaaatttaaagggaaaaccctcaggcctgaggtgtgtgccactcagagacttcacctaactagagacagtcaaactgcaaaccatggtgagaaattgacgacttcacactatggacagcttttcccaagatgtcaaaacaagactcctcatcatgataaggctcttacccccttttaatttgtccttgcttatgcctgcctctttcgcttggcaggatgatgctgtcattagtatttcacaagaagtagcttcagagggtaacttaacagagtgtcagatctatcttgtcaatcccaacgttttacataaaataagagatccttg

SEQ ID NO: 213 - DNA, 357 bp, Homo sapiens
tacggctgcgagaagacgacagaaggggcttttttttcgaggtaggagtcgactcctgtgaggtatggtgctgggtgcagatgcagtgtggctctggatagcaccttatggacagttgtgtccccaaggaaggatgagaatagctactgaagtcctaaagagcaagcctaactcaagccattggcacacaggcattagacagaaagctggaagttgaaatggtggagtccaacttgcctggaccagcttaatggttctgctcctggtaacgtttttatccatggatgacttgcttgggtatggagagtcggcttgactacactgtgtggagcaagttttaaagaagcaaaggactca

SEQ ID NO: 214 - DNA, 370 bp, Homo sapiens
tacggctgcgagaagacgacagaaggggtgacgctcgtcagtggcttcagttcacacgtggcgccagcggaggcaggttgctgtgtttgtgcttccttctacagccaatatgaaaaggcctaagttaaagaaagcaagtaaacgcatgacctgccataagcggtataaaatccaaaaaaaggttcgagaacatcatcgaaaattaagaaaggaggctaaaaagcagggtcacaagaagcctaggaaagacccaggagttccaaacagtgctccctttaaggaggctcttcttagggaagctgagctaaggaaacagaggcttgaagaactaaaacagcagcagaaacttgacaggcagaaggaactagaa

SEQ ID NO: 215 - DNA, 367 bp, Homo sapiens
tacggctgcgagaagacgacagaaggggctttcgcgtctgcggtgcccggagtgtggtacttctcctagttgcagtcaggcttcatacgctattgtcctgcccgttagagcagccagcgggtacagaatggattttggaagagggagtcaccactggacctccaaggaagccacgtgcagacatctacaaccttcgatctcctgacgagtttattgttggccaaaaccaggctttgattgaaccaggatgaatgcgggtgttggaagtagaatatatatatacatataaaattgaaactggcgatggaatatgagaggagccctctggaaagaataggacagaccctgtgctttcatgaaagcgaaa

SEQ ID NO: 216 - DNA, 374 bp, Homo sapiens
tacggctgcgagaagacgacagaagggggcaggtggctgcatagtcttggcggaggtgaccaaagccacgtaatgtccgtagttcgctcatccgtccatgccagatggattgtggggaaggtgattgggacaaaaatgcaaaagactgctaaagtgagagtgaccaggcttgttctggatccctatttattaaagtattttaataagcggaaaacctactttgctcacgatgcccttcagcagtgcacagttggggatattgtgcttctcagagctttacctgttccacgagcaaagcatgtgaaacatgaactggctgagatcgttttcaaagttggaaaagtcatagatccagtgacaggaaagccctgtgc

SEQ ID NO: 217 - DNA, 358 bp, Homo sapiens
tacggctgcgagaagacgacagaaggggcccctaaccctgaggctgccgcgcggcggtcactgcgccggggtagtgggccccagtgttgcgctctctggccgttccttacactttgcttcaggctccagtgcaggggcgtagtgggatatggccaactcgggctgcaaggacgtcacgggtccagatgaggagagttttctgtactttgcctacggcagcaacctgctgacagagaggatccacctccgaaacccctcggcggcgttcttctgtgtgacccgcctgcaggattttaagcttgactttggcaattcccaaggcaaaacaagtcaaacttggcatggagggatagccacc

SEQ ID NO: 218 - DNA, 352 bp, Homo sapiens
tacggctgcgagaagacgacagaaggggagggctcactgagaaccatcccggtaacccgatcaccgctggtcaccatgaaccacattgtgcaaaccttctctcctgtcaacagcggccagcctcccaactacgagatgctcaaggaggagcaggaagtggctatgctgggggtgccccacaaccctgctcccccgatgtccaccgtgatccacatccgcagcgagacctccgtgcctgaccatgtggtctggtccctgttcaacaccctcttcatgaacacctgctgcctgggcttcatagcattcgcgtactccgtgaagtctagggacaggaagatggttggcgacgtga

SEQ ID NO: 219 - DNA, 365 bp, Homo sapiens
  misc_feature 365: n = A,T,C or G
tacggctgctagaagacgacagaaggggacttaaagcctgaaaacatcttatttgtgcagtctgactacacagaggcgtataatcccaaaataaaacgtgatgaacgcaccttaataaatccagatattaaagttgtagactttggtagtgcaacatatgatgacgaacatcacagtacattggtatctacaagacattatagagcacctgaagttattttagccctagggtggtcccaaccatgtgatgtctggagcataggatgcattcttattgaatactatcttgggtttaccgtatttccaacacacgatagtaaggagcatttagcaatgatggaaaggattcttggacctctaccaan

SEQ ID NO: 220 - DNA, 367 bp, Homo sapiens
tacggctgcgagaagacgacagaaggggcttgtccagtgaaacaccctcggccgggaagtcagttcgttctctcctctcctctcttcttgtttgaacatggtgcggactaaagcagacagtgttccaggcacttacagaaaagtggtggctgctcgagcccccagaaaggtgcttggttcttccacctctgccactaattcgacatcagtttcatcgaggaaagctgaaaataaatatgcaggagggaaccccgtttgcgtgcgcccaactcccaagtggcaaaaaggaattggagaattctttaggttgtcccctaaagattctgaaaaagagaatcagattcctgaagaggcaggaagcagtggc

SEQ ID NO: 221 - DNA, 376 bp, Homo sapiens
cgttgctgtcggaagagtggtactaccagatagaaattctgaaattggaaattggaggccaaagccttaatctggactgcagagagtataacgcagacaaggccatcgtggacagtggcaccacgctgctgcgcctgccccagaaggtgtttgatgcggtggtggaagctgtggcccgcgcatctctgattccagaattctctgatggtttctggactgggtcccagctggcgtgctggacgaattcggaaacaccttggtcttacttccctaaaatctccatctacctgagagatgagaactccagcaggtcattccgtatcacaatcctgcctcagctttacattcagcccatgatgggggccggcctgaatta

SEQ ID NO: 222 - DNA, 381 bp, Homo sapiens
  misc_feature 381: n = A,T,C or G
cgttgctgtcggatatgatgttttattcctagcctttcttcaacacatggattcattctgcaaagcaggtgagagaggaggcaggtcaggtctttactagaaagccttacctgacaccagatgctgtagagaaacccagtttctagaaggctgtcattgtccacaggtctggggagaactctttttttcttgcacatctcaaccctcttcatttggggaattcacaattgtgtaagtcttggtggaagacaggatcctgtttctggtcaaggaaaatacaaggtcagatatgttgtctccctgaacgttggtgtgtgaatcagggttcctcagagaaaatagaaccaataggggcttgtgtgtgtgtgcacgtgtgcacgn

SEQ ID NO: 223 - DNA, 462 bp, Homo sapiens
tgatacccgctacttgttccttttgcaggacttctctcaagacccaatccattcgtattccgttgacttgggagagtttgccaggtaaaagactttctccttcttaaaaaatatagggtgatttctttaaaactttgttatctagagacagtttaattacagttatatacaggtttatgcctaggatgtattcagatgggtgggacctgtgtgctgcttttgtcatcccacactcaaagttgtctctttgtttcttgctgccactgccagctcattgttgagactgccatttctttctcttactcagctctccccagtgccttttggccactgcagctaccgtagaatggcattttatatgtaccttgtcacccacttctgtttactttttcctctccagtaaaaaggaaaaaatttctttcaattggtcttcccattgcaggtactgatatttctcttttt

SEQ ID NO: 224 - DNA, 414 bp, Homo sapiens
  misc_feature 261: n = A,T,C or G
cgttgctgtcgaaactcccctgggggtttcacctgggccctggaggaattcagctcagcttcttcctaggtccaagccccccacaccttttccccaaccacagagaacaagagtttgttctgttctgggggacagagaaggcgcttcccaacttcatactggcaggagggtgaggaggttcactgagctccccagatctcccactgcggggagacagaagcctggactctgccccacgctgtggccctggagggtcccggnttgtcagttcttggtgctctgtgttcccagaggcaggcggaggttgaagaaaggaacctgggatgaggggtgctgggtataagcagagagggatgggttcctgctccaagggaccctttgcctttcttctgcccttttctaggcccagggctg

SEQ ID NO: 225 - DNA, 412 bp, Homo sapiens
  misc_feature 412: n = A,T,C or G
cgttgctgtcggttggaattcagggcattgctatttattcctcgtcgggctccctttgacctttttgagaacaagaagaaaaagaacaacatcaaactctatgtccgccgtgtgttcatcatggacagctgtgatgagttgataccagagtatctcaattttatccgtggtgtggttgactctgaggatctgcccctgaacatctcccgagaaatgctccagcagagcaaaatcttgaaagtcattcgcaaaaacattgttaagaagtgccttgagctcttctctgagctggcagaagacaaggagaattacaagaaattctatgaggcattctctaaaaatctcaagcttggaatccacgaagactccactaaccgccgccgcctgtctgagctgctgcgctatcataccn

SEQ ID NO: 226 - DNA, 417 bp, Homo sapiens
ggcacgagggcggaaggagctagggaagtttgccgttttcgtccatgccaagatggctgagctgcaggtgcgggacctgagcctgaagctgcagggcatccccggccacgtgttcctcctccagctcctccacgggcagcacatgaagcaccagttcctgctgcgggcccggacggaaagtgagaagcagcgatggatctcagccttgtgcccctccagcccccaggaggacaaggaggtcatcagtgagggggaagattgcccccaggttcagtgtgttaggacatacaaggcactgcacccagatgagctgaccttggagaagactgacatcctgtcagtgaggacctggaccagtgacggctgggctggaggggtccgcctggcagatggtgagaaggggtgggtgccccaggg

SEQ ID NO: 227 - DNA, 404 bp, Homo sapiens
ggcacgagagggcctggtgctgcctatggctctggagctcatgacggtgctggtgggcagcccccgcaaggatgggctggtgtctctcctcaccacctctgagggtgccgatgagccccagcggctgcagtttccactgcccacagcccagcgctcgctggagcctgggactcctcggtgggccaactatgtcaagggagtgattcagtactacccagctgcccccctccctggcttcagtgcagtggtggtcagctcagtgcccctggggggtggcctgtccagctcagcatccttggaagtggccacgtacaccttcctccagcagctctgtccagactcgggcacaatagctgcccgcgcccaggtgtgtcagcaggccgagcacagcttcgcagggatgc

SEQ ID NO: 228 - DNA, 761 bp, Homo sapiens
  misc_feature 3, 737, 743, 753, 758: n = A,T,C or G
cgnttcgaattcgcacgagcccggcccctgcagtccggatactcacgccagaagtgcggctgggatccggcggccacctgcacctgcgtatctctcgggccgcccttcccgaggggctccccgaggcctcccgccttcaccgggctctgttccggctgtccccgacggcgtcaaggtcgtgggacgtgacacgacctctgcggcgtcagctcagccttgcaagaccccaggcgcccgcgctgcacctgcgactgtcgccgccgccgtcgcagtcggaccaactgctggcagaatcttcgtccgcacggccccagctggagttgcacttgcggccgcaagccgccagggggcgccgcagagcgcgtgcgcgcaacggggaccactgtccgctcgggcccgggcgttgctgccgtctgcacacggtccgcgcgtcgctggaagacctgggctgggccgattgggtgctgtcgccacgggaggtgcaagtgaccatgtgcatcggcgcgtgcccgagccagttccgggcggcaaacatgcacgcgcagatcaagacgagcctgcaccgcctgaagcccgacacggtgccagcgccctgctgcgtgcccgcagctacaatcccatggtgctcattcaaaagaccgacaccggggtgtcgcttcagacctatgatgacttgttagccaaaagactgccactgcatatgagcagtcctggtccttcacttgtgcacctgcgcnggggangcgaacttanttgtnctt

SEQ ID NO: 229 - DNA, 765 bp, Homo sapiens
ctcgttcgattccgtgctgtcggaaaacccccactgatgaacctgaaaaggctgtggaggatattaatgaacatattaccgatgctcagttagaagcaatgactgaactccatgacagaacagcagtaatcaaggagaatgaaagagagaagaggcccaagcttgaaaatctgcctgacacagaagaccaagaaactgtggacattaattcagtcagtgaaggaaaagagaataatataatgataaccttagaaacaaatattgaacataatctaaaatctgaggaagaaaaggatcaggaaaagcaacagatgtttgaaaataagcttataaaatctgaagaaattaaagatactattttgcaaacagtagatttagtttctcaagagactggagaaaaagaggcaaatattcaggcagttgatagtgaagttgggcttacaaaggaagacacccaagagaaattgggggaagacgacaaaactcaaaaagatgtgatcagcaatacaagtgatgtgataggaacatgtgaggcagcagatgtggctcagaaagtggatgaagacagtgctgaggatacgcagagtaatgatgggaaagaaagtggtcgaagtaggccagaaattaattaataagcccatggtgggtcctgaggctggtggtactaaggaagttcctattaaagaaatagttgaaatgaatgaaatagaagaaggtaaaaataaggaccaagccataaacagttcagagaacataatgggcatc

SEQ ID NO: 230 - DNA, 460 bp, Homo sapiens
cgaacacacacccttctccgctcccaggtctggttggtgagacttgggagtcaggaataagggaaaggggattgtttggtttttgggtttttccctaagcccctcccttttctttcagcctttttccttcccccattatgtcatgacctcacttaagtggaacactatatcataacccagagattcgtcccagccccagagtccgacagactgtctggtccctattcctaatgaggggttgtgttggggcccaggtggagggaggggatttgggggttcagactgcggggaagccagggtctccctcgttcaacgccctcctccccctcaacccaccttcccaactgggacattctcaagcttttcacaccgaaaaggaaaaaaaatgttatttttagatacattttatgaataacttttgttatgaatatggctgggtaaccattgtgtatgttattaa

SEQ ID NO: 231 - DNA, 463 bp, Homo sapiens
  misc_feature 112, 116, 139, 153, 331, 432, 463: n = A,T,C or G
gtcaaaggcagcaagcagatagactcaaggtgtgtgaaagatgttatacaccaggagctgccactgcatgtcccaaccagactgtgtctgtctgtgtctgcatgtaagagtnaggnagggaaggaaggaactacaaganagtcggagatgatncagcacacacacaattccccagcccagtgatgcttgtgttgaccagatgttcctgagtctggagcaagcacccaggccagaataacagagctttcttagttggtgaagacttaaacatctgcctgaggtcaggaggcaatttgcctgccttgtacaaaagctcaggtgaaagactganatgaatgtctttcctctccctgcctcccaccagacttcctcctggaaaacgctttggtagatttggccaggagctttcttttatgtaaattggataaatanacacaccattacactatccacagatatagcn

SEQ ID NO: 232 - DNA, 495 bp, Homo sapiens
  misc_feature 331: n = A,T,C or G
aatctctacagctgtctataacaaaactttttaggaaagtaccacaaatatgttaaacagaagaagcaaatctcaaataatgtgcaaaagctgtgagtttcttcttacataaaactggtacctaagcaagtgagggttcattttatttttcactcaccaatccccatatcattatacagtaacaccatacagccaaaacggccatgatattcctcccttctcagccaaaattgggcaagagagaatgacccttgtaggggaaaagaaacctctacgataaactgaaatgccaccatcagggtttgttgaaactgtaggaacagggtctacngactcacttagctgctaatgagtttctatgattccagattggagtagttcaaagtaagaagtgaaggggctggacctgtctgtgaatcagaatgagcccacgtcctccaggaaggttttttatagcctcctctcccaaatgggaaaagcccaaatcccatcact

SEQ ID NO: 233 - DNA, 295 bp, Homo sapiens
  misc_feature 15, 19, 45, 61, 78, 92, 170, 173, 281, 282: n = A,T,C or G
agtcgaatatgacgngganaggaagaagaccctgtgtgggactcntaattacatagctccngaggtgctgagcaaganagggcacagtttcnaggtggatgtgtggtccattgggtgtatcatgtataccttgttagtgggcaaaccaccttttgagacttcttgcctanaanagacctacctccggatcaagaagaatgaatacagtattcccaagcacatcaaccccgtggccgcctccctcatccagaagatgcttcagacagatcccactgcccgcnnaaccattaacgac

SEQ ID NO: 234 - DNA, 501 bp, Homo sapiens
  misc_feature 56, 431: n = A,T,C or G
tgactttggactctctcgggtacttgaagatgacccagaagctgcttacacaaccnggggaggaaagataccaataaggtggacatcaccagaagcaattgcctaccgcaagttcacctcagccagcgatgtatggagttacgggattgttctctgggaagtgatgtcttacggagaaaggccatactgggagatgtccaatcaggatgtaattaaggctgtggatgagggctatcgctgccacctcccatggattgcccagctgccttgtatcagttgatgttggactgctggcagaaagacaggaacaacagacccaagttcgagcagatcgtcagcattctggacaaactcatccggaatccaggcaagtctgaagatcatcaccagcgcggctgcaaggccatcaaaccttcttctggaccaaagcnatgtcgatatcgctaccttccacacaactggtgattggcttaacggcatgaggacagcacctgtaaggaa

SEQ ID NO: 235 - DNA, 410 bp, Homo sapiens
  misc_feature 302, 303, 309: n = A,T,C or G
gcagccacagctccgaagctggcaagaaggatgtcagtgggcccctgaggagctgcgccctcggtctgcacctgcgaaagggacctcagggctatgggttcaacctgcatagtgacaagtcccggcccggccagtacatccgctctgtggacccgggctcacctgccgcccgctctggcctccgcgccaggaccggctcattgaggtgaacgggcagaatgtggagggactgcgccatgctgaggtggtggccagcatcaaggcacgggaggacgaggcccggctgctggtcgtggaccccnnagacanatgaacacttcaagcggcttcgggtcacacccaccgaggagcacgtggaaggtcctctgccgtcacccgtcaccaatggaaccagccctgcccagctcaat

SEQ ID NO: 236 - DNA, 304 bp, Homo sapiens
  misc_feature 2, 7, 19, 45, 62, 72, 82, 83, 87, 88, 89, 99, 100, 102, 119,120, 135, 150, 161, 162, 168, 172, 173, 174, 190, 192, 219,221, 228, 249, 250, 256, 273, 300: n = A,T,C or G
tnacganatgacagatttnacaaataacaaagtctacgccgcaanaattattcctcacagcngagtagctanacctcatcanngggnnnagattgacanngnaatagagcttcacaganntcttcatcataagcntgtagtgcagttttnccactacttcnnggacanagannncatttacattctcttngnatactgcagtagaaggtcaatggctcntnttttganagcaagaaaggtgttgacagnnccagangtccgatactacctcangcagattgtgtctggactgatataccntcat

SEQ ID NO: 237 - DNA, 570 bp, Homo sapiens
  misc_feature 503, 515, 533, 548, 556: n = A,T,C or G
gcttgatctggccccgctcgtccagcaggatgttggagggcttgacgtcgcggtggatgacaccgtgcttctccttcaggtagtacagcgccttcacaatcgccactgtcatcttgcccagaatgcgctcggggatggggccctgcatccgcttcttgagcttctcagcgcaggtgcccatgagctccatggcgatgaagacgtccgtgttggtgatgaacgtcccaaagcactgcacgatgtaggggcagtcgtggctcttcagcaccacatccaggtccatgaggatgcgcttgttctcctccttgttcccggagcgccgcatttgcttaacggcaatgacgtggccggtcttccggaagcgcatcttccacacctggccgcagtgccgctgcccatctcgcccaagttctccaggtcgttgatttctgcctggtagcgctggcccccgatggtcaggtaagccgtctgctttcatgatctcctgcagcttctggtcaatntcaatgctctcnatgctgcggggtgtgaanagggtttaacgggangccccagnatgtgggcggggcc

SEQ ID NO: 238 - DNA, 648 bp, Homo sapiens
  misc_feature 1, 454, 581, 611, 634, 645: n = A,T,C or G
nattcaggcactagggaccagcctgggcaactatagtgagataggtctccacaaaaaaaaaaaaaaaaaatagccagtctgggtgccacacacctgtagtcccagctactcaggagactaaggtgggaggattgcttgagcccaggagcggaggtcgtggtgagccactgcactccggccttagagatgcagcaagatcccatcaaataattgatagattgatacctagctagctagctagatagatgatagcaaattttgagggaagatcagaatattttacaattgaccataaagaagtttaggtacattacaatgcaaaaacacaaaaaaacccaggctgtcgaagttgaatagtttttttcttcaaggtcattgctctacattcatattatgatgtctggaaagacatgttaattttcagaacatagaattactggtgaggaagttgaanaacattccttttttccctcctatagcacatatggtatcatttctaaacatatttggatgtgtgcacttcatggcctggactagggtgaggcaagagaaattttataagacccaaatttaaggaggcncattgtcctaaggttggaacagtgtgagcncctgcatctgcaccaccctaaangtggaatggcncct

SEQ ID NO: 239 - DNA, 398 bp, Homo sapiens
agctcctgctccttaaagctgagatcacgctctagtttctttagcctctcaagagttgcctcaatttcgcacctccactccgccttgttgtgtacgaatgagttacacttgtcacgaaggctcgtgtcatttgacatggactccaggattgaaatgatttgcttgaatgatggccgtttcttggcatcagcttcccaacactgatgtaacagttcagcaaaacttctggggcaactgcttggaatggttaatctctcgtttttttccactacaagccaagctacttgtaatccttccaaacctttaaaggggacctcccttgttagcatctcccagagaaccacaccataggaatatgtgtcacaagtttctgacacagggagactctggataacttc

SEQ ID NO: 240 - DNA, 294 bp, Homo sapiens
atcgagacatcaaaccgtcgaacttcgctatgggtcgctttcctagtacatgtaggaaatgttacatgcttgattttggcttggctcgacaatttaccaattcctgtggtgacgtcagaccacctcgagctgtggcaggttttcgagggacagttcgttatgcatcaatcaactgcacatcggaacagggaaatgggaagacatgatgacctttggtccttattctacatgttggtggagtttgtggttggtcagctgccctggagaaaaataaaggacaaggagcaagtaggc

SEQ ID NO: 241 - DNA, 501 bp, Homo sapiens
gacaccttgacagaagaggaaacacagttctacatttcagagactgttctggcaatagatgcgatccaccagttgggtttcatccatcgggatattaagccagacaaccttttattggatgccaagggtcatgtaaaattatctgattttggtttatgtacgggattaaagaaagctcacaggactgaattttatagaaatctcacacacaacccaccaagtgacttctcatttcagaacatgaactcaaagaggaaagcagaaacttggaagaagaacaggagacaactggcatattccacagttgggacaccagattacattgctccagaagtattcatgcagactggttacaacaaattgtgtgactggtggtctttgggagtgattatgtatgaaatgctaataggatatccacctttctgctctgaaacacctcaagagacatacagaaaagtgatgaactggaaagaaactctggtatttcctccagaggtacct

SEQ ID NO: 242 - DNA, 350 bp, Homo sapiens
cttaccgccaagtgaactgcttttcccacctcagccagacttactgtggcagctttgcttacgcttgcccagagatcttacgaggcttgcctacaaccctttcctgtctgacacctggagcatgggcgtcatcctttacactctagtggtcgcccatctgccctttgatgacaccaatctcaaaaagctgctaagagagactcagaaggaggtcactttcccagctaaccataccatctcacaggagtgcaaggtccaactgctcattgcctgtgtggcacaatggagaaaaactcaggcaagacctctctctcacctgctctagaacctgatcctccagatgctacgcc

SEQ ID NO: 243 - DNA, 466 bp, Homo sapiens
caaccttaaccaaatcggcagcagcacctcgaccgcccacacattcctggccaatcagctcagctgtttatttaccaaatgtcttcacaacaactacagcagcagccttcgcgtaacaaaaaagcaggaaaaatccacaacacccccttcgccaaccaactaaatccaacgcaacatctggcaaaaccttttcagcaaattcttcctggccgtcagtccggcagcctcacctcaccatttctagcttgttgaaacccaaaactaatctccaagaaggagaagcttctctcgcagccggagcaggtccctttctagagataggagaagagagagatcgctgtctcgggagagaaatcacaagccgtcccgatccttctctaggtctcgtagtcgatctaggtcaaatgaaaggaaatagaagacagtttgcaagagaagtggtgtacaggaaattacttcatttgac

SEQ ID NO: 244 - DNA, 511 bp, Homo sapiens
cggtatgtgaagccagataatattctcctagagtgcaatatgcagatcggacgtgcagatttcggattctcctgccacttggaacctggcgagaagcttcgagagttgtgtgggaccccagggtatctagcgccagagatccttaaatgctccatggatgaaacccacccaggctatggcaaggaggccgagctctgggcctggggggtgatctcgtgcacactcctggctggctcgccagccttctggcaccgtcggcagatactgatgtgacgcatgatcatggagcggcagtagcagttcagttcccccgggtgcgatgaccgttgcagcactgtcaaagacctgctctccagtatcgtgcaagtgtgtgctggggcaggagtggcagctgagcaggcgctacggcagcgcttcgtgtgagcggtatcgagtgcacaagccgggaaactgatcccgcgtgaggggttcccaggttggtagtcgtgagggctggctgctgggagagtgg

SEQ ID NO: 245 - DNA, 495 bp, Homo sapiens
cctttgcagccctgtacctccgttatgccaatgctcagtgcagcatttgtggatgagaatttgcctgatgggactcaccttcagccaggaaccaagtttatcaaacactggaggatgaaaaatacaggaaatgtaaagtggagtgcagacacaaagctcaagttcatgtggggaaacctgactttggcttccacagaaaagaaggatgttttggttccctgcctcaaggccggccatgtgggagttgtatctgtggagttcattgccccagccttggagggaacgtatacttcccattggcgtctttctcacaaaggccagcaatttgggcctcgggtctggtgcagtatcatagtagatcctttcccctccgaagagagccctgataacattgaaaagggcatgatcagctcaagcaaaactgatgatctcacctgccagcaagaggaaacttttcttctggctaaagaagaaagacagcttggtgaagtgact

SEQ ID NO: 246 - DNA, 432 bp, Homo sapiens
tttttttttaaggttaataaacagctttatttgccttgtacagcatcaattttcttacattctcagttaattggccattaaagtgctggaaattttcttaatcatgataacatttgttaaaaagaaatcagaactaatatcaggaacatggcggcatgaaggaaacagttcccttacaaaacacagaaaatggaagcccctcatgttgagggggtgggttggacaatttgcaaacagattctaatttcctctcaccgtcagcaccaaactggctgggaccaccacccctgggtgaaagaaacaacgctaaagaaccctaaaaacacccacacaccctgactaccaccacctctgggccatctgtgggcgtttgctgtttgaacagatccagtctcaggaaagaggaagacctgacctccgtctgcaacccat

SEQ ID NO: 247 - DNA, 330 bp, Homo sapiens
gaacttcagaaactttcaaagtttgatgagcagagaactgctacttatataacagaattggcaaatgcctgtcttactgtcattcgaagagagttattcatagagacattaagccagagaacttacttcttggatcagctggagagcttaaaattgcagattttgggtggtcagtacatgctccatcttccaggaggaccactctctgtggcaccctggactacctgccccctgaaatgattgaaggtcggatgcatgatgagaaggtggatctctggagccttggagttctttgctatgaatttttagttgggaagcctccttttgagg

SEQ ID NO: 248 - DNA, 437 bp, Homo sapiens
gttgcttttcctttactgtgaagataatataatccctgcagtgtttctctgctaacatatgcaatttgcagttctgacagaggtccagttacgtgataaatatcctgtaaagaaccacctccacaaaactccatgcaaatccaaagcttatctcgcctgagatagcttccaaaataagcaacaatatttgggtgtttacagtctttcatcataataatttcttgctgcacaactgcaaagtcttctcctggttccaattttattactttaattgctgctaattcaccagtgttaacattccgtgccttgtagacgtcgccgtagtgccgctgccgatgcgctgaatcagctcgaagtcctcctgcgggttccggcgggacaaatcgaagccggggttcatggcgggccccaggtgccccccgcctccctcccgggca

SEQ ID NO: 249 - DNA, 400 bp, Homo sapiens
attaaaggcgattttgaaacaattaaaatctgtgatgtaggagtctctctaccactggatgaaaatatgactgtgactgaccctgaggcttgttacattggcacagagccatggaaacccaaagaagctgtggaggagaatggtgttattactgacaaggcagacatatttgcctttggcttactttgtgggaaatgatgactttatcgattccacacattaatctttcaaatgatgatgatgatgaagataaaacttttgatgaaagtgattttgatgatgaagcatactatgcagcgttgggaactaggccacctattaatatggaagaactggatgaatcataccagaaagtaattgaactcttctctgtatgcactaatgaagaccctaaagatcg

SEQ ID NO: 250 - DNA, 507 bp, Homo sapiens
ggattaatcctatatgtaatgatcattatcgaagtgtgtatcaaaagagactaatggatgaagctaagattttgaaaagccttcatcatccaaacattgttggttatcgtgcttttactgaagccaatgatggcagtctgtgtcttgctatggaatatggaggtgaaaagtctctaaatgacttaatagaagaacgatataaagccagccaagatccttttccagcagccataattttaaaagttgctttgaatatggcaagagggttaaagtatctgcaccaagaaaagaaactgcttcatggagacataaagtcttcaaatgttgtaattaaaggcgattttgaaacaattaaaatctgtgatgtaggagtctctctaccactggatgaaaatatgactgtgactgaccctgaggcttgttacattggcacagagccatggaaacccaaagaagctgtggaggagaatggtgttattactgacaaggcagacatatttgcctttg

SEQ ID NO: 251 - DNA, 396 bp, Homo sapiens
agaatacctgctggatgagagtttagccaagccaaccatcaaactggctgactttggagatgctgttcagctcaacacgacctactacatccaccagttactggggaaccctgaattcgcagcccctgaaatcatcctcgggaaccctgtctccctgacctcggatacgtggagtgttggagtgctcacatacgtacttcttagtggcgtgtcccccttcctggatgacagtgtggaagagacctgcctgaacatttgccgcttagactttagcttcccagatgactactttaaaggagtgagccagaaggccaaggagttcgtgtgcttcctcctgcaggaggaccccgccaagcgtccctcggctgcgctggccctccaggagcagtggctgca

SEQ ID NO: 252 - DNA, 576 bp, Homo sapiens
caggacccgaacccctacagcttccagtcagacgtctatgcctacggggttgtgctctacgacttatgactggctcactgccttacagccacattggctgccgtgaccagattatctttatggtgggccgtggctatctgtccccggacctcagcaaaatctccagcaactgccccaaggccatgcggcgcctgctgtctgactgcctcaagttccagcgggaggagcggcccctcttcccccagatcctggccacaattgagctgctgcaacggtcactccccaagattgagcggagtgcctcggaaccctccttgcaccgcacccaggccgatgagttgcctgcctgcctactcagcgcagccgccttgtgccttaggcccgccaagccaccagggagccaatctcagccctccacgccaaggagccttgcccaccagccaatcaatgttcgtctctgccctgatgctgcctcaggatcccccattccccaccctgggagatgagggggtccccatgtgcttttccagttcttctggaattgggggaccccgccaaagactgagccccctgtct

SEQ ID NO: 253 - DNA, 387 bp, Homo sapiens
caggtggtgttattgtaatagtctgagctgtaaattcttcatcaaaatatctagtatctgtctcagatgttacttgaggtttaagaggaggtacaagctttttatcatatacatcttgccagtttactccagagaagaaactgtgtctcataatttcttttgcgtcatctggtcctccaccaaggcgtttatttggatcctttatcaagagccctgaaagcaatgattttgcatctgaagagagtgttcgaggaaatttaatgtcttccattaatattaattcaaaaagtttctcatggtcctggttgtagaaaggtaacctcccacacatcatttcatacatgacaacccctaggccccaccagtctactgctcggccatagtcat

SEQ ID NO: 254 - DNA, 739 bp, Homo sapiens
  misc_feature 477: n = A,T,C or G
ttggaaggaaaaagtgtaaaagttattgttgcatatttgggaacagcaagcacttagtttgagaaaatgaggacttaaaacagttgaatcaaaggcaataccctggtacttgtatttaaaatcaatggtgatgttctttcttaagcaacattcttctcttccctaatagctacaatatgatacagtacgcaacagctcacttgaaagtgctagaatcagaggataaagaagccataagccaccccacttacatttcgtactatacaatgcctttttggcgcttgataaatcaagcattcatgtagcattacattcaacagaaacatttctcgtactttgggtttaagatcgttgtccctccagttcggatgtcgtgacatctgactcttcatcactgtaaatattttcagccatttgccatatctgcatgatgttatcctcagacactgagcaaatgacccaaggctcattggggtnccagctaaaatctgaaatcttatcagtgtgtccgccatgaataaacaggagttctggatggccatcttctgcatcctctggtgattgttcttccccaatatacttaaatccacacattcaggcgggcggtagtaccacttgaatccgaatagtttcactatgtggagacagtggacctcgaaaattacatctcaaggagattcgaggtatggagtcttaattttaagttaacgcaattccataaagctacggtcttatccgc

SEQ ID NO: 255 - DNA, 459 bp, Homo sapiens
aaaaaaagtgtttatttcctttattttaagattcagtaggatagccaaattcatagagaataaaattacatgaaagagttacaagctcactgttttaaagacttgacatttttcatttagttttaattaacagtaaataagtcacctcctgtttttcaatgttcaccaaaaaaagaaacatagaatggggggaaaacatgcttatatagccaaggtacagatccagatgatgtaacctttttagtattcgcatgacttgaaaactgggcagatcaatagataatcgaagtgctttatctgaagggagagggtaaagacagtgtgaccaggtttgttttcagggctgccgaatgagcctcacctaacagtgtccatgggtaattcgctaaccttaacaaagatgggaagaagtgagtgctcttatgtcttctgctggctctccataagtactgtaaattt

SEQ ID NO: 256 - DNA, 305 bp, Homo sapiens
gacccttaaataaagtaattagtttagggtgttgtaatcaatggataaaactcttagatggaaattgatgatgaactttattatggaatcatcagacaatctcaacctggacctgtaaataatcttagccccactaaaagtgggataaacagacatgtgtgagttgatgtaccttaccatttatgaactactgttttaaaaaatgtgaagttaatcaagcttctagaagaaatttttgttccaagggacaactcacacggtgtctgcaataagtcaaagacatgaaaaaaaaaaaaaagtcgacg

SEQ ID NO: 257 - DNA, 554 bp, Homo sapiens
tttttttttgtcaataaaactttaggaatatctgcacatgtacatttacattcaagttgataacactggtggtttcatttcaatacaaattatgctagagaactgacatttcagacatggtcatatatatgctatttgaattcctttatcttgatacagatcttgattgtgaatctcttgatgatagatgtgcagctaatttgtcccgaaactcatgaagataattgtattgcttgatggtctgtattgccccggatcctcttaggtctcgcaggctgtctatggcttgctctggtgatattgtgtcagacaggtatagtaggagacaagcagctacaagacaagatctcccaagtcctccatagcagtgtattaaggtttttcggtaatttttaaggcaggttgtaagctcttccattatttcacagcagctggctatgtcaggagtcctccatctgcgattggatgatgatgggtgataattcacattgctggtagagatccagaaggtttgggactctatattttgacagttgccctctggtgcagaatac

SEQ ID NO: 258 - DNA, 700 bp, Homo sapiens
acatggaaatattccatgggatttatttttaacaaacatttacataaacaataaatgaaaaaaaaacaggtttaaagtgagcagattcatatttacagtgtgatttttaaggactgtctatatccaaattttattttcgtgaacgcttacattctaagagcagtacaattagcctattacgtagggccctaatcttgttagtatagtgttgttgaaatactttcttcagcttttgccttaacaaatccaaagatggaagatgatgacaatctggaatattcaacataacatgaaaaaattcattccacatatccaaatgaggaagccttctaaaaagaccttcaggcttacactctcctccttcatttttcactttcatgtaagtgccaaagagcatgcaatatactgttgcagcaaccccaaagtaatcgatctggtagttccatggtttgttgctgagcatctcaacacactgaaaaccagatgtatcacactttgctgtgaatatagttccttttggaaaaagtttcatatctatactctgacccaggtcaatcagtgccaagccagcagataaatcatcctcatcaatcctgtccaaaaatacgtttccaagtatgaaattgtctggtttaatgtctccatgaatgatttcacagtcatgcacttgctcaatcatgttaagcatcctcatagcaaa

SEQ ID NO: 259 - DNA, 902 bp, Homo sapiens
  misc_feature 368: n = A,T,C or G
gagatggagtctcactctgtcaccggggctggagtgcagagggagattatctccaaaaaataataatgataaaaaaaaattaaactgctctctcattataaagtcaggttcttgtttcagtaggagttaaaaaatagcttctcctatcctgatttgaggaagtgggggaaagtcctaggcctgtatgatacagggccagaattcagcaaaattactgtgcttctttcaaagcttcctttctacctgccagcatcaatacattcctttctcaaaagatgttttattttggtttttaataattaaaagaaaaaaactatcttcccttgtaagacttttaacacattatagtatctcagaagagcaggtanaacatcaaatataaaagaaaaataaaatcttgatgaataattaatattatatatcttctacaatttgatacacaaaacaataaagacttaattttaaccttaatactacctttagggacttttttgaacagcagaaatcatatctccatttttaattgtggtacttttatggaagcttcccaaacttcttttgatatgtctactccagaggacatctacctcataagcagaccaatcggtattatttatttgctcatgatgcatcactagtttctgcagactatttgctaggaatccggatgggattaatatcaaatatttaaattcatcatatggtggtggtggattcctaaattacttacaaatattaccgggacctccagtccaggattaatggaagctcagtccccttaatgaggaaattccaaatttttggggatatttttgggaaggaaccggttttggcggggtccccaataacgggaaatgtaggtttaaagacctaagttgggagttttgctgagtcgtgggcgg

SEQ ID NO: 260 - DNA, 669 bp, Homo sapiens
  misc_feature 519: n = A,T,C or G
atcaaagatttttattgattcccctgccaaacacaactgatttccatctacaattactttttaaggtaagaaacagtaagtcaactgaacaaagagctgggctttgggcctggaaacgtgattacacaccgactgagaaatgcaggacctcagggtggggtctagtcaggctggccgcaacagggcacgaacctgcctcagtgggccttctccaagaacgctctgcagcacctgacacactgctggtacaccgtctcaaagtcagagtcattcccataatagggatcttcaataaaaagttgtttttgtggatcatagctcccaagtagttcaattttagctttgcaggttttaacttgattactttttctattcaaatctcccagattgctttcatccatacatagtatataatcaaatgtggcaaaatcttctttggaaatctgccgggaaacgtggcccatgggaatgccgtgcctcttcatgcagctctgccctcgcaagtcaggggggttactnatcccaaacccggaagttgccgcgctgtataccccccaatttctcgaaaagttttgatcggttacaagtttccgaaaaaatgcttctgaatgggggatcgacaaagttacccagaaacccaaaaagcagggactgggagccgtttccgcc

SEQ ID NO: 261 - DNA, 551 bp, Homo sapiens
cccctttcagatggaatggtttatttaaatcagatgtaaatagtagaaagagccagattacaagccccacggtccattagcctcaaagacaggaagtctgcccatcctcccaggttttcctggtcccaatctcctctgagagctgaaggtttttgctggtgtcccctcactgctccagggacaccgtcagctcatggcatcgtgttgtagaccctgtagttgtccttctgcgtgatgtgcagcttccaggggaagaggcgcttctgggaggggaggccacgagtctgccgcaccatgagcgctacgtcctcatccgacagcagccgaaccagatccccctcagcgtcccggtaattcagagctatgtcctctctctggaactccgccttgtgagctccacaggtctttcaataggggagtgctgctgagatcttcctcaccgcgatgtccttgatggtgctgatggtgtctcgtagtagtagcaaccagccagttggtggggtcgtcctctcatggaagtctttgaggatcttacgaggagagaggggaaa

SEQ ID NO: 262 - DNA, 879 bp, Homo sapiens
  misc_feature 519, 596, 765: n = A,T,C or G
ttttttttttttttttaacaatgactctttataaacttgtatggggtctaaattatcccttgtaatatatatgtgtgtattcattccacagagaattagatgatccgcctccaggtaacctgctgggaatttcttgagattttggctccccttgaatggccgcatccaacttgttttgttagaactcccagcatcacagcgatggcagctctcttagattccccatacatccacgacctatatcatgtccaataaatcgtccacatcaccaccttcttcaaatacagctgctgtgtctccacttggtttgtctttgggggccagaaactttttggcttcctcagctgtgacagaacttccagaggcttcctctttggtgatcagagtaattccatcctggacaacaatttcccagaaatgatttaattgtttaatttccactttctcttgaagggctttcaggaagttgttaaagcgctgctcttctgaaaacttaatggcttcttccccgaaggctcngatgcagtctatgctcttcataaaatacggtgtttcattagtatccaaaaactgttcgatgtgatttatgagctggntactcgcttcctcaaagctggcctttcttctgtttactagaacacggaaagtttcagcaggattcacactttccacagaggtgacactgccttcagccagactggagaacctgaagtgggcccccccttgtcagtctttaatttttagcttggagtccatcttcatggntggcttggaaaaattccctgacagccacttgatcctttttttggcttcaatcaaagaaaaaggtctttattttaaagagaggatttgacttttcgttgcacctaacgggaggat

SEQ ID NO: 263 - DNA, 479 bp, Homo sapiens
  misc_feature 402, 447: n = A,T,C or G
gggtttttcactcgtctcctcacactcctctggagtactactgctgttttctgaagacgcgagggcaagtgcagccagccgtttcttttccttctttaagcgtttcttctcctgtttctccagcttcctagtaatctcagcagccgcttcctctgcctgaaccattgcttccttcatgacatccagattctttcgtggtatctctccagtctcatagaaggacagtcgctcttcaacttgttctcgaagcttctccccgaatacactcgtgggcacctcagagaagcaatcgattcgtgaggcaatactgcatttgtttgccaggtatcgggagatgcggcctttgttcttggcagctgctcggccaatgaaggtggagtggaaaatgagtccatattttgnggtgttaccccttgtcttcagggctctggaaacttggtccctttngctgggccctggaatcactcagacaccaggac

SEQ ID NO: 264 - DNA, 736 bp, Homo sapiens
  misc_feature 608: n = A,T,C or G
ttttttttagctctcttagaaattttattggtcctggagaaaggaaggcaaactctgcctcccgctcagagtccccccaaccctcactgtttcccgttgccattgatggggaggttcacgtactcaggggaggccaggaaggccttgagcttgggccgggcactgaggcgccccacatatgctgagagcagggggaacgcatccaggcagccaggggctaggacctcatggatcagcagcaagtccagcaggttgtagtcagcgaaggagatctggtctcccacaatgaaggtcttgcctccctggttctgggacagcagggtctcaaaaggcttcagttgcccgggcagtgccttcacatagtcatccttgcccgcctcatagttggtgtagatgagggagatgtatttgcagcggaggtcctccacgccgtcattcaccatgtccaccagggctgcctcctgctggtccttcccatagagcccaagggtgcggcccaggtgacgcaggatggtattggactggtacagggtgaggtctccgtcctggaacttggggagctgcccgtataggcaggaggctttgagtgagcccttctgccacgtctncacggtcaccacctcctccttccagctctggccctgatctggcagcagcatgcgcagggccgggcagcggccctcaactgggaaataaacaacggggtagggccgcaggtgggcaaaaactgggggcg

SEQ ID NO: 265 - DNA, 691 bp, Homo sapiens
aggtcgttttttactagtgtgtggaagacatttaggagaattccaactgattaccatttacagtgatcacaatgaaactgctcagagttatcactgaacttcagtaagaaaatacaacagagtgccatcaggacaggggagagggcaggagactgctccatcgctctgctcatgtccacactgccaaggtccccaccacgggggtccccagtgcaccccagctccggggcagaagaggcagcctgcagatctctgctgccgggaaagagctcctgaagttgtggggtctggactctgctggggacggggccttccgcgagtctcccacctctcgggggactgcagggagaggcgtctccagtgggcagccttgggtcacttccatagctcccccagcggcttctctgtggcagtgcggatggcgtcctcagagagcacgcggatgtcctcatggacagcttcgatgcttttggaagcatccaccatcttccagttcaaagtcgtgtctttcatgagctggtggaaacaccggagcgcccgctcctgaaaagccccgttctcatagcgctcatggccaaacgctccccgctttgcagcatccgccagctgtaactggaggtacaggaccaagtcgggtttgggaaggcccacgtctgggtgttacaccaatctaaggaaaaatcttcctggc

SEQ ID NO: 266 - DNA, 820 bp, Homo sapiens
  misc_feature 543, 662: n = A,T,C or G
acagctgatgaggatttataagtgtgattttaaaaacagccgatttaaaccatgtacaaataagtttgcaaaaagtctgccaaacaaaacatactttaaacatgtttaagtagatagattatctgaaattctggatttttcactcacttcattgttatgctatggcagccaagtaatccttaacttcacttggagtaagcctcctaaatccagcttcattgcagattccaacttctatgttatcctctgtcatttgcccttcaaagctttcctttagggttaagatggctgtatgaatggcatcttcaagttccagatcttcattatatcttttctcaaggaaagtcttcccattcacatagttctttcccattgctgtagctttccaggcaaagtaagctccacatggatctgactgaaataaatatggtcgtccctcattccaaccacaaataagtaaagaaactccaaatggacgaacaccacctgactgagtatattcttgcatcacagaagctactctctgtaccagctgagctgtangaatggggtgcttgtacacacgatagtattggtgagctagtgttcgagctctgtgcacaagcactctgtaatcggggcacatgccactgtacaccaaacctatatgcttgggtataggntctactgtgggtacacttctgtcatcatacagaatggatttctgttttttcttcattgctaataccacacaatttggagttttattctcagggcgggggctcctcagctcagcaagccaagctattcatcttggcaatttaccaaacggctgaagtag

SEQ ID NO: 267 - DNA, 256 bp, Homo sapiens
tttttttttttcaagttgctgagcttttctgggcatgagttttcttgtattgaaagtgcagataataattacttacctcacagggtcatttggatgaaatgaaatgaagtggtgagagagtgtctggcacagagaaaatgctcaataggcgctgattacctcctatgtctcctgttcccttggtgaccttcctcatgtcaacattagctttggccccacaaattagtgccccttctgtcgtcttctcgcagccgta

SEQ ID NO: 268 - DNA, 730 bp, Homo sapiens
  misc_feature 570: n = A,T,C or G
tgtcaataaaactttaggaatatctgcacatgtacatttacattcaagttgataacactggtggtttcatttcaatacaaattatgctagagaactgacatttcagacatggtcatatatatgctatttgaattcctttatcttgatacagatcttgattgtgaatctcttgatgatagatgtgcagctaatttgtcccgaaactcatgaagataattgtattgcttgatggtctgtattgccccggatcctcttaggtctcgcaggctgtctatggcttgctctggtgatattgtgtcagacaggtatagtaggagacaagcagctacaagacaagatctcccaagtcctccatagcagtgtattaaggtttttcggtaatttttaaggcaggttgtaagctcttccattatttcacagcagctggctatgtcaggagtccctccatctgcgattggatgatgatgggtgataattccacattgctggtagagatccagaaggtttgggactctatattttgacagttcccctctggtgcagaaaacaaatatgtcttgtataccacangctctttagtttcttctgtatctttttggacatttcttctaaccatcttttaatttacaaccctgaaggagcacataaaacccgagaaactgagaaccaattcactcgtgacaaagaatagccatgatatatgaaaatggagctgttcaatctcaatagg

SEQ ID NO: 269 - DNA, 519 bp, Homo sapiens
tttttttttttcggggtctcgttgctgggcgagggcgtggccccgtcctcggccttgggcgaagaagtcgaggaggcggccgacgcggcctctccctccgcggccgtgggcgagccgggctcggcagcctcgccttccgcgggggcctccttctctaccgggctggccccggcctcgggggcagcggcggcggccggctcacctttctcggccgcggagggcgacgccgccccgctcccggcggccgcgggctcctccttgtcggcggccggggcgctgccgttggcctgcagctcctccttggcgcccgactcggcggccgcgggcgaagcgtcgccgtttaccttcacgtggccattctcctgtccgttcgctttggaaggcgacgaggccacagccgcctccccaggcctctccgcggcggcttctcccttcgctgcggtcttggagaactgggcacccatgctggcttcttcaacaaagaaactcaacagatccaagaggggaaacaaagagcct

SEQ ID NO: 270 - DNA, 740 bp, Homo sapiens
  misc_feature 595, 649, 672, 720: n = A,T,C or G
gggggtttaacagtttattaggatttataagtgtcattttaaaaacagtcgatttaaaccatgtagaaataagtatgcaaaaagtctgcaaaacaaaacatactttaaacatgtttaagtagatagattatctgaaattctggatttttcagtcacttcattgttatgctatggcagccaagtaatccttaacttcagttggagtaagcctcctaaatccagcttcattgcagattccaacttctatgttatcctctgtcatttgcccttcaaagctttcctttagggttaagatggctgtatgaatggcatcttcaagttccagatcttcattatatcttttctcaaggaaagtcttcccattcacatagttctttcccattgctgtagctttccaggcaaagtaagctccagatggatctgactgaaataaatatggtcgtccctcattccaaccacaaataagtaaagaaactccaaatggacgaacaccacctgactgagtatattcttgcatcacagaagctactctctgtaccagctgagctgtaggaatgggttcttgggacacaagatagttttgttgagctagttntcgagctctgtgcacaagcactctgttatcggggcccatgccactgtacaccanacctatattgctgggtaattggntctaccttgtgtacacttcggtcatcatacagaaatggattctggttnttctcagttgctaatcccac

SEQ ID NO: 271 - DNA, 611 bp, Homo sapiens
ttttttttccggcttccaaaagctttattggcaaatatgctctataaaagaatgatcaatcctgttgcctctaagtcaatggaatgaagagctgtgtccagggacacaccacgccgtgctgaaggagactgctgttgtgtccacctcttattcatagacccagtcatgagcacaagacttgtagtcaaccagttcttcaggcttaaaccataggctgatttctttttcagcactttttactgaatcactgccatgaatgatgttcctgccaacctgaatgcagaagtccccacgaatggtgcctggctttgaatctgctggattggtctccccaagcatcactcggcctgtcttcaccacgttcagcccctcccagaccatggccacaaccgggcctgagttcatgtacttcaccagcccagggaagaatggtcggtctttcaggtcaatgtagtgctgcttcaggtgttcttcagaggcccggaggaacttcatggccacgaggcggaatcccttctgctcgaagcgcttgatgatctcgcccaccaggccgcgctgcacgccgtccggcttgatggcgatgaaggtgcgctccaggttggccatggtcc

SEQ ID NO: 272 - DNA, 498 bp, Homo sapiens
  misc_feature 440: n = A,T,C or G
ttttttttttttttgccacatgagcaagcttgggtgctcccaaggttcaaatactttttattagacacggccaggcagagaagaccatgggagttcccgaggggccccagctttcaagggcgacgggagagacacaggataaaaggttaaaagtgcagaggcagagtctggggctcaggttgggtctagggtgtcctcaaacaggctgaggaggttccgaggctcaaaggaggggaaggagccccgaggaggctctgagttgatgtcacttaggtccagggcatccctgggtgtgcacctgctccggggggtggaggtgctccccacagtccgggccaggacagcctcaggggagagtgaaggccctaggctgtcgtcatcccacgtgctggagaggctgctgtccaggagcaaactgcagggtggtgagccaggcggtngtggctgctggcccaggggctgtagccagctggcagggtgagccagcccatgccagag

SEQ ID NO: 273 - DNA, 138 bp, Homo sapiens
gagaagacgacagaaggggaggagacactgtgcagatggatgcagaaactggaattttgcctccacaagttaagtaatactaatagctctcggaagctgaaaaaggcaaaaaaaaaaaaaaaaaaaaagtcgtatcga

SEQ ID NO: 274 - DNA, 339 bp, Homo sapiens
ttttttttttttttttttaattgcctcctgatgtttatcaacctacttgcaatatggaagattgaaatataaggcaataggtttcatggcacactccagagatgtttgtgctgtcctccagccttctcataattagtcacttgcgagcagtaactcagaactttttccaatttcacaggtactcatgcctcacaactgcctccccactcccagtaactgagaaatagagtgttcaaaacagtgacaatagaaaggcaaaagacctttaaagaaattccacaaagccccttggcactgatcatatagaagttttgccagaaaaatcaaacatccaacact

SEQ ID NO: 275 - DNA, 118 bp, Homo sapiens
tttttttttggctccttctagtttaatggggttctcagaatgttcaaagtatccacctaacaccccgggcagaaatcctccctttgcagccaggattatgactttacagagggaaaaa

SEQ ID NO: 276 - DNA, 414 bp, Homo sapiens
gtgctgtcgattacgagcgacactgcgattccatgaactcggtctttgggagcgagtccgggggttgcggggactcgagtccggggcctagcgccagtcaggggccgcgagccggcggcggcgcggcggagcaggaggaactgcactacatccccatccgcgtcctgggccgcggcgccttcggggaagccacgctgtaccgccgcaccgaggatgactcactggttgtgtggaaggaagtcgatttgacccggctgtctgagaaggaacgtcgtgatgccttgaatgagatagttattctggcactgctgcagcacgacaactttattgcctactacaatcacttcatggacaataccacgctgctgattgagctggaatattgtaatggaggcggaggtggaaagggcccgg

SEQ ID NO: 277 - DNA, 143 bp, Homo sapiens
gagaagacgacagaagggttaagttgttgcaacagagactatatggctagtgaagtccaacatatttactactggccatttacagaaaaagtctggactgcaaggaagaccaaaaaaaaaaaaaaaaaaaaaagtcgtatcga

SEQ ID NO: 278 - DNA, 243 bp, Homo sapiens
gagaagacgacagaagggtgtaagcacagagaggggaaaataattgttcactgttctggggtggaaagggactgaagatacaatcaagaaaaatgtgcacaaaactcatcaggaaacattggctaactgtattttctgataccgtggagttgtatttcccatgggaagtatttgaggatctactgagtcactgaagctggaactggccgcacaaaaaaaaaaaaaaaaaaaaagtcgtatcga

SEQ ID NO: 279 - DNA, 722 bp, Homo sapiens
ttttttatttcataattctcctttattaggcacaggtaaacatacatactcatggtatccaaaacctagagtatggacctgggattgtggaccccaagtgtccccagaagagtcccacctgggactttccaggtggccacaggacagaccctgcctaatcctgtccctcaaccttggtgctcaggtcagaagccccatggttgacaggcctggaccctcattccagaacagtcttgagttagacaagaactagcctcatagtttggattcttatctctggcccaaatcccaggcttaggcctggaaggagaatctcttaatcaagaggacagagatgctgggaacacagttcccagagatgggatcgggttggagctaagggcatcgggtcctgtcgcagccaggggtgcaggaggatgcctgtggctgtgagccgttcagctggctcccgacgaaggaggcagcgaaccagacagcgggcaggggccgagaggcctgcaggcaaggcgtaggccccgcggcggatcttgccgaagagcaagacaggctccgagtcctggaaggggtagtggccggccagcatggtgaagagcgccacgcccaggctccagacatcgggtggcttgcccgagtatgaagcccgtgagctgagtattctcaggttcacgttaggctgggcacgcgtgctttgtccaaaagggatcattttggcccatcagcaa

SEQ ID NO: 280 - DNA, 358 bp, Homo sapiens
  misc_feature 320, 323: n = A,T,C or G
tatacggctgcgagaagacgacagaagggcaacagtacaggaagttgggtagatgtggggacaacagagagactgtggcagaggcaggactgcagatctatggaaattgcctggaagagtcagctgtaagggatgagaatcctgagggtaaaagagaaaagggaaagactcctctttgatcttatgaagctgaaataacaagatcttaaacatgagtgagaatctgttgccccaacctaaggtgactttaaatccaaggtaaaaaacacggcatgggtattagtttgaatagggaaaatgagaactctctttgagctcanaanaaaaaaaaaaaaaaaaaaaaaagtcgtatcgatgt

SEQ ID NO: 281 - DNA, 885 bp, Homo sapiens
tttttttttttcacggtttcaatggacacttttattgtttacttaatggatcatcaattttgtctcactacctacaaatggaatttcatcttgtttccatgctgagtagtgaaacagtgacaaagctaatcataataacctacatcaaaagagaactaagctaacactgctcactttctttttaacaggcaaaatataaatatatgcactctaaaatgcacaatggtttagtcactaaaaaattcaaatgggatcttgaagaatgtatgcaaatccagggtgcagtgaaaatgagctgagatgctgtgcaactgtttaagggttcctggcactgcatctcttggccactagctgaatcttgacatggaaggttttagctaatgcccaggggaaatgcaaaaaatgctaatttgacttagggcctgtgcacaggaactaaaaggcaggaaagtactaaatattgctgagagcatccaccccaggaaggactttaccttccaggagctccaaactggcaccacccccagtgctcacatggctgactttatcctccgtgttccatttggcacagcaagtggcagtgtctccaccacctatgatggtgatgcagccccctaaaagtggctttcaccacctcatccatgagagctttggttccccgggcaaaagcttcccattcaaatacccccacaggaccattccacacaatctgcttaacccgagtgacagcctcagcatacttcttgctggtttcaggaccacagtccaagccccatcccaccagcaggtatgcaagaaggcccagtgggcttgccagtcttggcatttctcatcaacttgtcagcagtgacaaagtcaaccgggaaggaatcttcacaccatctt

SEQ ID NO: 282 - DNA, 703 bp, Homo sapiens
  misc_feature 387, 476, 535, 625, 659: n = A,T,C or G
atctctgcagtttataatactctacgtatatgaatttaaagcagttaaacaacatttgagattaaattggtaaaaaaaaaattgtaattgaattcagacttcagaaaattgtgaagtaaaaggccatgatggagaaatattaagaatctgtagaattactaaactgtcacagtattattttcctttacaaaagcatctcagtaaaacaaaaactacagaaaacgcaaagtaaaatcagagattttggtttagtactttccctgagtctcttgttttaaaaatcaaagtaaggccagttcaaaattgacccacaggtcttgcctcctccatgctgccatggggagtacatttaagacaagaggctacgcatgttgaggtggtcccagngctttattcaaatgccaatttgcccgtgtcactgccacagggttatctgacccactgctgcatgtgggcttaaagagctgtcaaaattntatcttggcctgctataatataatatgcgagactatataccacaagaagacaaacagtntcacgtattaataaatattacatttctaaatggatctcgacactatatacatcacaatattgtaacataacagaagctacacttttatgnttaaaattcttacataaacacaggttcgcgtcangtcatcttaaactctaatctacatgttacagataaactcaaaaa

SEQ ID NO: 283 - DNA, 510 bp, Homo sapiens
  misc_feature 494: n = A,T,C or G
ttttttgggacttagcttttccttcagaagtttattcttgtaaataaacatcagttttagtttccatttgaaatatttcaagaaaaaagacatatgatgaattagcacatgtataaaggagtcatcgttctccttgtagcccatccccaggatgacctcaggggctctgtaataacgtgtcaccacatatggagtcatcatgaagcttgtgcctgctgtcctggccagtccaaagtccaggattttcaatgtgcaatcagacttgactacaatgttacttggttttaaatccctgtgaataattccagcagaatggaggtgcttaatgccacacaacatttggtacagcaggtaagacattcgctcatggtctaattccatctgaatcacttgacataagttggcatccatcagttccattactaagtaaacatcttggaactcctccagcgtttttctgggtgtgaagacatttaataaactaataatgtttntatggttcacacactt

SEQ ID NO: 284 - DNA, 502 bp, Homo sapiens
ttttttttttcatatctcttgtatgccaaatatttaatataaatctttgaaacaagttcagatgaaataaaaatcaaagtttgcaaaaacgtgaagattaacttaattgtcaaatattcctcattgccccaaatcagtattttttttatttctatgcaaaagtatgccttcaaactgcttaaatgatatatgatatgatacacaaaccagttttcaaatagtaaagccagtcatcttgcaattgtaagaaataggtaaaagattataagacaccttacacacacacacacacacacacacacgtgtgcacgccaatgacaaaaaacaatttggcctctcctaaaataagaacatgaagacccttaattgctgccaggagggaacactgtgtcacccctccctacaatccaggtagtttcctttaatccaatagcaaatctgggcatatttgagaggagtgattctgacagccacgttgaaatcctgtggggaaccattcatg

SEQ ID NO: 285 - DNA, 638 bp, Homo sapiens
  misc_feature 545: n = A,T,C or G
gcaggttagcattttattagataaaaacaggaaggagggtgcctacccacccctgcctgctactggctctgaagggcactcctcaacttccccaagaaagaggacgcgtctctgacactgtgatcatgacaggggttcaaacagaaagtgcctgggccctccttctaagtcttgttaccaaaaaaaggaaaaagaaaagatcttctcagttacaaattctgggaagggagactatacctggctcttgccctaagtgagaggtcttccctcccgcaccaaaaaatagaaaggctttctatttcactggcccaggtagggggaaggagagtaactttgagtctgtgggcctcatttcccaggtgccttcaatgctcatcaaaaccaggcatggggaaggccctggcaaactgctccacccgttgcctgaggttggccagacgctgacttgtttctgagtccttaagcaggaaggatttgaaatcctggagcttggcagtcttgctcttcacctctaagccaatgttgaccccttcatctataaagtncacaactcttcgggaggcattctcaccggactgtcgagaaagtaaaggttgggccccaaagccaaagcccgccgggtgagatgcatttgggtc

SEQ ID NO: 286 - DNA, 660 bp, Homo sapiens
  misc_feature 595, 605, 621: n = A,T,C or G
gcggccgcgcggcttccaggtggcgctgcatgcatggcggggtcaggagcctggtctccacacccgccagctggtctgcggcggggccgccggacggcgctgggcgccctgcggagcacgaggccacgggcggggccagtagtctccacataaagtgcatggaggccgcctccctcctcccacgcccgcccgggaaggctccgcccggggctgcgaagtcaacaagccgcgtgcactgccgggcggccgaggggggagggctgcgcccggtccctgctgtccccctgcccggccctgcagggcgctccggaggtcctggggcgtggtcggcacagaagcatggcggccacctctccgggagggcgggcggaaccggcaggaagactgagggcctggcgcgggcacctggcggggctcctggacacgggctgcaggcggccagcctcactgctgcttgcaggccgacagccggcggatcttgctgctggcggagcaggccttgcgggcagggttgggggcccggcccttcgccctggatttggtgctcagctgcgccgcctctgtgccgttcatacacactgcctttgggaggccncggcgctgtncattgtgactggcctnctctttctggacctgtccgggcaccgtgaagtcctgagt

SEQ ID NO: 287 - DNA, 545 bp, Homo sapiens
  misc_feature 4, 372, 398, 446, 454, 482, 503: n = A,T,C or G
cttngttgggtgcataaacacttcacggaagacatccagacgcgtcagtaccgctccatagaggttttaataggagcggggtacagcacccctgcggacatctggagcacggcgtgtatggcatttgagctggcaacgggagattatttgtttgaaccacattctggggaagactattccagagacgaagaccacatagcccacatcatagagctgctaggcagtattccaaggcactttgctctatctggaaaatattctcgggaattcttcaatcgcagaggagaactgcgacacatcaccaagctgaagccctgggagcctctttgatgtacttgtgggaaaagtatgggctggccccatggaagatgntgcacagttttacagattttcctggntcccgatgtttaggaaatggtttccaggaaaaacggaggcctcagttnggcgaatncttttcggcattcctttggtttgaattntttaggcaaatttttaccccntatttgcatttttgagctaggcaaatttttcccagttacatt

SEQ ID NO: 288 - DNA, 395 bp, Homo sapiens
tttttttttttactgatatctctttaatactttcatcattcaagtttgttcagaacattacaagaggcatgaaagaaaaaataattccatttttaaaactctgtccaaagtataacatatgaaaccatgccattatctcttaggaaacaaaagcattcaaaattaatttggtattaaagttcaagattcaggactaacctcaaagtacgggcatgtgcagtgtttaagtgcaaggaagtattttcattccaattattttacagagatgctgggagtgacgtgtgcaatttggaaatattcaaatcctttaaggtttctggaactaaggtgtttaaatggaaaactggaaatgctggcatggttttcagtggggctttccatttccccgtttggat

SEQ ID NO: 289 - DNA, 284 bp, Homo sapiens
  misc_feature 18, 43, 248, 270, 271: n = A,T,C or G
taaaggagacaattggtntgggctcctactctgagtgcaagcnctgtgtccacaaggccaccaacatggagtatgctgtcaaggtcattgataagagcaagcaggatccttcagaagagattgagattcttctgcggtacggccagcaccccaacatcatcactctgaaagatgtgtatgatgatggcaaacacgtgtacctggtgacagagctgatgcggggtggggagctgctggacaagatcctncggcagaagttcttctcagagnnggaggccagcttt

SEQ ID NO: 290 - DNA, 415 bp, Homo sapiens
  misc_feature 297, 352, 406: n = A,T,C or G
aagtgttatttaaagctcagctggagaaagccggagtggagcatcagctcagaagagaagtagaaatacagtcccaccttcggcatcctaatattcttagactgtatggttatttccatgatgctaccagagtctacctaattctggaatatgcaccacttggaacagtttatagagaacttcagaaactttcaaagtttgatgagcagagaactgctacttatataacagaattggcaaatgccctgtcttactgtcattcgaagagagttattcatagagacattaagccagagnaacttacttcttgggatcagctgggagagctttaaaattgccagattttggggtnggtcagtacatgcttccatctttcccgggggggaccactctctgtggggcaccnggggactac

SEQ ID NO: 291 - DNA, 405 bp, Homo sapiens
  misc_feature 225, 228, 385, 401: n = A,T,C or G
tctctgaaaggagaggaaatcgcctccaggaaccagttccttaatgacgtagataggccgtctttgtgtgtgaactcctatacttttgacattactgggatgattatattgcttgaggattttggcttctagtaaaaattttaatttcagttcctggggaagacgttcttgacgtgttttaacagcaacagcaattttatcctttaatgtgaccttaaatgtggncancaaaattcccttgcctcttgtaacgtggcacctttatgattgagaacccatttcttattctcctaatgggccatactgtgataccatggatggctctttaattgggaacattggacttttttttttttttggcaattttaaacaattgggggtaaantccatataacatcaanttac

SEQ ID NO: 292 - DNA, 336 bp, Homo sapiens
  misc_feature 173, 322: n = A,T,C or G
gattgctgacttcggctggtctgtgcatgcgccctccctgaggaggaagacaatgtgtggcaccctggactacctgcccccagagatgattgaggggcgcatgcacaatgagaaggtggatctgtggtgcattggagtgctttgctatgagctgctggtggggaacccccctnttggagagtgcatcacacaacgagacctatcgccgcatcgtcaaggtggacctaaagttccccgcttctgtgcccacgggagcccaggacctcatctccaaactggctcaggcataacccctcggaacggctgcccctggcccaggttntcagcccacccttg

SEQ ID NO: 293 - DNA, 236 bp, Homo sapiens
  misc_feature 22, 28, 48, 59, 75, 86, 126, 202, 220, 225, 227, 228, 230: n = A,T,C or G
cctgaagaagtattttgacatntgcaanggtgacctcgatcctgagantgtaaagtcantcctcttccagctacnaaaagggctgngattctgtcatagccgcaatgtgctacacagggacctgangccccagaacctgctaataaacaggaatggggagctgaaattggctgattttggcctggctcgagcctttgggatncccgtccgctgttactcngctgngnngntcacac

SEQ ID NO: 294 - DNA, 474 bp, Homo sapiens
  misc_feature 435: n = A,T,C or G
aaacaaagacgagcaggactaaacgaattcattcagaacctagttaggtatccagaactttataaccatccagatgtcagagcattccttcaaatggacagtccaaaacaccagtcagatccatctgaagatgaggatgaaagaagttctcagaagctacactctacctcacagaacatcaacctgggaccgtctggaaatcctcatgccaaaccaactgactttgatttcttaaaagttattggaaaaggcagctttggcaaggttcttcttgcaaaacggaaactggatggaaaattttatgctgtcaaagtgttacagaaaaaaatagttctcaacagaaaagagcaaaaacatattatggctgaacgtaatgtgctcttgaaaaatgtggaacatccgtttttggttggattgcattattccttccaaacnactggaaagctttattttgttctggattttggttatgga

SEQ ID NO: 295 - DNA, 458 bp, Homo sapiens
  misc_feature 1, 317, 423, 435: n = A,T,C or G
ngcgagatcctccgcagctgagtaattctgaggaaagggaattctccccgagtttcatcaactttgtcaacttgtgccttacgaaggatgaatccaaaaggccaaagtataaagagcttctgaaacatccctttattttgatgtatgaagaacgtgccgttgaggtcgcatgctatgtttgtaaaatcctggatcaaatgccagctactcccagctctcccatgtatgtcgattgatatcgctgctacatcagactctagaaaaaagggctgagaggaagcaagacgtaaagaattttcatcccgtatcacagtgtnttttattgctcggcccagacaccatggtgcaataagattgggtgttcggtttccatcatggtctgattataaacttttaaaccttaagggggcaaggaggttttanttacaatgggancccttatttaaaacaaaaggggg

SEQ ID NO: 296 - DNA, 462 bp, Homo sapiens
  misc_feature 375: n = A,T,C or G
accagttagatgatgaagagggacttccagagaagctggttataaaaaaccagcaatttcacaaggaacgagagcagccacccagatttgcacagcctggctcctttgagtatgaatatgccatgcgctggaaggcactcattgagatggagaagcagcagcaggaccaagtggaccgcaacatcaaggaggctcgtgagaagctggagatggagatggaagctgcacgccatgagcaccaggtcatgctaatgagacaggatttgatgaggcgccaagaagaacttcggaggatggaagagctgcacaaccaagaggtgcaaaaacgaaagcaactggagctcaggtaactttttttcgaacactttttccctnaacaactctaaaaggtaatgttttcactcctcttttcctactgccatgctacctcgtgtatttataaatgtgttggcaaatattttt

SEQ ID NO: 297 - DNA, 430 bp, Homo sapiens
  misc_feature 317, 337, 342, 359, 406, 412, 420: n = A,T,C or G
aggaagagatcatgatcataagacattccatgagtgagaaaacagggtgatacaatagaataggtcaattctccatacggaccagcatcaaaatccagagcatttatagagcatatggtagaggaaataggcagattttctggaacaatacagctgaagcttgagaacataaactgaggtgcatggtcgttatcatccaggacactgacaaacacaactgcaaaagaaaaatgtttcttttctgcatctgaagcttggacagttaaggtgaattttgtcattttttcataatccagaggtttaatccaaattaaagnaactccagtgttttcttctnaaggnaaaaatgttcccttctncattttccagagatgatgttgtaggatgatttctgcatgtgaccccntgttcncgggtcantttggctgag

SEQ ID NO: 298 - DNA, 399 bp, Homo sapiens
  misc_feature 346, 382, 387, 392: n = A,T,C or G
acctgtccgagatgaactatgtgcaccgcgacctggctgctcgcaacatccttgtcaacagcaacctggtctgcaaagtctcagactttggcctctcccgcttcctggaggatgacccctccgatcctacctacaccagttccctgggcgggaagatccccatccgctggactgccccagaggccatagctatcggaagttcacttctgctagtgatgtctggagctacggaattgtcatgtgggaggtcatgagctatgggagagcgaccctactgggaacatggagcaaccaggatgttcatcaattgccgtgggagcagggtttaccgggttgccaccacccntgggattgtttcccacaggcatttgcaaccagtttnatgtnggaantgttggg

SEQ ID NO: 299 - DNA, 402 bp, Homo sapiens
  misc_feature 362, 376, 381, 401: n = A,T,C or G
aaatatcttaggtttcattgcttcagacatgacatcaagacactccagtacccagctgtggttaattacacattatcatgaaatgggatcgttgtacgactatcttcagcttactactctggatacagttagctgccttcgaatagtgctgtccatagctagtggtcttgcacatttgcacatagagatatttgggacccaagggaaaccagccattgcccatcgagatttaaagaggcaaaaatattctggttaagaaggaatgggacagtgttgcatagcagatttggggctgggcagtcatgcatttcccagaggcaccaatcagcttgatgtggggggaacattcccctgttggggcnaccaggcgctaacntgggncccccaagttcttgggttgna

SEQ ID NO: 300 - DNA, 492 bp, Homo sapiens
  misc_feature 438, 454, 467, 473, 478: n = A,T,C or G
ttttttttttcaaaagtcttggaggatgaagaattatgactttcaccaccactatagtgttcatataaagttttagcagctttcaaaatggagttaggagaattcagaccaacaagttggcccagaacatatttcatttcttcagtggttcccttggccatttggttaactggatgagtttgaatttgaacatagggatgagccagggagctcagggaatgggatatcctctgttttgggtccctttttaaacaacactttaacacatcttgaagatctttctctgggaatatcggggaaatttcaatttcatggattagggatcaattatgggcatggtaatttagggaaatctggattaattatctggctggaatggggggttttccccgtaaggtcatataggtacaaaatacatcccaggggcccaaacatcantttgggggggcttatncttggactagggnttcccnttctntcggggggggaggg

SEQ ID NO: 301 - DNA, 504 bp, Homo sapiens
  misc_feature 363, 437, 469, 492, 498, 503: n = A,T,C or G
agatgaactatgtgcaccgcgacctggctgctcgcaacatccttgtcaacagcaacctggtctgcaaagtctcagactttggcctctcccgcttcctggaggatgacccctccgatcctacctacaccagttccctgggcgggaagatccccatccgctggactgccccagaggccatagcctatcggaagttcacttctgctagtgatgtctggagctacggaattgtcatgtgggaggtcatgagctatggagagcgaccctactgggacatgagcaaccaggatgtcatcaatgccgtggagcaggattaccggctgccaccacccatggactgtcccacagcactgcaccagttcatgntggacttgctgggtgcgggaccggaacctcaggcccaaatttttcccagatttttaattacctgggacaagttnatccgcaatgttgccagcttcaaggtcatttnccagcgttcagttttggattttnaacagnccttnt

SEQ ID NO: 302 - DNA, 260 bp, Homo sapiens
  misc_feature 89, 91, 108, 183, 188, 246: n = A,T,C or G
gtctccccatcaaatggatgtccccagagtccattaacttccgacgcttcacgacagccagtgacgtctggatgttcgccgtgtgcatntnggagatcctgagctttnggaagcagcccttcttctggctggagaacaaggatttcatcggggtgctggagaaaggagaccggctgcccaagnctganctctgtccaccggtcctttataccctcatgacccgctgctgggactacgaccccagtnaccggccccgcttt

SEQ ID NO: 303 - DNA, 176 bp, Homo sapiens
  misc_feature 125, 128, 132, 134, 137, 140: n = A,T,C or G
attcggaacaggagcgctgcggccccgagcgctcccgctaccacctgcagcagaacgtgcagttctccgaggacacagtgaggctgtacatctgcgagatggcactggctctggactacctgcgnggncagnanatnatncacagagatgtcaagcctgacaacattctcctggat

SEQ ID NO: 304 - DNA, 277 bp, Homo sapiens
  misc_feature 66, 88, 99, 102, 103, 139, 144, 181, 196, 208, 255, 277: n = A,T,C or G
catcaagagcgactcgatcctgctgacccatgatggcagggtgaagctgtcagactttgggttctncgcccaggtgagcaaggaagtnccccgaagaangtnncttgtcggcacgccctactggatggccccagagctnatctnccgccttccctacgggccagaggtagacatctggtcnctggggataatggtnattgagatggtngacggagagcccccctacttcaacgagccacccctcaaagccatgangatgatttcgggacaacctacn

SEQ ID NO: 305 - DNA, 280 bp, Homo sapiens
  misc_feature 137, 159, 194, 231, 253: n = A,T,C or G
ggataatgacataacaccttatcttgtcagtagattttatcgtgctcctgaaatcattataggtaaaagctatgactatggtatagatatgtggtctgtaggttgcaccttatacgaactctatactggaaaaattntattccctggcaaaaccaatanccatatgctgaagcttgcaatggatctcaaagganagatgccaaataagatgattcgaaaaggtgtgttcanagatcagcattttgatcaaaanctcaacttcatgtacatagaagttgat

SEQ ID NO: 306 - DNA, 215 bp, Homo sapiens
gagaaaatagcacctcacttccagaaagctttaagacaaaagctggagtcccaaataaaccaggcattcccaaattactagaagggagtaaaaattcaatacagtgggagaaagctgaagataatggatgtagaattacatactatatccttgagataagggactgaaaacacaccgtcgatgaaaaccagccactgatgaacagcctcagacct

SEQ ID NO: 307 - DNA, 592 bp, Homo sapiens
  misc_feature 586: n = A,T,C or G
ctctgctatgggggtgatggccagtcctggtgtctgagtgattcccagggcccagcaaagggaccaagtttccagagccctgaagacaaggggtaacaccccaaaatatggactcattttccactccaccttcattggccgagcagctgccaagaacaaaggccgcatctcccgatacctggcaaacaaatgcagtattgcctcacgaatcgattgcttctctgaggtgcccacgagtgtattcggggagaagcttcgagaacaagttgaagagcgactgtccttctatgagactggagagataccacgaaagaatctggatgtcatgaaggaagcaatggttcaggcagaggaaagcggctgctgagattactaggaagctggagaaacaggagaagaaacgcttaaagaaggaaaagaaacggctggctgcacttgccctcgcgtcttcagaaacagcagtagtactccagaggagttgttgaggaagacgagtgaaaaaacccaaaaagaagaaaaagcaaaagcccccaagaagttcctcaggagaattggaattgggaagacccatctatctctttttccnaaacca

SEQ ID NO: 308 - DNA, 465 bp, Homo sapiens
  misc_feature 248: n = A,T,C or G
gcgacattgaagagttcctcagggaagcagcttgcatgaaggagtttgaccatccacacgtggccaaacttgttggggtaagcctccggagcagggctaaaggccgtctccccatccccatggtcatcttgcccttcatgaagcatggggacctgcatgccttcctgctcgcctcccaggattggggagaacccctttaacctacccctccagaccctgatccggttcatggtggacattgcctgcgnatcggagtacctgagctctcggaacttcatccaccgagacctggctgctcggaattgcaatgctggcaagaggacatgacagtgtgtgtggctgacttcggactctcccggaagatctacagtggggactactatcgtcaaggctgtgcttccaaactgcctgtcaagtggctggcctggagagcctggccgacaacctgtatactgtgcagagtga

SEQ ID NO: 309 - DNA, 467 bp, Homo sapiens
cttaattttaatttttttaaggtgagaggtggatcatctattatgatttcacgttgttagaaagaaaaataataataaatgcaactcccagcagagcccattcttccccctctcctccagcagatgctgtttttctttccagtcactgttgttctaaagtctcatcggaacctccaccaagaagacgtggcgattcatcttcttgttttcctttctcgccttggctcagagcaggccagagcagcctgacagaggggccacaaggctcggtgaacccctgcccctcccagcaacttggtcgggaggcagaccgattcttctcctctcctcgatgtccctcacaggggaggggagggagctggggctgggggttgctaattgagttactggccctggctctaggacagggctggggatgctgtgtcagggatcacagagtgatgctaatggcaggagtaggggagaga

SEQ ID NO: 310 - DNA, 300 bp, Homo sapiens; identical to SEQ ID NO: 138

SEQ ID NO: 311 - DNA, 528 bp, Homo sapiens
ggcacgaggctattttaacactggtggggggcagcgaggatggacagattcctggtgaaaggggctcaagggggccttttgaggaagcaggaggagcaagagccaactggagaagagccagctgtgttgggaggagacaaagaaagcacaaggaagaggcccaggagagaggccccagggaatggaggccactcagcaggccctagctggcggcacattcgggctgagggcctggactgcagttacacagtcctgtttggcaaagctgaggcagatgagattttccaagagttggagaaagaagtagaatattttacaggagcactggccagagtccaggtattcgggaagtggcacagtgtgcccaggaagcaggcaacgtatggcgacgctgggctgacctacacattttcaggcctcacgctgtctccaaagccctggatcccagttctagagcgcatccgggatcacgtctctggggtgactggacagaccttcaactttgtgctcatcaacaggtataaagat

SEQ ID NO: 312 - DNA, 854 bp, Homo sapiens
gggattccgatctgcgccggagctgcgatgctagagcactcttgccacccccaccccacggacgtgttgcagtgatatcagaattttgcgtgcggtttacccgtgtttaacctctttgcgtctcgcttctgaatcgtatccacttgagcatcactagactgatctattttaacactggtggggggcagcgaggacatggttttaaactttaaaatgaaaatgtgaaactaggaatgttgctgtgagaccccttggacaaacagatttttgcactggggatagaacttgagcaatttctgtcttggcctcgccactgacgtcccttctttcctgtggggacaggatggacagattcctggtgaaaggggctcaagggggccttttgaggaagcaggaggagcaagagccaactggagaagagccagctgtgttgggaggagacaaagaaagcacaaggaagaggcccaggagagaggccccagggaatggaggccactcagcaggccctagctggcggcattcgggctgagggcctggactgcagttacacagtcctgtttggcaaagctgaggcagatgagattttccaagaagtcggcgaaacgaagtagaatattttacaggagcactggccagagtccaggtattcgggaagtggcacagtgtgcccaggaagcaggcaccgtatggcggacgctgggctgacctacacattttcaggcctcacgctgtctcccaaggcctggatcccagttctagagcgcctccgggttcccgtctctggggtgactgggcgactttcatttgtgctcctcccggttttcggctgggtgtggcccctctcggggccccgt

SEQ ID NO: 313 - DNA, 499 bp, Homo sapiens
gggtgactgcgggattccgatctgcgccggagctgcgatgctagagcactcttgccacccccaccccacggacgtgttgcagtgatatcagaattttgcgtgcggtttacccgtgtttaacctctttgcgtctcgcttctgaatcgtatccacttgagcatcactagactgatctattttaacactggtggggggcagcgaggacatggttttaaactttaaaatgaaaatgtgaaactaggaatgttgctgtgagaccccttggacaaacagatttttgcactggggatagaacttgagcaatttctgtcttggcctcgccactgacgtcccttctttcctgtggggacaggatggacagattcctggtgaaaggggctcaagggggccttttgaggaagcaggaggagcaagagccaactggagaagagccagctgtgttgggaggagacaaagaaagcacaaggaagaggcccaggagagaggccccagggaatgg

SEQ ID NO: 314 - DNA, 742 bp, Homo sapiens
  misc_feature 250: n = A,T,C or G
ggattccgatctgcgccggagctgcgatgctagagcactcttgccacccccaccccacggacgtgttgcagtgatatcagaattttgcgtgcggtttacccgtgtttaacctctttgcgtctcgcttctgaatcgtatccacttgagcatcactagactgatctattttaacactggtggggggcagcgaggacatggttttaaactttaaaatgaaaatgtgaaactaggaatgttgctgtgagacccnctggacaaacagatttttgcactggggatagaacttgagcaatttctgtcttggcctcgccactgacgtcccttctttcctgtggggacaggatggacagattcctggtgaaaggggctcaagggggccttttgaggaagcaggaggagcaagagccaactggagaagagccagctgtgttgggaggagacaaagaaagcacaaggaagaggcccaggagagaggccccaggaatggaggccactcagcaggccctagctggcggcattcgggctgagggcctggactgcagttacacagtcctgtttggcaaagctgaggcagatgagattttccaagagtcggcgacacgaagtcgaatattctacaggggcactggcagagtccggtatcggggagtggccgtgtggccggagcgcacgttgggacgctggtggctaacctttcgggcccggggccaggccggtcccgttagggccggccgccgggggg

SEQ ID NO: 315 - DNA, 429 bp, Homo sapiens
  misc_feature 145, 311, 337: n = A,T,C or G
aggccaccagggtgactgcgggattccgatctcgcgccggagctgcgatgctagagcactcttgccacccccaccccacggacgtgttgcagtgatatcagaattttgcgtgcggtttacccgtgtttaacctctttgcgtctcncttctgaatcgtatccacttgagcatcactagactcgatctattttaacactggtggggggcagcgaggacatggttttaaactttaaaatgaaaatgtgaaactaggaatgttgctgtgagaccccttggacaaacagatttttgcactggggatagaacttgangcaatttctgtcttggcctcgcactngacgtcccttctttcctgtggggacaggatggacagattcctggtgaaaggggctcaagggggccttttgaggaagcaggaggagcaagaag

SEQ ID NO: 316 - DNA, 338 bp, Homo sapiens
gcgaggccaccagggtgactgcgggattccgatctgcgccggagctgcgatgctagagcactcttgccacccccaccccacggacgtgttgcagtgatatcagaattttgcgtgcggtttacccgtgtttaacctctttgcgtctcgcttctgaatcgtatccacttgagcatcactagactgatctattttaacactggtggggggcagcgaggatggacagattcctggtgaaaggggctcaagggggccttttgaggaagcaggaggagcaagagccaactggagaagagccagctgtgttgggaggagacaaagaaagcacaaggaagaggccc

SEQ ID NO: 317 - DNA, 300 bp, Homo sapiens
aattccgttgctgtcggtctttcccaccacgaggccaccagggtgactgcgggattccgatctgcgccggagctgcgatgctagagcactcttgccacccccaccccacggacgtgttgcagtgatatcagaattttgcgtgcggtttacccgtgtttaacctctttgcgtctcgcttctgaatcgtatccacttgagcatcactagactgatctattttaacactggtggggggcagcgaggatggacagattcctggtgaaaggggctcaagggggccttttgaggaagcaggaggag

SEQ ID NO: 318 - DNA, 407 bp, Homo sapiens
gaacttgagcaatttctgtcttggcctcgccactgacgtcccttctttcctgtggggacaggatggacagattcctggtgaaaggggctcaagggggccttttgaggaagcaggaggagcaagagccaactggagaagagccagctgtgttgggaggagacaaagaaagcacaaggaagaggcccaggagagaggccccagggaatggaggccactcagcaggccctagctggcggcacattcgggctgagggcctggactgcagttacacagtcctgtttggcaaagctgaggcagatgagattttccaagagttggagaaagaagtagaatattttacaggagcactggccagagtccaggtattcgggaagtggcacagtgtgcccaggaagcaggcaacgtat

SEQ ID NO: 319 - DNA, 859 bp, Homo sapiens
  misc_feature 10, 22, 49, 71, 89, 130, 715, 776, 777, 811, 824, 828, 843: n = A,T,C or G
tccggccttnacggccggggtncgctggggcgcgtctttcccaccacgnagccaccagggtgactgcgggnattccgatctgcgccggnactgcgatgctagagcactcttgccacccccaccccacggnacgtgttgcagtgatatcagaattttgcgtgcggtttacccgtgtttaacctctttgcgtctcgcttctgaatcgtatccacttgagcatcactagactgatctattttaacactggtggggggcagcgaggacatggttttaaactttaaaatgaaaatgtgaaactaggaatgttgctgtgagaccccttggacaaacagatttttgcactggggatagaacttgagccatttctgtcttggcctcgccactgacgtcccttctttcctgtggggacaggatggacagattcctggtgaaaggggctctagggggccttttgaggaagcaggaggagcaagagccaactggagaagagccagctgtgttgggaggagacaaagaaagcacaaggaagaggcccaggagagaggccccagggaatggaggccactcagcaggccctagctggcggcacattcgggctgagggcctggactgcagttacacagtcctgtttggcaaagctgaggcagatgagattttcaagagttggagaaagaagtagatattttacaggagcactggccaagtccagtattcnggaagtggcacagtgtgccaggagcagcacgtatggcgacgctggctgactacacattttnngcctcacgctgctccaagcctggatccagtctanacctccggatacntttnggggactgacgactnacttggctatacagtt

SEQ ID NO: 320 - DNA, 836 bp, Homo sapiens
  misc_feature 10, 22: n = A,T,C or G
tccggccttnacggccggggtncgctggggcgcgtctttcccaccacgagccaccagggtgactgcgggattccgatctgcgccggagctgcgatgctagagcactcttgccacccccaccccacggacgtgttgcagtgatatcagaattttgcgtgcggtttacccgtgtttaacctctttgcgtctcgcttctgaatcgtatccacttgagcatcactagactgatctattttaacactggtggggggcagcgaggacatggttttaaactttaaaatgaaaatgtgaaactaggaatgttgctgtgagaccccttggacaaacagatttttgcactggggatagaacttgagcaatttctgtcttggcctcgccactgacgtcccttctttcctgtggggacaggatggacagattcctggtgaaaggggctcaagggggccttttgaggaagcaggaggagcaagagccaactggagaagagccagctgtgttgggaggagacaaagaaagcacaaggaagaggcccaggagagaggccccagggaatggaggccactcagcaggccctagctggcggcacattcgggctgagggcctggactgcagttacacagtcctgtttggcaaagctgaggcagatgagattttccaagagttggagaaagaagtagaatattttacaggagcactggccagagtccaggtattcgggaagtggcacagtgtgcccaggaagcaggcaacgtatggcgacgctgggctgacctacacattttcaggcctcacgctgtctccaaagccctggatcccagttctagagcgcctccggg

SEQ ID NO: 321 - DNA, 1247 bp, Homo sapiens
ctctctctctctctctctctctctctctctctctctctctctccccgcccgggtgactgcgggattccgatctgcgccggagctgcgatgctagagcactcttgccacccccaccccacggacgtgttgcagtgatatcagaattttgcgtgcggtttacccgtgtttaacctctttgcgtctcgcttctgaatcgtatccacttgagcatcactagactgatctattttaacactggtggggggcagcgaggacatggttttaaactttaaaatgaaaatgtgaaactaggaatgttgctgtgagaccccttggacaaacagatttttgcactggggatagaacttgagcaatttctgtcttggcctcgccactgacgtcccttctttcctgtggggacaggatggacagattcctggtgaaaggggctcaagggggccttttgaggaagcaggaggagcaagagccaactggagaagagccagctgtgttgggaggagacaaagaaagcacaaggaagaggcccaggagagaggccccagggaatggaggccactcagcaggccctagctggcggcacattcgggctgagggcctggactgcagttacacagtcctgtttggcaaagctgaggcagatgagattttccaagagttggagaaagaagtagaatattttacaggagcactggccagagtccaggtattcgggaagtggcacagtgtgcccaggaagcaggcaacgtatggcgacgctgggctgacctacacattttcaggcctcacgctgtctccaaagccctggatcccagttctagagcgcatccgggatcacgtctctggggtgactggacagaccttcaactttgtgctcatcaacaggtataaagatggctgtgaccacatcggggagcaccgagatgatgaaagagaactggcccctgggagccccattgcctctgtctccttcggtgcctgcagagactttgtcttccggcataaggattcccgtgggaaaagcccctccaggagggtggcggtggtcaggctgccgctggcccacgggagcttactaatgatgaaccacccgaccaacacgcactggtaccacagtcttcccgtgagaaagaaggttctggctccacgggtgaatctgacttttcgtaaaattttgcttactaaaaaataaaaacatttttaacagttaaaaaaaaaaaaaaaaaaaaaaaaaaaaaaaaaaaaaaaaa

SEQ ID NO: 322 - DNA, 443 bp, Homo sapiens
attgacagcagacttgcagaattacatagagaattaggaacccccaaatttcatgtcaattgatctattccccctctttgtttcttggggcatttttccttttttttttttttggtttttttttacccccccttaactttttgcccccaaaaaccaaattaaaccccccccccttttaaaagggggggggggaaaaaaacaaaaacccccaaaccccccctggaaaacccccatttcttcccccccccttttatccccccgaagggatttttttttttatttgccccttgtccttgggttaaattaaggggggacccctctggggggccctggcccattaacccccttggaaaaatcaaagggggggggaaaaagcccttttcccgcctggtttttggggaaaaggggttgcccccaaaaatccttaaggccaaagggggggt

SEQ ID NO: 323 - DNA, 433 bp, Homo sapiens
cggcacgagctttctgtttctctccgtgctgttctctcccgctgtgcgcctgcccgcctctcgctgtcctctctccccctcgccctctcttcggccccccctttcacgttcactctgtctctcccactatctctgcccccctctatccttgatacaacagctgacctcatttcccgataccttttcccccccgaaaagtacaacatctggcccgccccagcccgaagacagcccgtcctccctggacaatcagacgaattctccccccccccccaaaaaaaagccatccccccgctctgccccgtcgcacattcggcccccgcaactcggccaaagcggcgctggcaaaggagtgtccggcaggagggccaacgcccgctgttcggtttgcaacacgcaccagggaggggggcggaagcgtccccggcttcca

SEQ ID NO: 324 - DNA, 120 bp, Homo sapiens
tcactctgaagtgttatcagcaaaaaaaattcagtagattatctttaaaagaaaactgtaaaaatagcaaccacttatggcactgtaaaaaaaaaaaaaaaaaaaaaaaaaaattggggg

SEQ ID NO: 325 - DNA, 508 bp, Homo sapiens
cggggtctcgttgctgggcgagggcgtggccccgtcctcggccttgggcgaagaagtcgaggaggcggccgacgcggcctctccctccgcggccgtgggcgagccgggctcggcagcctcgccttccgcgggggcctccttctctaccgggctggccccggcctcgggggcagcggcggcggccggctcacctttctcggccgcggagggcgacgccgccccgctcccggcggccgcgggctcctccttgtcggcggccggggcgctgccgttggcctgcagctcctccttggcgcccgactcggcggccgcgggcgaagcgtcgccgtttaccttcacgtggccattctcctgtccgttcgctttggaaggcgacgaggccacagccgcctccccaggcctctccgcggcggcttctcccttcgctgcggtcttggagaactgggcacccatgctggcttcttcaacaaagaaactcaacagatccaagaggggaaacaaagagcct

SEQ ID NO: 326 - DNA, 597 bp, Homo sapiens
  misc_feature 467: n = A,T,C or G
agagctgccaggtctgcccatcgaccaggttgcttgggccccggagccccgggtctggtgatgccatagcagccaccaccgcggcgcctagggctgcggcagggactcggcctctgggaggtttacctcgcccccacttgtgcccccagctcagcccccctgcacgcagcccgactagcagtctagaggcctgaggcttctgggtcctggtgacggggctggcatgaccccgggggtcgtccatgccagtccgcctcagtcgcagagggtccctcggcaagcgccctgtgagtgggccattcggaacattggacagaagcccaaagagccaaattgtcacaattgtggaacccacattggcctgagatccaaaacgcttcgaggcaccccaaattacctgcccattcgtcaggacacccacccacccagtgttatattctgcctcgccggagtggggtgttcccggnggcacttgccgaccagccccttgcgtccccaggtttgcagctctcccctgggccactaaccatcctggcccgggctgcctgtctgacctccgtgcctagtcgtggctctccatcttgtctcctccccgtg

SEQ ID NO: 327 - DNA, 762 bp, Homo sapiens
gagactgcatagggctcggcgtgggggtcttcaggtgatggcagaggaggggaccaagagggggcccccactgaagacattggggacacggggaggagacaagatggagagccacgactaggcacggaggtcagacaggcagcccgggccaggatggttagtggcccaggggagagctgcaaacctggggacgcaaggggctggtcggcaagtgcccccgggaacacccactccggcgaggcagaatataacactgggtgggtgggtgtcctgacgaatgggcaggtaatttggggtgcctcgaagcgttttggatctcaggccaatgtgggttccacaattgtgacaatttggctctttgggcttctgtccaatgttccgaatggcccactcacagggcgcttgccgagggaccctctgcgactgaggcggactggcatggacgacccccgggtcatgccagccccgtcaccaggacccagaagcctcaggcctctagactgctagtcgggctgcatgcaggggggctgagctgggggcacaagtgggggcgaggtaaacctcccagaggccgagtccctgccgcagccctaggcgccgcggtggttggctgctatggcatcaccagacccgtgggcttccggggccaagccaacctggtcgatgggcagacctggcagctcttctgctctgtgggcttagaacccgcctgaacttcctaattgccccggctcaccccaaccttgtccccaagaggttccc

SEQ ID NO: 328 - DNA, 388 bp, Homo sapiens
ccaaaccccagcgccacccaatattcccctgaacagtactggccatgtgctccttaaagctaaaattaaaaacaaacaaaaaacagaaagaaaaaagtatccccaggtagctatgttgtaattttatttcatgacagcaccatcttctctttgcctgcgcctgggcctcctagtgtgctgcttacgtgatgcccacgtgccacagagttattgcccgaagtgccagtgggctgtgcaggggatgggctcttccttccagatggactgcaacctctgggaccacgcacccaccatcccctttctttcttcttcggatgcaatttcaggagcaaagctgatctgaggggcaaggactttaaatccacagaagtgtaatgtgccatgctaa

SEQ ID NO: 329 - DNA, 105 bp, Homo sapiens
cccgggtcgacccacgcgtccggaccaagtgctctgccagggctgtagccaggcagggccctaacccagggctcctggacccaggctttaccataccacgggccc

SEQ ID NO: 330 - DNA, 479 bp, Homo sapiens
cttgcgagtggagtgtccgctgtgcccgggcctgcaccatgagcgtcccggccttcatcgacatcagtgaagaagatcaggctgctgagcttcgtgcttatctgaaatctaaaggagctgagatttcagaagataactcggaaggtggacttcatgttgatttagctcaaattattgaagcctgtgatgtgtgtctgaaggaggatgataaagatgttgaaagtgtgatgaacagtgtggtatccctactcttgatcctggaaccagacaagcaagaagctttgattgaaagcctatgtgaaaagctggtcaaatttcgcgaaggtgaacgcccgtctctgagactgcagttgttaagcaaccttttccacgggatggataagaatactcctgtaagatacacagtgtattacagccttattaaagtggcagcatcttgtggggccatccagtacatcccaactgagctggatcaagtt

SEQ ID NO: 331 - DNA, 338 bp, Homo sapiens
ttgggtgagaacctgactgatgaggagctgcaggaaatgattgatgaagctgatcgagatggagatggagaggtcagtgagcaagagttcctgcgcatcatgaaaaagaccagcctctattaagatcagtgtcttctttttctactgcaagcacatgtaactagatttagtgcctgccatggtgtgaaatctggcttttgagaacacaaacttttcccccacggacctccctttatcactttaatagtgaccttgagcctattttagccgtttggaagtgttctttgatattacagttctttgtaaaatgacctgcgaattaccctaattctcaaaag

SEQ ID NO: 332 - DNA, 298 bp, Homo sapiens
ccagtagcatcgtttttccacttattctttcgagtcagtgcaatcatcgtctatcttctctgtgagttgctcagcagcagctttattacctgtatggtgacaattatcttgttgttggggggtgacttttgggcagtgaagaatgtcacaggtagactaatggttggcctacgttggtggaatcacattgatgaagatggaaagagcccttgggtgtttgaatctagaaaggagtcctctcaagagaataaaactgtgtcagaggctgaatcaagaatcttttggttgggacttattg

SEQ ID NO: 333 - DNA, 430 bp, Homo sapiens
ttcggcacgagggccccatcgtccacgtgcccatgagcctcatcatccagatgccagagctccgggagaatcccttcaaagaaaggatcgtggcggcgttttccgaggatggtgaggggaacctcactttcaacgactttgtggacatgttttccgtgctctgcgagtcggctccccgagagctcaaggcaaactatgccttcaagatctatgacttcaacactgacaacttcatctgcaaggaggacctggagctgacgctggcccggctcactaagtcagagctggatgaggaggaggtggtgcttgtgtgcgacaaggtcattgaggaggctgacttggatggtgacggcaagctgggctttgctgacttcgaggacatgattgccaaggcccctgacttcctcagcactttccacatccggatctg

SEQ ID NO: 334 - DNA, 457 bp, Homo sapiens
gaagaaaaccagcaacggccgcctgcctgtgaagtggatggcgcccgaggccttgtttgaccgggtgtacacacaccatagtgacgtgtggtcttttgggatcctgctatgggagatcttcaccctcgggggctccccgtatcctggcatcccggtggaggagctgttctcgctgctgcgggagggacatcggatggaccgacccccacactgccccccagagctgtacgggctgatgcgtgagtgctggcacgcagcgccctcccagaggcctaccttcaagcagctggtggaggcgctggacaaggtcctgctggccgtctctgatgagtacctcgacctccgtctgaccttcagaccctattccccctctggtggggacgccagcagcacctgctcctccagcgattatgtcttcagccacgaccccctgccattgggatccagctccttcccc

SEQ ID NO: 335 - DNA, 248 bp, Homo sapiens
tgttcaaaatgcatgcgagtggggacagcttcttcctaagtgaggaaaatacaggtcatgaagttcctggcaggattttctgttaaaaacctatgctggtttgctttggatcacacccgggaaaccccgggtgctaagaatgaaaataaccttggtgagttgtacaaattaaagacaaagaactacatgtgaagatagacttgctttctatttttaaatcagtagtagtactgctgctgaataatact

SEQ ID NO: 336 - DNA, 558 bp, Homo sapiens
ccaagaattcggcacgaggggcgcatggggcatcgtactctagcctccactcctgccctgtgggcctccatcccgtgccctcgctctgagctgcgcctggacctggttctgccttctggacaatctttccggtggagggagcaaagtcctgcacactggagtggtgtactagcggatcaagtatggacactgactcagactgaggagcagctccactgcactgtgtaccgaggagacaagagccaggctagcaggcccacaccagacgagctggaggccgtgcgcaagtacttccagctagatgttaccctggctcaactgtatcaccactggggttccgtggactcccacttccaagaggtggctcagaaattccaaggtgtgcgactgctgcgacaagaccccatcgaatgccttttctcttttatctgttcctccaacaacaacatcgcccgcatcactggcatggtggagcggctgtgccaggcttttggacctcggctcatccagcttgatgatgtcacctaccatggcttccccagcctgcaggccctggct

SEQ ID NO: 337 - DNA, 614 bp, Homo sapiens
  misc_feature 555, 569: n = A,T,C or G
cttttttttttttttttttgatctgctcgtagtcaacgcgcattgtggccaaggcactggtcatctcctccttgacatcctcccaccgctccttgtcctccttcaggacccggctggtgtgcagtggggtttgagggacctttgttgattgcatgatccaagggtggttcataaactcggtgatggtcattctctgggtgggctctgttttcagcagattccgaatgagcatcttcacttcctctgatacttctgaccattctgggttgggaaattcatactggcccattcggatgcgagtcttcatgcccggagagatggcaaggcgtggttggagtagaaggggggatacccacacagcaggatgtacatgatgacacccagggaccacatgtcacaggacttgtcatacttctctggacccagcacttctggagccacatagtacggtgtataacaaggagtggtcaaagagttgtggctggtggtttccttggcaaagcaaaagtcagtgagtttcaggatggcgtgggcccttttggaagtgtataaganatctcaggcttganatcccgatgggcaatgttgattgaatgcagataactggaatggcc

SEQ ID NO: 338 - DNA, 503 bp, Homo sapiens
ccggtaaccgggccctttccagctgcggctccattacaatattccagctcaatcagcagcgtggtattgtccatgaagtgattgtagtaggcaataaagttgtcgtgctgcagcagtgccagaataactatctcattcaaggcatcacgacgttccttctcagacagccgggtcaaatcgacttccttccacacaaccagtgagtcatcctcggtgcggcggtacagcgtggcttccccgaaggcgccgcggcccaggacgcggatggggatgtagtgcagttcctcctgctccgccgcgccgccgccggctcgcggcccctgactggcgctaggccccggactcgagtccccgcaacccccggactcgctcccaaagtccgagttgatggaatcgcagtgtcgctcgtactcgcccagcaccgacatggcggcggccgcaagcttattccctttagtgagggttaattttagcttggcactggccgtcgttttacaacgtcg

SEQ ID NO: 339 - DNA, 513 bp, Homo sapiens
ggacaccatgaatcacactgtccaaaccttcttctctcctgtcaacagtggccagccccccaactatgagatgctcaaggaggagcacgaggtggctgtgctgggggcgccccacaaccctgctcccccgacgtccaccgtgatccacatccgcagcgagacctccgtgcccgaccatgtcgtctggtccctgttcaacaccctcttcatgaacccctgctgcctgggcttcatagcattcgcctactccgtgaagtctagggacaggaagatggttggcgacgtgaccggggcccaggcctatgcctccaccgccaagtgcctgaacatctgggccctgattctgggcatcctcatgaccattctgctcatcgtcatcccagtgctgatcttccaggcctatggatagatcaggaggcatcactgaggccaggagctctgcccatgacctgtatcccacgtactccaacttccattcctcgccctgcccccggagccgagtcctgtatcagc

SEQ ID NO: 340 - DNA, 315 bp, Homo sapiens
gaaggggaacccgaccaccgctggtcttcgctggacaccatgaatcacactgtccaaaccttcttctctcctgtcaacagtggccagccccccaactatgagatgctcaaggaggagcacgaggtggctgtgctgggggcagccccacaaccctgctcccccgacgtccaccgtgatccacatccgcagcgagacctccgtgcccgaccatgtcgtctggtccctgttcaacaccctcttcatgaacccctgctgcctgggcttcatagcattcgcctacttcgagaagtctagggacaggaagatggttggcga

SEQ ID NO: 341 - DNA, 290 bp, Homo sapiens
gccaacacgtttgaactgaaatacgacttgtcatgtgaactgtaccgaatgtctacgtattccacttttcctgctggggttcctgtctcaaaaaggagtcttgctcgtgctggtttctattacactggtgtgaatgacaaggtcaaatgcttctgttgtggcctgatgctggataactggaaaagaggagacagtcctactgaaaagcataaaaagttgtctcctagctgcagattcgttcagagtctaaattccgttaacaacttggaagctacctctcagcctacttt

SEQ ID NO: 342 - DNA, 426 bp, Homo sapiens
  misc_feature 222, 263, 339: n = A,T,C or G
tcgactggaccagctgcgggcagagagtgcttcggggaaccaggtgtcggacatggctcaactcttctactactttgccttggaaggtacccttgctgggagaggggctggggaagggaatgggtcagggagaggttgtgctccctctcctcaagggctcctggattccatatgtcctggggtctgcctcctgtgatggcctctgtgcactactcagctatntgctacatcctgttcgagaaacgcattggctgcctgcacgnatccatccccgaggacaccgtgaccttcgtcagatccatcgggttaatgttccagaactcactctatgccaccttncttgcccaagtgggactcgccccgtggcttgcctttttgggaaggcgatgacctgggatggttgggaattgccatcttttgcctttt

SEQ ID NO: 343 - DNA, 457 bp, Homo sapiens
ttttgcccgtacccgtctagcatctgatgtgggtaaagctggagctgaaagggaattccgaggcctaggtgactgcctggttaagatctacatatctgatgggattaagggcctgtaccaaggctttaacgtgtctgtgcacggtattatcatgtaccgagccgcctacttcagtatctatgacactgcacagggaatgcttccggatcccaagaacactcacatcgtcatcagctggatgatcgcacagactgtcactgctgctgccgggttgacttcctattcatttgacactgctcgccgccgcatgatgatgcagtcacggcgcaaaggaactgacatcatgtacacaggcacgcttgactgctggcggaagattgctcgtgatgaatgaggcaaaggtcttttcaagggtgcatggtccaatgttctcagaggcatgggtggtgctttcgtg

SEQ ID NO: 344 - DNA, 463 bp, Homo sapiens
cctgcccttgtggcccatttgtgcctgggcagatgtttctggccagcagacactgaaggcctttttgctgtgacagtatttatggcactgaagaggataaagaagcttgagccctctttctgactcccactttatggggcagagagagctttttttctacatagcacattgcagtctcaccgctatcagaaaaatatcctgttcatggtttatactgaatttgcaaactactgatatgatttttcaataaccacttgtatcttccatcatccatgagaggtgggaagaggtacactgtatctctgcaataaaactttggccaggttctacctcctctgagcaaaggatacttttctatgtaggtgtagatggttctcctttactaatctgacatggtgcatctggagacaacatctgatgggatccaaagacaacttgaaacaaaggtggatgtcagctcttg

SEQ ID NO: 345 - DNA, 300 bp, Homo sapiens
acttcccaagatccagatgactgaatttcagatagcatttttatgattcccaactcattgaaggtcttatttatataattttttccaagccaaggagaccattggccatccaggaaatttcgtacagctgaaatataggcaggatgttcaacatcagtttacttgcagctggaagcatttgtttttgaagttgtacatagtaataatatgtcattgtacatgttgaaaggtttctatggtactaaaagtttgttttattttatcaaacattaagcttttttaagaaaataattgggcagt

SEQ ID NO: 346 - DNA, 465 bp, Homo sapiens
ggcacgagcctagtcccagagtcctggagcggcatactgggggtggctgtgcagtcccagcatccccaacccagcatgtatagagagcatccatccttacatccagctgacccatgcccatgctcctccctgtggctggaggttcaacaataacataagtctcttctttgccctccagatatttctccctcgagtggctgggaaacttggcaagagaccagaggacccaaatgcagacccttcaagtgaggccaaggcaatggctgtgccctatcttctgagaagaaagttcagtaattccctgaaaagtcaaggtaaagatgatgattcttttgatcggaaatcagtgtaccgaggctcgctgacacagagaaaccccaacgcgaggaaaggaatggccagccacaccttcgcgaaacctgtggtggcccaccagtcctaacgggacaggacagagagacagag

SEQ ID NO: 347 - DNA, 476 bp, Homo sapiens
ggcacgagaaacactgagatgtatcatgaaattatgcgtgcacttaaagctgccagcaaggatgactcaatcatcactgttttaacaggaaatggtgactattacagtagtgggaatgatctgactaacttcactgatattccccctggtggagtagaggagaaagctaaaaataatgccgttttactgagggaatttgtgggctgttttatagattttcctaagcctctgattgcagtggtcaatggtccagctgtgggcatctccgtcaccctccttgggctattcgatgccgtgtatgcatctgacagggcaacatttcatacaccatttagtcacctaggccaaagtccggaaggatgctcctcttacacttttccgaagataatgagcccagccaaggcaacagagatgcttatttttggaaagaagttaacagcgggagaggcatgtgctcaaggacttgttactgaagt

SEQ ID NO: 348 - DNA, 612 bp, Homo sapiens
aagtggtaggattattgactgtgcttttactgtcacttttaatcccaaatatgatacgttattaaaagctgtaaaagatgctactaacactggaataaagtgtgctggaattgatgttcgtctgtgtgatgttggtgaggccatccaagaagttatggagtcctatgaagttgaaatagatgggaagacatatcaagtgaaaccaatccgtaatctaaatggacattcaattgggcaatatagaatacatgctggaaaaacagtgccgattgtgaaaggaggggaggcaacaagaatggaggaaggagaagtatatgcaattgaaacctttggtagtacaggaaaaggtgttgttcatgatgatatggaatgttcacattacatgaaaaattttgatgttggacatgtgccaataaggcttccaagaacaaaacacttgttaaatgtcatcaatgaaaactttggaacccttgccttctgccgcagatggctggatcgcttgggagaaagtaaatacttgatggctctgaagaatctgtgtgacttgggcattgtagatccattatcaccattatgtgacattaaaggatcatatacagcgcaatttgaaca

SEQ ID NO: 349 - DNA, 398 bp, Homo sapiens
ttggagaaaccttttattggcacaggcattccttgttaacttgacagggtgaagctgtaatttttcaaaaacagtaaaagctggtttctcctaaactattttccttgtggtagtaaaaatcagtgggtcaaaaacaactcctgaccacttggtttccttttgagccgcgtcattaggaggcaatctgtaaaactagcacaggtctcccgctgttccactggctcacccacatgattagcagagtgcacgaaaaaataaaacttctattaagaacatgctgagcacaagatcagaaaagttgtgacattgcaaactccatatatgcaggggcctggaactggcgttctccaaaggctcccaacaccactctcctctgattctgtgacaatgtgaagcta

SEQ ID NO: 350 - DNA, 366 bp, Homo sapiens
  misc_feature 112, 139, 177, 193, 211, 261, 302: n = A,T,C or G
ttttttttttttttttttttttttcagatctgaaaatgtctttattttttagaaaatggattccaggaaggttaaaaagcaacaccagagggtataggtgcagaactggatntagtcattcaaagcattcaagtaagantatggcaatataaatatccaaaaagtatctcttaggtnttcaaaacaaaacgtntaagtcattcctaactantttgagctttatagcattttcctagacaggaaggggaaaaacagttagcntttaaaagtccggaaagctttttcgttggttaattacattnggacggtttgcctttgtccaaattccttcttttttaaacatgggtaaaagttttacatggggtc

SEQ ID NO: 351 - DNA, 491 bp, Homo sapiens
  misc_feature 12, 154, 255, 348, 368, 402, 409, 450, 471: n = A,T,C or G
tttttttttttntttcactgttcaaggtttattgggggttttagttggtataacacttggatagttggttgcattgtttgtatgtagatctttttacattatatggtaatgtacactactgatatagttcacaaaataagatcctttggaaganttatacacaagacatgatattggatttatacactggatcccagggatgtgactcactgggaaaaaatgttggactaggcatgttcagtgaaggagccaggnagttatataacacacggtaaacatccacctggctcaaggggcaaatgcagtacgtacagcattggcagtggtgcgtcagaggtggcagaactntttcacactaaccagttgangactacacaagattaataccatccagcatcaggntatagcntgtggattttacaaaccatttcttatttctaactttcaggngttgatgtttttcccagtccntcttaaaatttttactgctt

SEQ ID NO: 352 - DNA, 398 bp, Homo sapiens
cgttgctgtcgcgggacgccgagagcacgccatgaaggcctcgggcacgctacgagagtcaaggtagtgggtcgctgcctgcccacccccaaatgccacacgccgaccctctaccgcatgcgaatctttgcgcctaatcatgtacgcgccaagtcccgcttatggtactttgtatctcacttaaagaagatgaagaagtcttcaggggagattgtctactgtgggcaggtgtttgagaagtcccccctgcgggtgaagaacttcgggatctggctgcgctatgactcccggagcggcacccacaacatgtaccgggaataccgggacctgaccaccggaggcgctgtcacccagtgctaccgatacatgggtgcccggcaccgctcccgagcccactc

SEQ ID NO: 353 - DNA, 220 bp, Homo sapiens
gtggaaggatctgcagttttgtttttgacgcaaaaaaataataataagttagctctgaagggcagagggaatacccaagcccctgatgcctatgagaagtccctggacttcaaccctcctgttgtttggccttagcccagagggagctgctcacctgagcacccttgggggtgggcaaagaggcagggtgggattttagagttagtgtctgtgcgggggc

SEQ ID NO: 354 - DNA, 362 bp, Homo sapiens
gatggggctgtgggggcggggcggcatgggcttcagaagtatctgcacaattagaaaagtcctcagaagctttttcttggagggtacactttcttcactgtccctattcctagacctggggcttgagctgaggatgggacgatgtgcccagggagggacccaccagagcacaagagaaggtggctacctgggggtgtcccagggactctgtcagtgccttcagcccaccagcaggagcttggagtttggggagtggggatgagtccgtcaagcacaactgttctctgagtggaaccaaagaagcaaggagctaggacccccagtcctgccccccaggagcacaagcagggtcccctcagtca

SEQ ID NO: 355 - DNA, 771 bp, Homo sapiens
  misc_feature 3, 19, 20, 21, 22, 23, 24, 25, 26, 27, 28, 29, 30, 31, 32,33, 34, 35, 36, 37, 38, 39, 40, 41, 42, 43, 44, 45, 46,47, 48, 49, 50, 51, 52, 53, 54, 55, 56, 57, 58, 59, 60,61, 62, 63, 64, 65, 66, 67, 68, 69, 70, 71, 72, 73, 74,75: n = A,T,C or G
  misc_feature 76, 77, 78, 79, 80, 81, 82, 83, 84, 85, 86, 87, 88, 89, 90,708, 745, 751: n = A,T,C or G
acncttgacctgatcgccnnnnnnnnnnnnnnnnnnnnnnnnnnnnnnnnnnnnnnnnnnnnnnnnnnnnnnnnnnnnnnnnnnnnnnnncgaggtacagaatttattatgaaatagcttaatggcaagtggtaatttagaagaattaagttatcagataggagatatattaaaatatttaaaaattggatatattcttgaagcccttttacacaagtaatttctataatttgattgtaatgaaagtataatataccttgttactattatcagattaatttttgaaagtagaattccttaatcaagccaaggttatgctgctttataagaaattaatcaggtagtttaacactagagctcattagccaacctgtatgtagcacaaaataatcatctctgataaatacctataaatatattttattcatacttttaaatattttacaattcaaataaaaaccttatatgtagacaatctgggctaaatttccatgtatgttttgaaaaataatgttagcatgaatagattcatatttaaatatgattttaaatactcttaatagaggagacataagaaatatttacataaaagctaagtagcatgatacagctcatggttattttcctcataggaaaacaattacttgatttttttttgcataggattaaagactgagtatcttttctacattcttttaactttctaangggcacttctcaaaacacagaccaggtagtaaatctncactgntctaaggtctcaccccactt

SEQ ID NO: 356 - DNA, 374 bp, Homo sapiens
ggcagaggaaagggcggaaaaggcttaggcaaagggggcgctaagcgccaccgcaaggtcttgagagacaacattcagggcatcaccaagcctgccattcggcgtctagctcggcgtggcggcgttaagcggatctctggcctcatttacgaggagacccgcggtgtgctgaaggtgttcctggagaatgtgattcgggacgcagtcacctacaccgagcacgccaagcgcaagaccgtcacagccatggatgtggtgtacgcgctcaagcgccaggggcgcaccctgtacggcttcggaggctaggccgccgctccagctttgcgcgtttcgatcccaaaggccctttttagggccgaccacttgctcatctg

SEQ ID NO: 357 - DNA, 467 bp, Homo sapiens
ttcaaaattatatgtaacttctactagttttactttctcccccaagtcttttttaactcatgatttttacacacacaatccagaacttattatatagcctctaagtctttattcttcacagtagataatgaaagagtcctccagtgtcttggcaaaatgttctagtatagctggatacatacagtggagttctataaactcatacctcagtggacttaaccaaaattgtgttagtctcaattcctaccacactgagggagcctcccaaataactattttcttatctgcagtattcctccagaagagctaaccagggcagggctggcatgagaagtgacatctgcgttacaaagtctatcttcctcataagtctgtaaagagcaattgaatcttctagctttagcaaacctaagccaaaggaaggaaagccacgaagaatgcagaagtcaaaccctcatgacaaagta

SEQ ID NO: 358 - DNA, 495 bp, Homo sapiens
ccgttgctgtcgcttcgtgtaagcaagtacataaggaccctcctttggtgaaatcggggttcgaatgaatatctcaaggcaggagatgcatctattttaagatgctttggagcagacagctttagccgttcccaatccttagcaatgccttagctgggacgcatagctaatactttagagaggatgacagatccataaagagagtaaagataagagaaaatgtctaaagcatctggaaaggtaaaaaaaaaaaatctatttttgtacaaatgtaattttatccctcatgtatacttggatatggcggggggagggctgggactgtttcttttctgcttctagagattgaggggaaagcttcgtccgaaaaaccccaggacaaacaatggcaaaggagagggctcctgtgacggcggcaaggcttgggaggaaacccccgcaatgggggggttttccctcggggcaggagggggggcctgaggctttcaagggttt

SEQ ID NO: 359 - DNA, 467 bp, Homo sapiens
ctgtgctggagaaaaataagatcccagctttgcgggaactcatgcactatctcagggaggtgatgcaggattaccgagatgagctcaaggacttctttgcagttgacaaacagctggcatcagagcttgagtatgacatgaagaagtaccaggaacagctggtccaggagcaggagctagcaaaacatgcagatgtggccgggacggctggaggtgctgaggtggcacctgtggcacaggttgccctgtgtttagaaacagtgccagttcctgctggccaagaaaaccctgccatgtcacctgccgtgagccagccctgcacacccagggcaagtgctggccatgtagcagtatcatctcctacacctgaaacagggccattgcagaggttgctgcccaaagccaggcccatgtccctgagcaccattgcaatcctgaattctgtcaagaaagccgtggagtcaaag

SEQ ID NO: 360 - DNA, 300 bp, Homo sapiens
gagaaagaaggagaccacataccccaaagtgacctaagaacactttaaaaagcaacatgtaaatgattggaaattaatatagtacagaatatatttttcccttgttgagatcttcttttgtaatgtttttcatgttactgcctagggcggtgctgagcacacagcaagtttaataaacttgactgaattcatttacatatctctgcttcatttcttctattaatatgtttttgtttttgttttattttgtttcgtttgagatggagtctcactctgtcgcccaggctggagtgcagcggc

SEQ ID NO: 361 - DNA, 369 bp, Homo sapiens
acattgaagttgccttctcctactcctcggtcttatggccttggtcgggctacctggccatctccatttctgtgaccaagaaagcggcttcctgggaaggcattgcccagggtgaagcgcccgcagctcatgcagcaggttcacccgccaaagaccccttcggtgtgaccggcagcctggctgaccgtgagggccagagagagccttcacggacggcgctggtgggtgagccgagctgtggtggcggctggtttaaaagggatccagtttccagctgcaggtttgttagagtctgttctacatgggcctgccctcctgtgatgggcagaggctcctggtacatcgagaagattcctgtggatcccgtca

SEQ ID NO: 362 - DNA, 236 bp, Homo sapiens
tcgaattccgttgctgtcgccctaaaacccgccggactttctgtaataagtgtggcaagcaccaaccccataaagtgacacagtacaagaagggcaaggattctctgtacgcccagggaaagcggcgttatgacaggaagcagagtggctatggtgggcaaactaagccgattttccggaaaaaggctaaaactacaaagaagattgtgctaaggcttgagtgcgttgagcccaac

SEQ ID NO: 363 - DNA, 264 bp, Homo sapiens
gattaaaatttttgatgaaaatgagctggagttgctcatgtgcggcctcggtgatgtggatgtgaatgactggagacagcattctatttacaagaacggttactgcccaaaccaccccgtcattcagtggttctggaaggctgtgctactcatggacgccgaaaagcgtatccggttactgcagtttgtcacagggacatcgcgagtacctatgaatggatttgccgaactttatggttccaatggtcctcagctgtttacaat

SEQ ID NO: 364 - DNA, 567 bp, Homo sapiens
ggcacgaggcgtagcagagtggtcgttgtctttctaggtctcagccggtcgtcgcgacgttcgcccgctcgctctgaggctcctgaagccgaaaccagctagactttcctccttcccgcctgcctgtagcggcgttgttgccactccgccaccatgttcgaggcgcgcctggtccagggctccatcctcaagaaggtgttggaggcactcaaggacctcatcaacgaggcctgctgggatattagctccagcggtgtaaacctgcagagcatggactcgtcccacgtctctttggtgcagctcaccctgcggtctgagggcttcgacacctaccgctgcgaccgcaacctggccatgggcgtgaacctcaccagtatgtccaaaatactaaaatgcgccggcaatgaagatatcattacactaagggccgaagataacgcggataccttggcgctagtatttgaagcaccaaaccaggagaaagtttcagactatgaaatgaagttgatggatttagatgttgaacaacttggaattccagaacaggagtacagctgtgtagtaaag

SEQ ID NO: 365 - DNA, 438 bp, Homo sapiens
ggcacgaggttggcagtatgagagttgtaatggcccgactgttgagttagggggagcaggggatcccaacggcttgcgctgcctttgcgcagcagccggcgggcggccacgtcgcggcctggctggggtaggagagggcggtccccagtgcagttgggtgaactaccgttgcacactggagtttctggtgtctttgcttggaactgacctagctcgtggcagggggaactcggctagcggccccacagcccctgctgactcaaaacaactgagttgtaagacgttcatcgccgtgttatccttgagtaaagaatgaactctggaagcccagccagggacaatgcaccttcacagagattctgcactaatctgagtgaaggtctaaggtttggaatctccccctcatggagagaagctttgtatggctgtcatgcttag

SEQ ID NO: 366 - DNA, 629 bp, Homo sapiens
cgccgctccggctgcaccgcgctcgctccgagtttcaggctcgtgctaagcttgcgccgtcgtcgtctcccttcagtcgccatcatgattatctaccgggacctcatcagccacgatgagatgttctccgacatctacaagatccgggagatcgcggacgggttgtgcctggaggtggaggggaagatggtcagtaggacagaaggtaacattgatgactcgctcattggtggaaatgcctccgctgaaggccccgagggcgaaggtaccgaaagcacagtaatcactggtgtcgatattgtcatgaaccatcacctgcaggaaacaagtttcacaaaagaagcctacaagaagtacatcaaagattacatgaaatcaatcaaagggaaacttgaagaacagagaccagaaagagtaaaaccttttatgacaggggctgcagaacaaatcaagcacatccttgctaatttcaaaaactaccagttctttattggtgaaaacatgaatccagatggcatggttgctctattggactaccgtgaggatggtgtgaccccatatatgattttctttaaggatggtttagaaatggaaaaatgttaacaaatgtggcaattattttggatcta

SEQ ID NO: 367 - DNA, 477 bp, Homo sapiens
cttttccagccccggtaccggaccctgcagccgcagagatgttgatgcctaagaagaaccggattgccatttatgaactcctttttaaggagggagtcatggtggccaagaaggatgtccacatgcctaagcacccggagctggcagacaagaatgtgcccaaccttcatgtcatgaaggccatgcagtctctcaagtcccgaggctacgtgaaggaacagtttgcctggagacatttctactggtaccttaccaatgagggtatccagtatctccgtgattaccttcatctgcccccggagattgtgcctgccaccctacgccgtagccgtccagagactggcaggcctcggcctaaaggtctggagggtgagcgacctgcgagactcacaagaggggaagctgacagagatacctacagacggagtgctgtgccacctggtgccgacaagaaagccgaggctggggctgggtcag

SEQ ID NO: 368 - DNA, 469 bp, Homo sapiens
ggcacgagggagaaccccctgcctgttcgtccccgggaaaaagaagaaccagtggttcgagagacaggtgaggtggtcgactgccacctcagtgacatgctgcagcagctgcacagtgtcaatgcctccaagccctcggagcgtgggctggtcaggcaagaggaggctgaggatcctgcctgcatccccatcttctgggtcagcaagtgggtggactattcggacaagtacggccttgggtatcagctctgtgataacagcgtgggggtgctcttcaatgactcaacacgcctcatcctctacaatgatggtgacagcctgcagtacatagagcgtgacggcactgagtcctacctcaccgtgagttcccatcccaactccttgatgaagaagatcaccctccttaaatatttccgcaattacatgagcgagcacttgctgaaggcaggtgccaacatcacgccgcgcg

SEQ ID NO: 369 - DNA, 448 bp, Homo sapiens
ggcgtgttcggtggcggctctggccgctcaggcgcctgcggctgggtgagcgcacgcgaggcggcgaggcggcagcgtgtttctaggtcgtggcgtcgggcttccggagctttggcggcagctaggggaggatggcggagtcttcggataagctctatcgagtcgagtacgccaagagcgggcgcgcctcttgcaagaaatgcagcgagagcatccccaaggactcgctccggatggccatcatggtgcagtcgcccatgtttgatggaaaagtcccacactggtaccacttctcctgcttctggaaggtgggccactccatccggcaccctgacgttgaggtggatgggttctctgagcttcggtgggatgaccagcagaaagtcaagaagacagcggaagctggaggagtgacaggcaaaggccacgatggaattggtagcaaggc

SEQ ID NO: 370 - DNA, 322 bp, Homo sapiens
ggcttagcggataacaatttcacacaggagctagcatggttaacgtccctaaaacccgccggactttctgtaagaagtgtggcaagcaccaaccccataaagtgacacagtacaagaagggcaaggattctctgtacgcccagggaaagcggcgttatgacaggaagcagagtggctatggtgggcaaactaagccgattttccggaaaaaggctaaaactacaaagaagattgtgctaaggcttgagtgcgttgagcccaactgcagatctaagagaatgctggctattaaaagatgcaagcattttgaactgggaggaga

SEQ ID NO: 371 - DNA, 338 bp, Homo sapiens
  misc_feature 3, 39, 42, 249, 264, 269, 275, 316: n = A,T,C or G
gcnactaccaaaaagcgctgctgtacctgtgtggtgganatnactgaagcccgacacggcctgagcgtccaaaaatggtgctcaccatgcttccagccaacaggtctaaaaaaccagcttgcgaatgacagtccccgtggccatccctgtgagggtgacgttagcattacccccaacctcattttagttgcctaagcattgcctggccttcctgtctagtctctcctgtaagccaaaaaaatgaacatnccaaggagttggaantgaantctatnatgtgaaacactttgcctcctgtgtactgtgtcataaacanatgaataaactgaatttgtact

SEQ ID NO: 372 - DNA, 298 bp, Homo sapiens
  misc_feature 38: n = A,T,C or G
caagtagctttccacatttgtcacagaaatcagagganagatggtgttgggagccctttggagaacgccagtctcccaggccccctgcatctatcgagtttgcaatgtcacaacctctctgatcttgtgctcagcatgattctttaatagaagttttattttttcgtgcactctgctaatcatgtgggtgagccagtggaacagcgggagacctgtgctagttttacagattgcctcctaatgacgcggctcaaaaggaaaccaagtggtcaggagttgtttctgacccactgatctc

SEQ ID NO: 373 - DNA, 404 bp, Homo sapiens
ccgttgctgtcggtacacttagtcttaatacactcaggtttgaacagattattctgaatattaaaatttaatccattcttaatattttaaaacttttgttaagaaaaactgccagtttgtgcttttgaaatgtctgttttgacatcatagtctagtaaaattttgacagtgcatatgtactgttactaaaagctttatatgaaattattaatgtgaagtttttcatttataattcaaggaaggatttcctgaaaacatttcaagggatttatgtctacatatttgtgtgtgtgtgtgtatatatatgtaatatgcatacacagatgcatatgtgtatatataatgaaatttatgttgctggtattttgcattttaaagtgatcaagattcattaggcaaacttt

SEQ ID NO: 374 - DNA, 300 bp, Homo sapiens
ggactgactgctgctcagccagcccctcatgtggtcaggtgacaccgcacctgtctctaggtgcctctgcttcctcctacacctgagtcataaggtcaggtgccatgctgggcgccatctgagtgtaccacatggatccacccattaatcctcctacccactatgaaataagaagcttgcttgggccgggcacagtggctcatgcctataatcccagcactttgggaggccaaggcgggcggatcataaggtcaggagttcgagaccagtctgccaatatggtgaaaccccgtctctact

SEQ ID NO: 375 - DNA, 317 bp, Homo sapiens
taagacgcagatgcaggaaaaggcaaaggagatctacatgacctttctgtccagcaaggcctcatcacaggtcaacgtggaggggcagtctcggctcaacgagaagatcctggaagaaccgcaccctctgatgttccagaaactccaggaccagatctttaatctcatgaagtacgacagctacagccgcttcttaaagtctgacttgtttttaaaacacaagcgaaccgaggaagaggaagaagatttgcctgatgctcaaactgcagctaaaagagcttccagaatttataacacatgagcccccaaaaagccgg

SEQ ID NO: 376 - DNA, 460 bp, Homo sapiens
  misc_feature 10, 13, 21, 23, 38, 41, 60, 67, 72, 75: n = A,T,C or G
aaactcttgnacngaactctnanacaagccctgggccnttntgcaggaacccatcgattngaattcngctcnatnacaattacggaatcatgagatcattgatttcttcctgggggcctctctcaaggatgaggttttgaagattatgccagtgcagaagcagacccgtgccggccagcgcaccaggttcaaggcatttgttgctatcggggactacaatggccacgtcggtctgggtgttaagtgctccaaggaggtggccaccgccatccgtggggccatcatcctggccaagctctccatcgtccccgtgcgcagaggctactgggggaacaagatcggcaagccccacactgtcccttgcaaggtgacaggccgctgcggctctgtgctggtacgcctcatccctgcacccaggggcactggcatcgtctccgcacctgtgcctaagaactgctca

SEQ ID NO: 377 - DNA, 107 bp, Homo sapiens
ggcacgaggttgggggcagccaggcacagccggctcacggaggggccaccacactgggccagggtctcactgtacaagtgggcaggggccgcgcttgggcgcttggg

SEQ ID NO: 378 - DNA, 499 bp, Homo sapiens
ttcatccgattgctacgttccaaagtgtccaggtttttgagaccttacaaatgactcagcccacgtgccactcaatacaaatgttctgctatagggttggtgggacagagctgtcttccttctgcatgtcagcacagtcgggtattgctgcctcccgtatcagtgactcattagagttcaatttttatagataatacagatattttggtaaattgaacttggtttttctttcccagcatcgtggatgtagactgagaatggctttgagtggcatcagcttctcactgctgtgggcggatgtcttggatagatcaagggctggctgagctggactttggtcagcctaggtgagactcacctgtccttctggggtcttactcctcctcaaggagtctgtagtggaaaggaggccacagaataagctgcttattctgaaacttcagcttcctctagcccggccctctctaagggagccctctgcactcgtgtgcaggctctg

SEQ ID NO: 379 - DNA, 422 bp, Homo sapiens
gctgaagaaggctgccaagcggaccgtgagcatcagcgagggcccggacaccctaggcgatgggatgagggagagaagggagactctggctctggcccctgagccagagcccctggagaaggaagcttgtgagaagtggaagaggcccttcagttttaagaagaggagaggtcactcaattgggggagcccctgagcagcgataccagatcatccctgtgtgtgtggctgcccgacttcctacccgggctcaggatgtgctggatgcccacctctctgaggtcaatgctgttcgttttggccccaacagcagcctcctggccactggaggggctgaccgctgatccacctctggaatgttgtgggaaagtcccctggaggccaaccacaccctggagggagctggtggcagcatcaccagtg

SEQ ID NO: 380 - DNA, 510 bp, Homo sapiens
ccgttgctgtcgagcagccgtccggagccagccaacgagcggaaaatggcagacaatttttcgctccatgatgcgttatctgggtctggaaacccaaaccctcaaggatggcctggcgcatgggggaaccagcctgctggggcagggggctacccaggggcttcctatcctggggcctaccccgggcaggcacccccaggggcttatcctggacaggcacctccaggcgcctaccatggagcacctggagcttatcccggagcacctgcacctggagtctacccagggccacccagcggccctggggcctacccatcttctggacagccaagtgcccccggagcctaccctgccactggcccctatggcgcccctgctgggccactgattgtgccttataacctgcctttgccttggggagtggtgcctcgcatgctgataacaattctgggcacggtgaagcccaatgcaaacagaattgctttagatttccaaagagggaatgatgtt

SEQ ID NO: 381 - DNA, 263 bp, Homo sapiens
atttgaaatcattgatgaccacagacctgggaaaatggttgtgaacctcacaggcaggctaaacaagtgtggggtgatcagccccagatttgacgtgcaactcagagacctggaaaaatggcagaataatctgcttccatcccgccagttcggtttcattgtactgacaacctcagctggcatcatggaccatgaagaagcaagacgaaaacacacaggagggaaaatcctgggattcttcttctagggatgtaatacatata

SEQ ID NO: 382 - DNA, 652 bp, Homo sapiens
catcatggtgttaaccagctaaagtttgctcgaagccttcagtccgttgcagaggagcgagctggacgccactgtggggctctgagagtcctgaattcttactgggttggtgaagattccacatacaaattttttgaggttatcctcattgatccattccataaagctatcagaagaaatcctgacacccagtggatcaccaaaccagtccacaagcacagggagatgcgtgggctgacatctgcaggccgaaagagccgtggccttggaaagggccacaagttccaccacactattggtggctctcgccgggcagcttggagaaggcgcaatactctccagctccaccgttaccgctaatataagtaaagtttgtaaaattcatacttaataaacaatttacgacagtcatgtctgcttacaggtgttatttgtctgttaaaactagtctgcagatgtttcttgaatgctttgtcaaattaagaaagttaaagtgcaataatgtttgaagacaataagtggtggtgtatcttgtttctaataagataaacttttttgtctttgctttatcttattagggagttgtatgtcagtgtataaaacatactgtgtggtataacaggcttaataaattctttaaaaaaaaaaaaaa

SEQ ID NO: 383 - DNA, 490 bp, Homo sapiens
ccgttgctgtcggtgtgggaggcctctcactatctcgtacgccaggtcttcaagagtctacaggagatgttctcggggacccgggccatccagcactggctgaccgacagtgcccgcctcatctcccacatgggctctgtggtggagtgggtcacacccctgggcgtccccgtcatccagccgtatcgcctggactccaaggtcaagcaaataggaggtggaattcagagcatcacctacacccacaacggagacatcagccgaaagcccaacacacgtaagcagaagaacggcttcccgcccaacttcatccactcgctggactcctcccacatgatgctcaccgccctgcactgctacaggaagggcctgaccttcgtctctgtgcacgactgttactggactcacgcagctgatgtctccgtcatgaaccaggtgtgccgggagcagtttgtccgcttgcacagcgagcccatcctgcaggacctgt

SEQ ID NO: 384 - DNA, 419 bp, Homo sapiens
tggaggacaaccacaaggcagacatcagctcctggttcaacgaggccattgacttcatagactccatcaagaatgctggaggaagggtgtttgtccactgccaggcaggcatttcccggtcagccaccatctgcctggcttaccttatgaggactaatcgagtcaagctggacgaggcctttgagtttgtgaagcagaggcgaagcatcatctctcccaacttcagcttcatgggccagctgctgcagtttgagtcccatgtgctggctccgcactgttcggcagaggctgggagccccgccatggctgtgctcgaccgaggcacctccaccaccaccgtgttcaacttccccgtctacatccctgtccactccacgaacagtgcgctgagctaccttcagagccccattacgacctct

SEQ ID NO: 385 - DNA, 404 bp, Homo sapiens
cgttgctgtcgggggtcgacacgctatagcatgaggggggctacctccccttcgaggccgacatcagcaacctggtccaggtggggcccctgccctcccggctccgaatcactatcgccatcaacaacacactcacccccaccaccctgccaccagggaccatccaatacctgactgacacctccaagtatcccaagggttactttgtccagaacacatattttgactttttcaactacgctggactgcagcggtctgtacttctgtacacgacacccaccacctacatcgatgacatcaccgtcaccaccagcgtggagcaagacagtgggctggtgaattaccagatctctgtcaagggcagtaacctgttcaagttggaagtgcgtcttttggatgcagac

SEQ ID NO: 386 - DNA, 289 bp, Homo sapiens
ggcacgaggcgaccaggaccctggggaaaggaagccagcccccaaggccagtcccggaggggctgatccgcatctacagcatgaggttctgcccctattctcacaggacccgcctcgtcctcaaggccaaagacatcagacatgaagtggtcaacattaacctgagaaacaagcctgaatggtactatacaaagcacccttttggccacattcctgtcctggagaccagccaatgtcaactgatctatgaatctgttattgcttgtgagtacctggatgatgcttatcc

SEQ ID NO: 387 - DNA, 359 bp, Homo sapiens
ggcacgagaacaggctctgcgcatgagcgtggaggccgacatcaacggcctgcgcagggtgctggatgagctgaccctggccaggaccgacctggagatgcagatcgaaggcctgaaggaagagctggcctacctgaagaagaaccatgaggaggaaatcagtacgctgaggggccaagtgggaggccaggtcagtgtggaggtggattccgctccgggcaccgatctcgccaagatcctgagtgacatgcgaagccaatatgaggtcatggccgagcagaaccggaaggatgctgaagcctggttcaccagccggactgaagaattgaaccgggaggtcgctggccacacggagcagc

SEQ ID NO: 388 - DNA, 410 bp, Homo sapiens
caagtagctttccacatttgtcacagaaatcagaggagagatggtgttgggagccctttggagaacgccagtctcccaggccccctgcatctatcgagtttgcaatgtcacaacctctctgatcttgtgctcagcatgattctttaatagaagttttattttttcgtgcactctgctaatcatgtgggtgagccagtggaacagcgggagacctgtgctagttttacagattgcctcctaatgacgcggctcaaaaggaaaccgagtggtcaggagttgtttctgacccactgatctctactaccacaaggaaaatagtttagagaaaccagcttttactgtttttgaaaaattacagcttcacctgtcaatttaacaaggaatgcctgtgccaataaaagttctcccac

SEQ ID NO: 389 - DNA, 403 bp, Homo sapiens
caagtagctttccacatttgtcacagaaatcagaggagagatggtgttgggagccctttggagaacgccagtctcccaggccccctgcatctatcgagtttgcaatgtcacaacctctctgatcttgtgctcagcatgattctttaatagaagttttattttttcgtgcactctgctaatcatgtgggtgagccagtggaacagcgggagacctgtgctagattgcctcctaatgacgcggctcaaaaggaaaccaagtggtcaggagttgtttctgacccactgatctctactaccacaaggaaaatatttagagaaaccagcttttactgtttttgaaaaattacagcttcaccctgtcaatttaacaaggaatgcctgtgccaataaaagttctcccact

SEQ ID NO: 390 - DNA, 438 bp, Homo sapiens
aggtaccacctttcagtgctttctctcctcaaggaatgccagagggcgatctagtgtatgttaactatgcacgaactgaagacttctttaaattggaacgggacatgaaaatcaattgctctgggaaaattgtaattgccagatatgggaaagttttcagaggaaataaggttaaaaatgcccagctggcaggggccaaaggagtcattctctactccgaccatgctgactactttgctcctggggtgaagtcctatccagatggttggaatcttcctggaggtggtgtccagcgtggaaatatcctaaatctgaatggtgcaggagaccctctcacaccaggttacccagcaaatgaatatgcttataggcgtggaattgcagaggctgttggtcttccaagtattcctgttcatccaattggatactatgatgcac

SEQ ID NO: 391 - DNA, 99 bp, Homo sapiens
ggtactaggctctatacactactcatctctggttttagccgattaaatacaggtttttgttgctgagatgtgagtgaaaccagctagtgtgtcaacagt

SEQ ID NO: 392 - DNA, 382 bp, Homo sapiens
ctctggcagagttttgattaccactgacctgctggccagaggcattgatgtgcagcaggtttctttagtcatcaactatgaccttcccaccaacagggaaaactatatccacagaatcggtcgaggtggacggtttggccgtaaaggtgtggctattaacatggtgacagaagaagacaagaggactcttcgagacattgagaccttctacaacacctccattgaggaaatgcccctcaatgttgctgacctcatctgaggggctgtcctgccacccagccccagccagggctcaatctctgggggctgaggagcagcaggaggggggagggaagggagccaagggatggacatcttgtcattttttttctttgaataaatg

SEQ ID NO: 393 - DNA, 282 bp, Homo sapiens
ggcacgagtagctctggggggaaagagggcggacaggcccctccctctgccctctccctgcagaatgtggcaggcggacctggaatgtgttggagggaagggggagtaccacctgagtctccagcttctccggaggagccagctgtcctggtgggacgatagcaaccacaagtggattctccttcaattcctcagcttcccctctgcctccaaacaggggacacttcgggaatgctgaactaatgagaactgccagggaatcttcaaactttccaacggaac

SEQ ID NO: 394 - DNA, 362 bp, Homo sapiens
aattccgttgctgtcgctcatctttgccagtacaggagcttgtgccgtggcccacagcccacagcccacagccatgggctgggacctgacggtgaagatgctggcgggcaacgaattccaggtgtccctgagcagctccatgtcggtgtcagagctgaaggcgcagatcacccagaagatcggcgtgcacgccttccagcagcgtctggctgtccacccgagcggtgtggcgctgcaggacagggtcccccttgccagccagggcctgggccccggcagcacggtcctgctggtggtggacaaatgcgacgaacctctgagcatcctggtgaggaataacaagggccgcagcagcacctacg

SEQ ID NO: 395 - DNA, 457 bp, Homo sapiens; identical to SEQ ID NO: 343

SEQ ID NO: 396 - DNA, 428 bp, Homo sapiens
aggaactgcatgctgaatgagaacatgtccgtgtgtgtggcggacttcgggctctccaagaagatctacaatggggactactaccgccagggacgtatcgccaagatgccagtcaagtggattgccattgagagtctagctgaccgtgtctacaccagcaagagcgatgtgtggtccttcggggtgacatgtgggagattgccacaagaggccaaaccccatatccgggcgtggagaacagcgagatttatgactatctgcgccagggaaatcgcctgaagcagcctgcggactgtctggatggactgtatgccttgatgtcgcggtgctgggagctaaatccccaggaccggccaagttttacaaagctgcgggaagatttggagaacacactgaaggccttgccttctgcccaggagcctgacgaa

SEQ ID NO: 397 - DNA, 523 bp, Homo sapiens
atgtcggagccaagccccactcatcacacacggcttctcctcccgcctgggcaagcgggtctctgacatcctccgatacctatttcccgtgcccaaagatgacagccaccgggtcatcaccttcgcaaaccaggacgactacatatcattccggcaccatgtgtataagaagacagaccaccgcaacgtggagctcactgaggtcgggccccgctttgagctgaagctgtacatgatccgtctgggcacgctggagcaggaggccacagcagacgtggagtggcgctggcacccttacaccaataccgcacgcaagagagtcttcctgagcaccgagtgagcacactcaccactcagtcaggacatggacttggaactcaggatggggctgtcatagacagacccaccagtaggaactgtcacagaatggcctgctgaactgggatgtggaactgtggcgggtggagaggtctgaataaaccgtctgtgtcatgaaaaaaaaaaaaaaaaaaaaaaaaaaaaa

SEQ ID NO: 398 - DNA, 389 bp, Homo sapiens
ggagagggagtgatgtcttccagactcggtgctgtacccgccacttcgggacccacaacctttaagcagcagaggagcacgaggatcgtgggagctaagaatagcaggacccagtgctccataaaggataatagtttccagtacactatccctcatgatgactccttaagtggttcatcgtctgcatcttcgtgtgaaccagtgagtgattttccagcatctttccgaaaatctacctactggatgaagatgagaagaatcaagccagctgctacttctcatgtcgaagggtcaggtggagtatcagccaaggggaaaaggaaacccaggcaggaagaagatgaagactatcgagaatttcctcagaagaagcataagctttatgggag

SEQ ID NO: 399 - DNA, 386 bp, Homo sapiens
ttcgaattcggcacgaggctcgatgtacgtcccggaggacctccttcccgtctacaaagaaaaagtggtgccgcttgcagacattatcacgcccaaccagtttgaggccgagttactgagtggccggaagatccacagccaggaggaagccttgcgggtgatggacatgctgcactctatgggccccgacaccgtggtcatcaccagctccgacctgccctccccgcagggcagcaactacctgattgtgctggggagtcagaggaggaggaatcccgctggctccgtggtgatggaacgcatccggatggacattcgcaaagtggacgccgtctttgtgggcactggggacctgtttgctggcatgctcctggcgtggacacaca

SEQ ID NO: 400 - DNA, 365 bp, Homo sapiens; identical to SEQ ID NO: 141

SEQ ID NO: 401 - DNA, 494 bp, Homo sapiens
ggcacgaggccgcccggcccctccagcttcccggaccatggcctacctttagcgcaccttcatcgccatcaagccggacggcgtgcagcgcggcctggtgggcgagatcatcaagcgcttcgagcagaagggattccgcctcgtggccatgaagttcctccgggcctctgaagaacacctgaagcagcactacattgacctgaaagaccgaccattcttccctgggctggtgaagtacatgaactcagggccggttgtggccatggtctgggaggggctgaacgtggtgaagacaggccgagtgatgcttggggagaccaatccagcagattcaaagccaggcaccattcgtggggacttctgcattcaggttggcaggaacatcattcatggcagtgattcagtaaaaagtgctgaaaaagaaatcagcctatggtttaagcctgaagaactggttgactacaagtcttgtgctcatgactgggtctatgaat

SEQ ID NO: 402 - DNA, 487 bp, Homo sapiens
caggcacgtagctcagcggcggccgcggcgcgtgcgtctgtgcctctgcgcgggtctcctggtccttctgccatcatgccgatgttcatcgtaaacaccaacgtgccccgcgcctccgtgccggacgggttcctctccgagctcacccagcagctggcgcaggccaccggcaagcccccccagtacatcgcggtgcacgtggtcccggaccagctcatggccttcggcggctccagcgagccgtgcgcgctctgcagcctgcacagcatcggcaagatcggcggcgcgcagaaccgctcctacagcaagctgctgtgcggcctgctggccgagcgcctgcgcatcagcccggacagggtctacatcaactattacgacatgaacgcggccaatgtgggctggaacaactccaccttcgcctaagagccgcagggacccacgctgtctgcgctggctccacccgggaacccgccgcacgctgtgttct

SEQ ID NO: 403 - DNA, 267 bp, Homo sapiens
  misc_feature 233, 238, 245, 249, 251, 261, 262, 266: n = A,T,C or G
agtcattcctgcggcttgcgcgcccttgtagacagccggggccttcgtgagaccggtgcaggcctggggtagtctcctgtctggacagagaagagaaaaatgcaggacactggctcagtagtgcctttgcattggtttggctttggctacgcagcactggttgcttctggtgggatcattggctatgtaaaagcaggcagcgtgccgttcctggctgcagggctgctctttgncaatntaccagnctgnantgcttaccanntgtnt

SEQ ID NO: 404 - DNA, 572 bp, Homo sapiens
ggcacgagccatgttcttctccgcggcgctccgggcccgggcggctggcctcaccgcccactggggaagacatgtaaggaatttgcataagacagctatgcaaaatggagctggaggagctttatttgtgcacagagatactcctgagaataaccctgatactccatttgatttcacaccagaaaactataagaggatagaggcaattgtaaaaaactatccagaaggccataaagcagcagctgttcttccagtcctggatttagcccaaaggcagaatgggtggttgcccatctctgctatgaacaaggttgcagaagttttacaagtacctccaatgagagtatatgaagtagcaactttttatacaatgtataatcgaaagccagttggaaagtatcacattcaggtctgcactactacaccctgcatgcttcgaaactctgacagcatactggaggccattcagaaaaagcttggaataaaggttggggagactacacctgacaaacttttcactcttatagaagtggaatgtttaggggcctgtgtgaacgcaccaatggttcaaa

SEQ ID NO: 405 - DNA, 477 bp, Homo sapiens
ggcacgaggtcaccgatttcgagggctggaaggctgcgattcccagtgccctggacaccaacagctcgaagagcacctcctccttcccctgcccggcagggcacttcaacggcttccgcacggtcatccgccccttctacctgaccaactcctcaggtgtggactagacggcgtggcccaagggtggtgagaaccggagaaccccaggacgccctcactgcaggctcccctcctcggcttccttcctctctgcaatgaccttcaacaaccggccaccagatgtcgccctactcacctgagcgctcagcttcaagaaattactggaaggcttccactagggtccaccaggagttctcccaccacctcaccagtttccaggtggtaagcaccaggacgccctcgaggttgctctgggatccccccacagcccctggtcagtctgcccttgtcactggtctgaggtcattaaaattacat

SEQ ID NO: 406 - DNA, 572 bp, Homo sapiens
ggcacgaggtgacgggtgaagcagatgttgagtttgctactcatgaagaagctgtggcagctatgtccaaagacagggccaatatgcagcacagatatatagaactcttcttgaattcaacaacaggggccagcaatggggcgtatagcagccaggtgatgcaaggcatgggggtgtctgctgcccaggccacttacagtggcctggagagccagtcagtgagtggctgttacggggccggctacagtgggcagaacagcatgggtggctatgactagttttgttaggaacatttgagttacttcaatcattttcacaggcagccaacaagcaattaagagcagttataatagaggaagctgggggacccattttgcaccatgagtttgtgaaaaatctggattaaaaaattacctcttcagtgttttctcatgcaaaattttcttctagcatgtgataatgagtaaactaaaactattttcagcttttctcaattaacattttggtagtatacttcagagtgatgttatctaagtttaagtagtttaagtatgttaaatgtggatctttta

SEQ ID NO: 407 - DNA, 452 bp, Homo sapiens
aaactgatgtttattttccatcaaccatttttccatgctgcttaagagtctatgcaagaacagcttaagaccagtcagtggttgctcctacccattcagtggcctgagcagtgggagctgcagaccagtcttccgtggcaggctgagcgctccagtcttcagtagggaattgctgaataggcacagagggcacctgtacaccttcagaccagtctgcaacctcaggctgagtagcagtgaactcaggagcgggagcagtccatcaccctgaaattcctccttggtcactgccttctcagcagcagcctgctcttctttttcaatctcttcaggatctctgtagaagtacagatcaggcatgacctcccatgggtgttcacgggaaatggtgccacgcatgcgcagaacttcccgagccagcatccaccacattaaacccactgagtgagctc

SEQ ID NO: 408 - DNA, 386 bp, Homo sapiens
ggcttagcggataacaatttcacacaggaggtactaagggtactgctgctgctgctgctgctaaagttccagcaaaaaagatcaccgccgcgagtaaaaaggctccagcccagaaggttcctgcccagaaagccacaggccagaaagcagcgcctgctccaaaagctcagaagggtcaaaaagctccagcccagaaagcacctgctccaaaggcatctggcaagaaagcataagtggcaatcataaaaagtaataaaggttctttttgacctgttgacaaatatatttaagcctttggatttaaagcctgttgaggctagagttaggaggcagattgatagtaggattataataaacattaaataatcaaaaaaaaaaaacccctt

SEQ ID NO: 409 - DNA, 539 bp, Homo sapiens
  misc_feature 102, 198, 226, 261, 446, 484: n = A,T,C or G
caaagccagaaaatgcacaaggaggaacatgaggtggctgtgctgggggcaccccccagcaccatccttccaaggtccaccgtgatcaacatccacagcganacctccgtgcccgaccatgtcgtctggtccctgttcaacaccctcttcttgaactggtgctgtctgggcttcataccattcgcctattccgtgaantctagggacaggaaaatggttggcgacntgaccggggcccaggcctatgcctccaccgccaantgcctgaacatctgggccctgattctgggcatcctcatgaccattggattcatcctgttactggtattcggctctgtgacagtctaccatattatgttacaaataatacgggaaaaacggggttactagtagccgcccatagcctgcaacctttgcactccactgtgcaatgctggccctgcacnctggggctgttgcccctgcccccttggtcctgccctanatacagcagtttatacccacacacctgtctacagtgtcattcaataaaattgcac

SEQ ID NO: 410 - DNA, 477 bp, Homo sapiens
aagaggaaaacccggtaatgatgtcggggttgagggataggaggagaatgggggataggtgtatgaacatgagggtgttttctcgtgtgaatgagggttttatgttgttaatgtggtgggtgagtgagccccattgtgttgtggtaaatatgtagaggagtatagggctgtgactagtatgttgaatcctgtaagtaagagagtgatatttgatcaggaaaacgtggttactagcacagaaagttctcccagtaagttaataatggggggtaaggcgaagttaaccaagcttgctaaaaatcatccaaaactattaatgggaattagaatttgaaatccctgaaaaaagaataagatgcactgtaatgcttccgtatttgagtttgctaagccaatattaatggaatttaatcccctggccaatataaaatacgccccgtaacctcagggttttgaataaaatgtgttacacaaggc

SEQ ID NO: 411 - DNA, 286 bp, Homo sapiens
  misc_feature 8, 116, 118: n = A,T,C or G
agttgganaaaccttttattggcacaggcattccttgttaacttgacagggtgaagctaatttttcaaaaacagtaaaagctggtttctcctaaactattttccttgtggtagtananatcagtgggtcagaaacaactcctgaccacttggtttccttttgagccgcgtcattaggaggcaatctgtaaaactagcacaggtctcccgctgttccactggctcacccacatgattagcagagtgcacgaaaaaaataaaacttctattaaagaatcatgctgaag

SEQ ID NO: 412 - DNA, 461 bp, Homo sapiens
ccgttgctgtcggctagctctttccaaaagcattcaagtttggcttctgatgtgactcagaatttaggaaccagatgctagatcaaataagctctgaaaatctgaggaacattgtaggaaaggtttgttaagcatctcttaagtgccatgatgagcataacagccggccgtggtggctcgcgcctgtaagcccagcactttgggaggccaaggtgggaggatgacaaggtcaggagttcaggaccagcctggccaacatgctgaaacctcacctctactgaaaatacaaaaattagctgggcatggtggcacatgcctgtaatcccagctacttgggaggctgaggcaggagaatcgcttggacccgggaggcggaggttgcagtgagccaagacagtgccagtgcactccagcctcggtgacagcgcaaggctccgtctcaataattaaaaaaaaaaaaa

SEQ ID NO: 413 - DNA, 382 bp, Homo sapiens
  misc_feature 319: n = A,T,C or G
gcggcacgagggtttcgagaagaagaccggagttgctggggaggacatgcaagacaacagtgggacctacggcaagatctgggagggcagcagcaagtgcaacatcaacaacttcatcttccacaaggtcctgggcaaaggcagcttcgggaaggtgctgcttggagagctgaagggcagaggagaatactttgccatcaaggccctcaagaaggatgtggtcctgatcgacgacgacgtggagtgcaccatggttgagaagcgggtgctgacacttgccgcagagaatccctttctcacccacctcatctgcaccttncagaccaaggaccacctgttctttgtgatggagttcctcaacgggggggacctgatgtaccac

SEQ ID NO: 414 - DNA, 579 bp, Homo sapiens
ttccgttgctgtcgcgaaatccttgtcaagatccctacattctaacaccagagaaccgatgtgtttgcccagtctcaaatgccatgtgccgagaactgccccagtcaatagtctacaaatacatgagcatccgatctgataggtctgtgccatcagacatcttccagatacaggccacaactatttatgccaacaccatcaatacttttcggattaaatctggaaatgaaaatggagagttctacctacgacaaacaagtcctgtaagtgcaatgcttgtgctcgtgaagtcattatcaggaccaagagaacatatcgtggacctggagatgctgacagtcagcagtatagggaccttccgcacaagctctgtgttaagattgacaataatagtggggccattttcattttagtcttttctaagagtcaaccacaggcatttaagtcagccaaagaatattgttaccttaaagcactattttatttatagatatatctagtgcatctacatctctatactgtacactcacccataattcaaacaattacaccatggtataaagtgggcatttaatatgt

SEQ ID NO: 415 - DNA, 421 bp, Homo sapiens
attccgttgctgtcggcgacggtctccttctcccgcccctcctcctcgacggcgcaggactcccacaccaccaccacgacgaaggactccttctcctcccccacgtcggcgctcaccttctcctagaagatactctcctccaatacagaggagatactctccttctccacctccaaagagaagaacggcttcacctcctccccctcctaaacgaagagcatcaccatctccaccaccaaagcggcgggtctcccattctccacctcccaaacaaagaagctccccagtcaccaagagacgttcaccttcattatcatccaagcataggaaagggtcttccccaagccgctctacgcgggaggcccgatcaccacaaccaaacaaacggcattcgccctcaccacggcctcgagctcctcag

SEQ ID NO: 416 - DNA, 436 bp, Homo sapiens
ggcacgagagacaatctcctgaggcagttggctcataaggtcctttacaagctgaataaccctaagttcaatgatccgcacgtcaagaccaacctgctcctgcaggctcacttgtctcgcatgcagctgagtgctgagttgcagtcagatacggaggaaatccttagtaaggcaatccggctcatccaggcctgcgtggatgtcctttccagcaatgggtggctcagccctgcttggcagctatggaactggcccagatggtcacccaagccatgtggtccaaggactcatacctgaagcagctgccacacttcacctctgagcatatcaaacgttgcacagacaagggagtggagagtgttttcgacatcatggagatggaggatgaagaacggaacgcgttgcttcagctgactgacagccagattgcagatgt

SEQ ID NO: 417 - DNA, 617 bp, Homo sapiens
ggcacgagccatcatggtgttaaccagctaaagtttgctcgaagccttcagtccgttgcagaggagcgagctggacgccactgtggggctctgagagtcctgaattcttactgggttggtgaagattccacatacaaattttttgaggttatcctcattgatccattccataaagctatcagaagaaatcctgacacccagtggatcaccaaaccagtccacaagcacagggagatgcgtgggctgacatctgcaggccgaaagagccgtggccttggaaagggccacaagttccaccacactattggtggctctcgccgggcagcttggagaaggcgcaatactctccagctccaccgttaccgctaatataagtaaagtttgtaaaattcatacttaataaacaatttaggacagtcatgtctgcttacaggtgttatttgtctgttaaaactagtctgcagatgtttcttgaatgctttgtcaaattaagaaagttaaagtgcaataatgtttgaagacaataagtggtggtgtatcttgtttctaataagataaacttttttgtctttgctttatcttattagggagttgtatgtcagtgtataaaacatact

SEQ ID NO: 418 - DNA, 327 bp, Homo sapiens
ggcacgaggagactgctcctgccgctcccgctgccgcgcctcctgcggagaaggcccctgtaaagaagaagacggccaaaaaggctgggggtacgcctcgtaaggcgtccggtcccccggtgtcagagctcatcaccaaggctgtggccgcctctaaagagcgtagcggagtttctctggctgctctgaaaaaagcgttggctgccgccggctatgatgtggagaaaaacaacagccgtatcaaacttggtctcaagagcctggtgagcaagggcactctggtgcaaacgaaaggcaccggtgcttctggctcctttaaactcaaca

SEQ ID NO: 419 - DNA, 507 bp, Homo sapiens
ccggtggtcacctgtactcccagctgcactgcttacacgtcttccttcgtcttcacctaccccgaggctgactccttccccagctgtgcagctgcccaccgcaagggcagcagcagcaatgagccttcctctgactcgctcagctcacccacgctgctggccctgtgagggggcagggaaggggaggcagccggcacccacaagtgccactgcccgagctggtgcattacagagaggagaaacacatcttccctagagggttcctgtagacctagggaggaccttatctgtgcgtgaaacacaccaggctgtgggcctcaaggacttgaaagcatccatgtgtggactcaagtccttacctcttccggagatgtagcaaaacgcatggagtgtgtattgttcccagtgacacttcagagagctggtagttagtagcatgttgagccaggcctgggtctgtgtctcttttctctttctccttagtcttctcatagcattaactaatct

SEQ ID NO: 420 - DNA, 388 bp, Homo sapiens
ggcacgagggaacgtcatcgtttggaaagcgtcgcaataagacgcacacgttgtgccgccgctgtggctctaaggcctaccaccttcagaagtcgacctgtggcaaatgtggctaccctgccaagcgcaagagaaagtataactggagtgccaaggctaaaagacgaaataccaccggaactggtcgaatgaggcacctaaaaattgtataccgcagattcaggcatggattccgtgaaggaacaacacctaaacccaagagggcagctgttgcagcatccagttcatcttaagaatgtcaacgattagtcatgcaataaatgttctggttttaaaaaaaaaaaaaaaaagcctttaaaactatagggagtcgttttacgtaaatcca

SEQ ID NO: 421 - DNA, 578 bp, Homo sapiens
ggcacgaggaccagcctacagccgcctgcatctgtatccagcgccaggtcccgccagtcccagctgcgcgcgccccccagtcccgcacccgttcggcccaggctaagttagccctcaccatgccggtcaaaggaggcaccaagtgcatcaaatacctgctgttcggatttaacttcatcttctggcttgccgggattgctgtccttgccattggactatggctccgattcgactctcagaccaagagcatcttcgagcaagaaactaataataataattccagcttctacacaggagtctatattctgatcggagccggcgccctcatgatgctggtgggcttcctgggctgctgcggggctgtgcaggagtcccagtgcatgctgggactgttcttcggcttcctcttggtgatattcgccattgaaatagctgcggccatctggggatattcccacaaggatgaggtgattaaggaagtccaggagttttacaaggacacctacaacaagctgaaaaccaaggatgagccccagcgggaaacgctgaaagccatccactatgcgttgaactgctgt

SEQ ID NO: 422 - DNA, 496 bp, Homo sapiens
  misc_feature 386: n = A,T,C or G
aagactcctgtgtcttgcgtggagtcatgattaacaaggatgtgacccatccacgtatgcggcgctatatcaagaaccctcgcattgtgctgctggattcttctctggaatacaagaaaggagaaagccagactgacattgagattacacgagaggaggacttcacccgaattctccagatggaggaagagtacatccagcagctctgtgaggacattatccaactgaagcccgatgtggtcatcactgaaaagggcatctcagatttagctcagcactaccttatgcgggccaatatcacagccatccgcagagtccggaagacagacaataatcgcattgctagagcctgtggggcccggatagttcagccgaccagagggaantgaggaggaagatgatgtttgggaacagggagcagggcctgtttgggaaattcaaggaaatttgggaggtggattattttatttttcttcattgattgccaaagacccca

SEQ ID NO: 423 - DNA, 505 bp, Homo sapiens
  misc_feature 85, 430, 444, 478: n = A,T,C or G
gtcagcgcatcttcttttgcgtcgccagccgagccacatcgctgagacaccatggggaaggtgaaggtcggagtcaacggatttngtcgtattgggcgcctggtcaccagggctgcttttaactctggtaaagtggatattgttgccatcaatgaccccttcattgacctcaactacatggtttacatgttccaatatgattccacccatggcaaattccatggcaccgtcaaggctgagaacgggaagcttgtcatcaatggaaatcccatcaccatcttccagggagcgagatccctccaaaatcaagtggggcgatgctggcgctgagtacgtcgtggagtccactgggcgtcttcaccaccatgggagaaggctggggctcatttgcaggggggagccaaaagggtcattcatcttttgccccttntgctgacggccccngtttcgttcatgggtgttgaaccatgaggagttntgacaaacagcctcaagatcatcagca

SEQ ID NO: 424 - DNA, 550 bp, Homo sapiens
tgtggggctctatttttgctttggctttctggtgagagagtgaggaagcattctttccttcactaagtttgtctttcttgtcttctggatagattgattttaagagactaagggaatttacaaactaaagattttagtcatctggtggaaaaggagactttaagattgtttagggctgggcggggtgactcacatctgtaatcccagcactttgggaggccaaggcaggcagaacacttgaaggagttcgagaccagcgtggccaacgtggtgaaaccctgtctctactaaaaatacaaaaattgtttagctctgtttttcataatagaaatagaaaaggtaaaattgcttttcttctgaaaagaacaagtattgttcatccaagaagggtttttgtgactgaatcagcagtgcctgccctagtcatagctgtgcttcaaaaacctcagcatgattagtgttggagcaaaacaaggaagcaaagcaaatactgtttttgaaattctatctgttgcttgaactattttgtaataattaaactttgatgttg

SEQ ID NO: 425 - DNA, 474 bp, Homo sapiens
tgtggaactttcctaacgttgaatagccctacagatgcttctcttgctgcgggttttcttttgttagtggtctgaaataattattttcctgttctattaatacatagtgtattttgcacaaaaaaattaacctggtcaatagtgattaccagaatatatattaataatcttggcaattattgacattaattatgaaacattctatcccacgttaattctacattattcttcactgaaactcacctactgcaaatattgactttctgtaaatgttattaaaatatccagtgagctctttaaaaagactcagtattatttcaagactatttttgacgtaattctatccttttaaaatatactacagacctactgggcttaaaagaaccccagtaccgactaagcaaataagcaaaagacatgttggaaatgtagtatagtacttgaaacagtcactatcatagggataattggtgc

SEQ ID NO: 426 - DNA, 745 bp, Homo sapiens
  misc_feature 2, 3, 4, 5, 6, 7, 13, 15, 18, 19, 20, 21, 22, 23, 24, 25,26, 27, 28, 29, 30, 31, 32, 33, 34, 35, 36, 37, 38, 39,40, 41, 42, 43, 44, 45, 46, 47, 48, 49, 50, 51, 52, 53,54, 55, 56, 57, 58, 59, 60, 61, 62, 63, 64, 65, 66, 67,68, 69: n = A,T,C or G
  misc_feature 70, 71, 72, 73, 74, 75, 76, 77, 78, 79, 80, 81, 82, 83, 84,85, 86, 87, 88, 89, 90, 91, 92, 93, 94, 95, 96, 97, 98,100, 101, 102, 103, 104, 105, 106, 107, 108, 109, 110, 111,112, 113, 114, 115, 116, 117, 118, 119: n = A,T,C or G
gnnnnnntaaagnanacnnnnnnnnnnnnnnnnnnnnnnnnnnnnnnnnnnnnnnnnnnnnnnnnnnnnnnnnnnnnnnnnnnnnnnnnnnnnnnnnntnnnnnnnnnnnnnnnnnnnnacttcccacacaggtttgttgtaaaaattaagtgagctaatgtgtataaaatacttcagtgctgaataaatgttggcttttattatatattgttaaaaaacaacacaggctgggtatgatagctcacgcctataatcctagcatttagggaggccaaggcaggaggattgcttgagtccaggggtttgagaccagcctgggcaacatagtgagaccctatctctacaaaataaaataaattagttgggcatggtggcacatgcctgtagtcccagctactcaggaggctgaggtgggaggattgcttgagcccaggaggtagaggttgcagtgagctgtgatcacaccactgcactccagcgtcggtgacggagtgagaacctatctcaaacaaacaaacaaaaaaacccaaaacaaacaaaaaaatccagtaaagacagagattcctaaaattctacaattctaaaaaccagtagggctcactgaatataagagaggcaagcaaaaaattactccaatattttgagtttgggtaacctggaatatgggtcatttattgagtaaatagttactgagtcctaactatgtgccacacactgggttaacacttggcactgtctcttatg

SEQ ID NO: 427 - DNA, 328 bp, Homo sapiens
aggtacaaaccaatagctcctattctggaaggttttctttttatttaaaaaaaattcaaacaaggttaaaagtcaagcaagaagggaagagagaaactgggttctgagaaaaaaatgtgccagtataaaataaactcctaaatgcgtgcttgtcatcctctagttttttttttaagttgaatttcttttccactgtaacttaaaatttgagattgaggtttgcggtccaaaacataccctcagcagatacagtgactaactggaaagtgcagttgttcaagggctgtcatgctcaatcacctaaagctataatttgtttgatatatta

SEQ ID NO: 428 - DNA, 367 bp, Homo sapiens
gcccttagcgtggtcgcggccgaggtacagggaaggcctttcgggcagggcacatggttcactgccccatgacgtgataccttgaagcacaccattacagacaagtgggcccccagaatcacccgagcaggtgcttttgccccctgtccagcgtccagcacacagcatgaacttggtcaccttctgagggtgaacttgcgcacacacgtcattggaaataacatggaggtccacacactgaagtttctttggggtcaagaactcctctggttcaatgctgccccagcctgaggcgtagcaggtggtccccactgctggctcctgggtgggcaggtccatgaccttcacagcatccgtgagctcggca

SEQ ID NO: 429 - DNA, 745 bp, Homo sapiens
  misc_feature 2, 3, 4, 5, 6, 9, 11, 12, 13, 14, 15, 16, 17, 18, 19, 20,21, 22, 23, 24, 25, 26, 27, 28, 29, 30, 31, 32, 33, 34,35, 36, 37, 38, 39, 40, 41, 42, 43, 44, 45, 46, 47, 48,49, 50, 51, 52, 53, 54, 55, 56, 57, 58, 59, 60, 61, 62,63, 64: n = A,T,C or G
  misc_feature 65, 66, 67, 68, 69, 70, 71, 72, 73, 74, 75, 76, 77, 78, 79,80, 81, 82, 83, 84, 85, 86, 87, 88, 89, 90, 91, 92, 93,94, 95, 96, 97, 98, 99, 100, 101, 102, 103, 104, 105, 106,107, 108, 109, 110, 111, 112, 113, 114, 115, 116, 117, 118: n = A,T,C or G
  misc_feature 119, 120: n = A,T,C or G
gnnnnnttnannnnnnnnnnnnnnnnnnnnnnnnnnnnnnnnnnnnnnnnnnnnnnnnnnnnnnnnnnnnnnnnnnnnnnnnnnnnnnnnnnnnnnnnnnnnnnnnnnnnnnnnnnnnnnggtacccacgttttgctccacactccttgaccgcaggggctcggacacaaacccctgtcaccaggagagtcagtcagcactacttgggagggctaaagggaaatttggaaataaaattccaaagtttggagtaaaaaaattcaagtgttgattttatattctttccctttctgacacagcctaaagcgtagggggaacatgtgtttatctgtgggagataaacaagatggagtcccaaagactttaacaaaatatttttttaaaaatccactagaatagaaaatacattatttagatatactttatgctgagagtgagtatatatgcttgtcctatttaaacttgtgagaaaaagtggtatcccttgatacatttagaaatatgggggctatcttgtttcattgtgggggtggggcagaaggagaataaatgcaggatgaccctgttgaaggaatcttagcatggccaacaggggacgtttccagtcgattaccaggaaatgcaagccttggggtttctactggtggtggggctgtcatgaactttaaaatccaaagcctagacaaggaaaagtgttagaccaattgaaaagcaatccacccttttttttttttttttttggctt

SEQ ID NO: 430 - DNA, 421 bp, Homo sapiens
ggcacgaggagccacccgcgaaaattcggccagggttctcgctcttgtcgtgtctgttcaaaccggcacggtctgatccggaaatatggcctcaatatgtgccgccagtgtttccgtcagtacgcgaaggatatcggtttcattaagaaagacctgagctgtcttccttggcactgcctatggaggtgacacccatctcctccatcatggccatcctgagaccgctcgcgaagcccaagatcatcaaaaagagcaccaagttcactgggaaccagtcagactgatatgtcaaaattaagggtaactggtggaaacacagaggtattaacaacagggttcatagaaggtttgagggccagatctatgcccaacattggttatgggagaaacataaagacaaagcacatactgctggtgagca

SEQ ID NO: 431 - DNA, 322 bp, Homo sapiens
ggcacgagatgaatacagagcccgagaggaagtttggcgtggtggtggttggtgttggccgagccggctccgtgcggatgagggacttgcggaatccacacccttcctcagcgttcctgaacctgattggcttcgtgtcgagaagggagctcgggagcattgatggagtccagcagatttctttggaggatgctctttccagccaagaggtggaggtcgcctatatctgcagtgagagctccagccatgaggactacatcaggcagttccttaatgctggcaagcacgtccttgtggaataccccatgacactgtcattggc

SEQ ID NO: 432 - DNA, 393 bp, Homo sapiens
ggacacccttgtctagggaagaggtcttactggctgccctcacctgactttgtgtccccaggcccccagccatggccctgtccctgcctctgggccctagacttggctcagagcccctcaaccacccaccgggagcacctagagaggcggacattgttggatgcaccgtctgccccgcgtccggagaggagagcacgagcccagagcaggcccagaccctgggacaggactccttgggccctcctgagcacttccagggtgggccaaggggcaatgagcctgccgctcaccccccgagatggtcaacaccctcttctacgaggacccagctgggggcaaacactgtgaggaagcagacacctctactcccgacaggacatgctggagtctggc

SEQ ID NO: 433 - DNA, 568 bp, Homo sapiens
ttccgttgctgtcgctgccaacaaacccctgtcccaggtgctcctggagggacagaaggacggcttctacctctacccagatggaaagacccacaacccagacctgactgagctcggccaggcagaaccccagcagcgcatccacgtgtcagaggagcagctgcagctctactgggccatggactccacatttgagctctgcaagatctgtgctgagagcaacaaggatgtgaagattgagccgtgcgggcacctgctctgcagctgctgcctggctgcctggcagcactcggacagccagacctgccccttctgccgctgcgagatcaagggctgggaggccgtgagtatctaccagttccacggtcaggctactgctgaggactcagggaacagcagtgaccaggaaggcagggagttggagctggggcaggtgcccctttcggctcctccattgcccccacggccagatctgccccccaggaagcccagaaatgcccagccgaaagtgagactcctaaaggggaactcccctccagctgcgctgggaccccaggaccctgccccg

SEQ ID NO: 434 - DNA, 256 bp, Homo sapiens
gccctgagtcctgggatcagacaccccttcacgtgtatccccacacaaatgcaagctcaccaaggtcccctctcagtccccttccctacaccctgaccggccactgccgcacacccacccagagcacgccacccgccatgggagtgtgctcaggagtcgcgggcagcgtggacatctgtcccagagggggcagaatctccaatagaggactgagcactgaaaaaaaaaaaaaaaaaaaactccgggggccgttttt

SEQ ID NO: 435 - DNA, 380 bp, Homo sapiens
atgtggagtgtatgttcttttcacagtaatatatcccttttgtaacttcacttggttattttattgtaaatgagtccaaaattcttaatttaagagattgtatgtaatatttatttcattaattcctttccttgggtacgttaattatgaaagattgcatgatttcttgacagaaatcgatcttgatgctgtggaagtagttcgaggaacatcctatgagttctcttagaatgtataaaggttgtagcccatccaacttcaaagaaaataatgaccacatactttgcaatcatgctgacatgtggcatgcttttctaattccaactttataaactagcaaaaaagtgtttgcttattccaccagttctactgtgacatac

SEQ ID NO: 436 - DNA, 255 bp, Homo sapiens
ggcacgaggcgagatgacgaagggaacgtcatcgtttggaaagcgtcgcaataatacgcacacgttgtgccgccgctgtggctctaaggcctaccaccttcagaagtcgacctgtggcaaaagtggctaccctgccaagcgcaagagaaagtataactggagtgccaaggctaaaagacgaaataccaccggaactggtcgaatgaggcacctaaaaattgtataccgcagattcaggcatggattccgtgaagg

SEQ ID NO: 437 - DNA, 300 bp, Homo sapiens
atttcacgtgtcactgctttcgattgcacagctatttgactttgccaaagatctacaaaaagagatttatgatgaccttcaggctctacacacagatgatcctctcacttgggattatgtggcaaggcgagaattagagattgagtcacagacagaagagcagcctacaacgaaacaagccaaagcagtggaggtcggccggaaggaggagaggtgctgtgctgtgtatgaagaggcagtgaagactctgccaacagaggccatgtggaagtgttacatcaccttttgcttggaaagatt

SEQ ID NO: 438 - DNA, 432 bp, Homo sapiens
cttctctcaagacccaatccattcgtattccgttgacttgggagagtttgccaggtaaaagactttctccttcttaaaaaatatagggtgatttctttaaaactttgttatctagagacagtttaattacagttatatacaggtttatgcctaggatgtattcagatgggtgggacctgtgtgctgcttttgtcatcccacactcaaagttgtctctttgtttcttgctgccactgccagctcattgttgagactgccatttctttctcttactcagctctccccagtgccttttggccactgcagctaccgtagaatggcattttatatgtaccttgtcacccacttctgtttactttttcctctccagtaaaaaggaaaaaatttctttcaattggtcttcccattgcaggtactgatatttctcttttt

SEQ ID NO: 439 - DNA, 319 bp, Homo sapiens
tccttatttatttaacttcacccgagttcctctgggtttctaagcagttatggtgatgacttagcgtcaagacatttgctgaactcagcacattcgggaccaatatatagtgggtacatcaagtccatctgacaaaatggggcagaagagaaaggactcagtgtgtgatccggtttctttttgctcgcccctgttttttgtagaatctcttcatgcttgacatacctaccagtattattcccgacgacacatatacatatgagaatataccttatttatttttgtgtaggtgtctgccttcacaaatgtcatgtctact

SEQ ID NO: 440 - DNA, 423 bp, Homo sapiens
ggcacgagatggcatggagcgccgggacctctggtgcacagcctgccgctggaagaaagcctgccagcggttcctggactaagtccggctcgttcaagaacataagctaccaccttctccctccccaccccctccaggcccggggctgaaacagcccgaggacagccccaggggctggccttcaccagctgcagggtctgcttttacttggggtgggggggcggggctgaccctgaaccctcccccccgccaggtcggggaggggtcccaccactcaaagtgcctctaaagaaaccagctttttgcactaaagccaaaccacaccgctgtccccttagccccaagggccctgggggcagacaccctcccgcctgtcggcccgtagatatatcaagggtgttatgggcccagctttggggggcc

SEQ ID NO: 441 - DNA, 502 bp, Homo sapiens
ggcacgagggaagaagcgcgaagagccgttagtcatgccggtgtggtggcggcggcggagactgcgggcccgtagctgggctctgcgaggtgcaagaaagcctttgaggtgaaggtgtatgaaagtcatcataacagatgttttccaaaaacttgtagaaggttgtgaaaaaactactacgatcacgcggcatgtattgagcatataggttgctgtagatgaatgttcttagctgtcatgtttaaaaatacttctgcttcgttacctcaagtgtggcatgcagcattttggaaggaaaattgaagacgtgttcaagaaaacatgaacagaagcaaatgatgaaaatgagcattttacttgatgttgataacatcacaataaattatggagaaaaatacatatttggctaacttttaattgctgaacaataaagtgttttcttttaaatcaaaaaaaaaaaaaaaaaaaactcgagcctctagaactatagtgagtcgtatta

SEQ ID NO: 442 - DNA, 407 bp, Homo sapiens
cgcagtcttcgccaccatgccgccctacaccgtggtctatttcccagttcgaggccgctgcgcggccctgcgcatgctgctggcagatcagggccagagctggaaggaggaggtggtgaccgtggagacgtggcatgagggctcactcaaagcctcctgcctatacgggcagcttcccaagttccaggacggagacctcaccctgtaccagtccaataccatcctgcgtcacctgggccgcacccttgggctctatgggaaggaccagcaggaggcagccctggtggacatggtgaatgacggcgtggaggacctccgctgcaaatacatctccctcatctacaccaactatgaggcgggcaaggatgactatgtgaaggcactgcccgggcaactgaagccttttg

SEQ ID NO: 443 - DNA, 573 bp, Homo sapiens
ggcacgagctctattcagagcataccagaaattcctgatgacctgaagcaactttataaaactgtgtgggaaatctctcagaaaactgttctcaagatggcagctgagagaggtgctttcattgatcaaagccaatctttgaacatccacattgctgagcctaactatggcaaactcactagtatgcacttctacggctggaagcagggtttgaagactgggatgtattatttaaggacgagaccagcagctaatccaatccagttcactctaaataaggagaagctaaaagataaagaaaaggtatcaaaagaggaagaagagaaggagaggaacacagcagccatggtgtgctctttggagaatagagatgaatgtctgatgtgtggatcctgaggaaagacttggaagagaccagcatgtcttcagtagccaaactacttcttgagcatagataggtatagtgggtttgcttgaggtggtaaggctttgctggaccctgttgcaggcaaaaggagtaattgatttaaagtactgttaatgatgttaatgatttttttttaaactcatata

SEQ ID NO: 444 - DNA, 230 bp, Homo sapiens
cttgataagccttggacagaaccctccaccccgcagaccaagcgtcgtgtgtgtgtgggagagaaagacgcccgtgttgagctcatggagaccccggtgtgtccgctctttagcaatataacctacccagtgcgtgccgagcaagcttggtggggaagggactagagctgggcaagtactggcctggcacccgcagccgtctccctttcgtggaccaaggaggtgtttgc

SEQ ID NO: 445 - DNA, 403 bp, Homo sapiens
ggcttagcggataacaatttcacacaggagttgcaccataatcctctctcaaggacttcaaactctactcccactaatagctttttgatgacttctagcaagcctcgctaacctcgccttaccccccactattaacctactgggagaactctctgtgctagtaaccacgttctcctgatcaaatatcactctcctacttacaggactcaacatactagtcacagccctatactccctctacatatttaccacaacacaatggggctcactcacccaccacattaacaacataaaaccctcattcacacgagaaaacaccctcatgttcatacacctatcccccattctcctcctatccctcaaccccgacatcattaccgggttttcctctgaaaaaaaaaaa

SEQ ID NO: 446 - DNA, 360 bp, Homo sapiens
actatagggctttttttttttcgactttttaaagaagtaagcctttatttccttgttttgcaaataaaactggctaagttggttgctttttggggattagtcaaagagaccaaatcccatatcctcgtccgactcctccgacttttccttggcttcaaccttagctggggctgcagcagcagcaggagcagctgtggtggcagcagccacaggggcagcagccacaaaggcagatggatcagccaagaaggccttgaccttttcagcaagtgggaaggtgtaatccgtctccacagacaaggccaggactcgtttgtacccgttgatgataaaatggggtactgatgcaacagttgggta

SEQ ID NO: 447 - DNA, 587 bp, Homo sapiens
ttccgttgctgtcgcagaggctgggatcatggtagatggaaccctccttttactcctctcggaggccctggcccttacccagacctgggcgggctcccactccttgaagtatttccacacttccgtgtcccggcccggccgcggggagccccgcttcatctctgtgggctacgtggacgacacccagttcgtgcgcttcgacaacgacgccgcgagtccgaggatggtgccgcgggcgccgtggatggagcaggaggggtcagagtattgggaccgggagacacggagcgccagggacaccgcacagattttccgagtgaacctgcggacgctgcgcggctactacaatcagagcgaggccgggtctcacaccctgcagtggatgcatgctgcgagctggggcccgacaggcgcttcctccgcgggtatgaacagttcgcctacgacggcaaggattatctcaccctgaatgaggacctgcgctcctggaccgcggtggacacggcggctcagatctccgagcaaaagtcaaatgatgcctctgaggcggagcaccagagagcctacctggaagacacatgcgtgga

SEQ ID NO: 448 - DNA, 396 bp, Homo sapiens
gacagacatacccagcacaggggcctccaatgcaaggaggctttcatcttcagggacaatcaccatcttttaactctatgatgaatcagatgaaccagcaaggcaattttcctctccaaggaatgcacccacgagccaacatcatgagaccccggacaaacacccccaagcaacttagaatgcagcttcagcagaggctgcagggccagcagtttttgaatcagagccgacaggcacttgaattgaaaatggaaaaccctactgctggtggtgctgcggtgatgaggcctatgatgcagccccaggtgagctcccaacagggttttcttaatgctcaaatggtcgcccaacgcagcaaagagctgctaagtcatcacttccgacaacagagggtgg

SEQ ID NO: 449 - DNA, 390 bp, Homo sapiens
ccaacatggtgagtcttactgttgcgggctccggggccgtcgaccatgccgctcgacttccacctccgctgggaagctgaggcgccgaacggctcccagagggtcccgggaagcgcatggtgttcaggcgcttcgtggaggttggccgggtggcctatgtctcctttggacctcatgccggaaaattggtcgcgattgtagatgttattgatcagaacagggctttggtcgatggaccttgcactcaagtgaggagacaggccatgcctttcaagtgcatgcagctcactgatttcatcctcaagtttccgcacagtgcccaccagaagtatgtccgacaagcctggcagaaggcagacatcaatacaaaatgggcagccacacgatggg

SEQ ID NO: 450 - DNA, 1028 bp, Homo sapiens
  misc_feature 1, 2, 3, 5, 6, 7, 8, 9, 10, 11, 12, 14, 15, 16, 17, 18, 19,20, 21, 22, 23, 24, 25, 26, 27, 28, 29, 30, 31, 32, 33,34, 35, 36, 37, 38, 39, 40, 41, 42, 43, 44, 45, 46, 47,48, 49, 50, 51, 52, 53, 54, 55, 56, 57, 58, 59, 60, 61,62: n = A,T,C or G
  misc_feature 63, 64, 65, 66, 67, 68, 69, 70, 71, 72, 73, 74, 75, 76, 77,78, 79, 80, 81, 82, 83, 84, 85, 86, 87, 88, 89, 90, 91,92, 93, 94, 95, 96, 97, 98, 99, 100, 101, 308, 309, 310,311, 312, 313, 314, 315, 316, 317, 318, 319, 320, 321, 322: n = A,T,C or G
  misc_feature 619, 620, 621, 622, 623, 624, 625, 626, 627, 628, 629, 630,631, 632, 633, 634, 635, 636, 637, 638, 639, 640, 641, 642,643, 644, 645, 646, 647, 648, 649, 650, 651, 652, 653, 654,655, 656, 657, 658, 659, 660, 661, 662, 663, 664, 665: n = A,T,C or G
  misc_feature 666, 667, 668, 669, 670, 671, 672, 673, 674, 675, 676, 677,678, 679, 680, 681, 682, 683, 684, 685, 687, 688, 689, 693,697, 698, 699, 700, 705, 707, 708, 709, 710, 711, 712, 713,714, 725, 732, 755, 773, 777, 791, 792, 795, 799, 804: n = A,T,C or G
  misc_feature 816, 827, 831, 834, 836, 837, 840, 851, 871, 876, 877, 878,879, 886, 895, 896, 909, 922, 924, 927, 938, 939, 941, 943,944, 945, 946, 947, 955, 957, 962, 968, 981, 982, 983, 987,988, 997, 998, 999, 1017, 1028: n = A,T,C or G
nnngnnnnnnnngnnnnnnnnnnnnnnnnnnnnnnnnnnnnnnnnnnnnnnnnnnnnnnnnnnnnnnnnnnnnnnnnnnnnnnnnnnnnnnnnnnnnnnnnacgcggggctcggcgctgcctacggaggtggcagccatctccttctcggcatcatggccgccctcagaccccttgtgaagcccaagatcgtcaaaaagagaaccaagaagttcatccggcaccagtcagaccgatatgtcaaaattaagcgtaactggcggaaacccagaggcattgacaacagggttcgtagaagattcaagggcnnnnnnnnnnnnnnnaacattggttatggaagcaacaaaaaaaacaaagcacatgctgcccagtggcttccggaagttcctggtccacaacgtcaaggagctggaagtgctgctgatgtgcaacaaatcttactgtgccgagatcgctcacaatgtttcctccaagaaccgcaaagccatcgtggaaagagctgcccaactggccatcagagtcaccaaccccaatgccaggctgcgcagtgaagaaaatgagtaggcagctcatgtgcacgttttctgtttaaataaatgtaaaaactgcaaaaaaaaaannnnnnnnnnnnnnnnnnnnnnnnnnnnnnnnnnnnnnnnnnnnnnnnnnnnnnnnnnnnnnnnnnnannnaaancccnnnnaaaanannnnnnnnaaaaaggcttnttttaangggcaaattgggaaacctttttnattcaaaaatggcttttnccanggactggggaccannttncccnggggnccaaaattgggntttcctttaancccnttncnnaangggaatttttncccttgggccttgaaaaacnaagcnnnnaaaaagncccttgggnnggaaacccctttngggggaatttccncnccnttgggggggcnntntnnnnngggacccnanttggncccaanttttggggaaaannngggnnaaaaagggnnnccctgggggaaaatgttnccccccaaatn

SEQ ID NO: 451 - DNA, 1026 bp, Homo sapiens
  misc_feature 5, 6, 7, 8, 10, 20, 21, 22, 23, 24, 25, 26, 27, 28, 29, 30,31, 32, 33, 34, 35, 36, 37, 38, 39, 40, 41, 42, 43, 44,45, 46, 47, 48, 49, 50, 51, 52, 53, 54, 55, 56, 57, 58,59, 60, 61, 62, 63, 64, 65, 66, 67, 68, 69, 70, 71, 72,73: n = A,T,C or G
  misc_feature 74, 75, 76, 77, 78, 79, 80, 81, 82, 83, 84, 85, 86, 87, 88,89, 90, 91, 92, 93, 94, 95, 96, 97, 98, 99, 100, 101, 102,103, 104, 105, 106, 107, 552, 553, 554, 555, 556, 557, 558,559, 560, 561, 562, 563, 564, 565, 566, 567, 568, 569: n = A,T,C or G
  misc_feature 570, 571, 572, 573, 574, 575, 576, 577, 578, 579, 580, 581,582, 583, 584, 585, 586, 587, 588, 589, 590, 591, 592, 593,594, 595, 596, 597, 598, 599, 600, 601, 602, 603, 604, 605,606, 607, 608, 609, 610, 611, 612, 613, 614, 615, 616: n = A,T,C or G
  misc_feature 617, 618, 619, 620, 621, 622, 623, 624, 625, 626, 627, 628,629, 630, 631, 632, 633, 634, 635, 636, 637, 638, 639, 640,641, 642, 643, 644, 645, 646, 647, 648, 649, 650, 651, 652,653, 654, 655, 656, 657, 658, 659, 660, 661, 662, 663: n = A,T,C or G
  misc_feature 664, 665, 666, 667, 668, 669, 670, 671, 672, 673, 674, 675,676, 677, 678, 679, 680, 681, 682, 683, 684, 685, 686, 687,688, 689, 690, 691, 692, 693, 694, 695, 696, 697, 698, 699,700, 701, 702, 703, 704, 705, 706, 707, 708, 709, 710: n = A,T,C or G
  misc_feature 711, 712, 713, 714, 715, 716, 717, 718, 719, 720, 721, 722,723, 724, 725, 726, 727, 728, 729, 730, 731, 732, 733, 734,735, 736, 737, 738, 739, 740, 741, 742, 743, 744, 745, 746,747, 748, 749, 750, 751, 753, 777, 794, 822, 826, 830: n = A,T,C or G
ggagnnnntnaatcatacgnnnnnnnnnnnnnnnnnnnnnnnnnnnnnnnnnnnnnnnnnnnnnnnnnnnnnnnnnnnnnnnnnnnnnnnnnnnnnnnnnnnnnnnngcattttgtgcacacaaaatgtgcgcacacacacacacacacacacacagacactcctgcacatggcctgttaaagaactacaagggaggtgggacgcgggaaagtgtatggtgtgggtttgcatcgtctcatcattgattcttctcatatttttctctgattagagaaactaaagagaattttgtgagaaaggcttgaaagttaatgagttacttctaccaaagtgattacaagcagaaatcctcagatgctgtagagatgctgacccacacatccttagctcaaggaagcccctcgcattagtcaccttcagccatcagcagcctccaccattaaccccagtgtgctgtataaaaaatactttctacatgtgcccaaatttgaaaagttaggaagcactgatttcaaagcaaatcattcacatttgaactgtcttcagtgtannnnnnnnnnnnnnnnnnnnnnnnnnnnnnnnnnnnnnnnnnnnnnnnnnnnnnnnnnnnnnnnnnnnnnnnnnnnnnnnnnnnnnnnnnnnnnnnnnnnnnnnnnnnnnnnnnnnnnnnnnnnnnnnnnnnnnnnnnnnnnnnnnnnnnnnnnnnnnnnnnnnnnnnnnnnnnnnnnnnnnnnnnnnnnnnnnnnnnnncnactggcgtaattaaccaaaaaggnccggaccgaatcggccntttccaacaagttgggccaacctgaatnggcnaaanggcccccccctgtaaccggngccattaaacccccgncgggnnnntnggggtacccccaacggggaccggttaacttggccanggccttaaggcccggtccttttggtttnttncctttcntttttngcccntttnccnggnttttcccgnaaagntntaaaaagggggggtccccntttaggggtcccaataaagg

SEQ ID NO: 452 - DNA, 393 bp, Homo sapiens
  misc_feature 393: n = A,T,C or G
ggcacgaggtgacatcaaggctcaacctgtggatcagcaggacccaggaatctggagatcaggacccccaggaggcacagaaagcatcatctgcaaccgagaggactcagtggggacagaaatctgactcctcgctggacgctgaggtgtgacaagccccgccaagacagacctgcaagtcttcatctcaagggacctccctcatgccaggcccctgcctctcacagcagcaccctttcctctcattgtccctgttccctttttgcctgtggatctgtttggccagggtccctggggtcaggaatatttgcaagactcagccagctccttcccagcccagcctcttggggctgggactttctcaccctgcggcaggcacaacagatgctgggn

SEQ ID NO: 453 - DNA, 469 bp, Homo sapiens
tgatgccagcagctaggactgggagagataggagaagtaggactgctgtgattaggacggatcagacgaagaggggcgtttggtattgggttatggcagggggttttatattgataattgttgtgatgaaattgatggcccctaagatagaggagacacctgctaggtgtaaggagaagatggttaggtctacggaggctccagggtgggagtagttccctgctaagggagggtagactgttcaacctgttcctgctccggcctccactatagcagatgcgagcaggagtaggagagagggaggtaagagtcagaagcttatgttgtttatgcggggaaacgccatatcgggggcaccgattattaggggaactagtcagttgccaaagcctccgattatgatgggtattactatgaagaagattattacaaatgcatgggctgtgacgataacgttgtagatgtggtc

SEQ ID NO: 454 - DNA, 285 bp, Homo sapiens
tccgttgctgtcgcaaggacctggctatggtggcttcagacatgatggttcgtcctgaagaccttcttcagttgccacaaagaattccagacagttccattctacattttctcagagtcctatggaggaaaaatggcagctggcattggtctagagctttataaggccattcagcgagggaccatcaagtgcaactttgcgggggttgccttgggtgattcctggatctcccctgttgattcggtgctctcctggggaccttacctgtacagcatgtctcttctc

SEQ ID NO: 455 - DNA, 53 bp, Homo sapiens
tgactacctcagcctgtcagccatcatcgatggcaagatcttctgcgtgcacg

SEQ ID NO: 456 - DNA, 405 bp, Homo sapiens
gcaggatgtcctccagtttcagaagaaccagaccaacctggagaggaagttctcctacgacctgagccagtgcatcaatcagatgaaggaggtgaaggaacagtgtgaggagcgaatagaagaggtcaccaaaaaggggaatgaagctgtagcttccagagacctgagtgaaaacaacgaccagagacagcagctccaagccctcagtgagcctcagcccaggctgcaggcagcaggcctgccacacacagaggtgccacaagggaagggaaacgtgcttggtaacagcaagtcccagacaccagcccccagttccgaagtggttttggattcaaagagacaagttgagaaagaggaaaccaatgagatccaggtggtgaatgaggagcctcagagggacaggct

SEQ ID NO: 457 - DNA, 607 bp, Homo sapiens
ggcacgagctcagacatatgaagaagctctatataaatccaagacaagcaacaaacccttgatgattattcatcacttggatgagtgcccacacagtcaagctttaaagaaagtgtttgctgaaaataaagaaatccagaaattggcagagcagtttgtcctcctcaatctggtttatgaaacaactgacaaacacctttctcctgatggccagtatgtccccaggattatgtttgttgacccatctctgacagttagagccgatatcactggaagatattcaaaccgtctctatgcttacgaacctgcagatacagctctgttgcttgacaacatgaagaaagctctcaagttgctgaagactgaattgtaaagaaaaaaaatctccaagcccttctgtctgtcaggccttgagacttgaaaccagaagaagtgtgagaagactggctagtgtggaagcatagtgaacacactgattaggttatggtttaatgttacaacaactattttttaagaaaaacaagttttagaaatttggtttcaagtgtacatgtgtgaaaacaatattgtatactaccatagtgagccatgattttctaaaaaaaaa

SEQ ID NO: 458 - DNA, 459 bp, Homo sapiens
ggaggagcgcgcgggcacagggtgccgctgaccgaggcgtgcaaagactccagaattggaggcatgatgaagactctgctgctgtttgtggggctgctgctgacctgggagagtgggcaggtcctgggggaccagacggtctcagacaatgagctccaggaaatgtccaatcagggaagtaagtacgtcaataaggaaattcaaaatgctgtcaacggggtgaaacagataaagactctcatagaaaaaacaaacgaagagcgcaagacactgctcagcaacctagaagaagccaagaagaagaaagaggatgccctaaatgagaccagggaatcagagacaaagctgaaggagctcccaggagtgtgcaatgagaccatgatggccctctgggaagagtgtaagccctgcctgaaacagacctgcatgaagttctacgcacgcgtctgcagaagtggc

SEQ ID NO: 459 - DNA, 537 bp, Homo sapiens
  misc_feature 7, 91, 327, 397, 470: n = A,T,C or G
ctcgcancagcgatgagacaagaccgacctcaaccccgacaacctgcagggcggcgacgactggaccccaactacgtgctgagctcgcggngtgccacgggccgcagcatccgtggcttctgcctccccccgcactgcagccgcggggagcccggccatcgagaagctcgcggtggaagccctgtccagcctggacggcgacctggcgggccgatactacgcgctcaagagcatgacggaggcggacagcagcagctcatcgacgaccacttcctcttcgacaagcccgtgtcgcccctgctgctggcctcgggatggcccggactngcccgacgcccgcggtatctggcacaatgacaataagactttctggtgtgggtcaacgaggaggaccacntgcgggttcattttccattgcagaaggggggcaacatggaaggaggtttttcaaccgtttttgcaccggcttnaaccagatttgaaatttttttcaattttaaggattttgagtttatgttggaaccttaattgggttat

SEQ ID NO: 460 - DNA, 502 bp, Homo sapiens
  misc_feature 30, 342, 396, 429, 438, 452, 487: n = A,T,C or G
tggccccgatgggatggagcccgaagcgtncatcgagagtaactggaatgagattgttgacagctttgatgacatgaacctctcggagtcccttctccgtggcatctacgcctatggttttgagaagccctctgccatccagcagcgagccattctaccttgtatcaagggttatgatgtgattgctcaagcccaatctgggactgggaaaacggccacatttgccatatcgattctgcagcagattgaattagatctaaaagccacccaggccttggtcctagcacccactcgagaattggctcagcagatacagaaggtggtcatgggcactagggagantacatggggcgcctcctgttcacgcctgttattcgggggcaccaacgtgcgtgnttgaggttgcaggaaattgcagatgggaagttncccacatcntcgtggggtacccntgggcctgtttttttgatatggtttaacccgaganaactttttcccccaa

SEQ ID NO: 461 - DNA, 392 bp, Homo sapiens
caaataaccaccagctacagcttgctggagcattggcaattgcaaattttgccagaaatgatgcaaattgtattcatatggtagacaatgggattgtagaaaaacttatggatttactggacagacatgtagaagatggaaatgtaacagtacagcatgcagcactaagtgccctcagaaacctggccattccagttataaataaagcaaagatgttatcagctggggtcacagaggcagttttgaaatttcttaaatctgaaatgcctcctgttcagttcaaacttctgggaacattaagaatgttaatagatgcacaagaagctgctgaacaattgggaaagaatgttaagttagtggagcgtttggtggaatggtgtgaaacccaaaat

SEQ ID NO: 462 - DNA, 124 bp, Homo sapiens
tatgattcacacaagtttgaggatgctggggagagggggagggggctgaggtggtgttctgttggttacaagaaagttataccatttaaagctggcaccagagacccgatagggacttattaac

SEQ ID NO: 463 - DNA, 256 bp, Homo sapiens
gagagagagagagagagagagagagagagagagagagagagagagagagagagagagagagagagagagagagagagagagagagagagagagagagagagagagagagagagagagagaggagaagtctcgcgatagccagccgcggctgcccttgcgcttcccgagctggcggggtccgtggtgcgggatcgagattgcgggctatggcgccgaaggtttttcgtcagtactgggatatccccgatggcaccga

SEQ ID NO: 464 - DNA, 511 bp, Homo sapiens
ggcacgaggttcaggccagatcccccagcgggtggtatggccaggccctgtacctgcatcccttagtttggcactgttggagtcagtgctgcgccatgttggactcaatgaagtgcacaaggctgtggggctcctgctggaaactctagggcccccacccactggcctgcacctgcagaggggaatctaccgtgagatattattcctgacaatggctgctctgggcaaggaccacgtggacatagtggccttcgataagaagtacaagtctgcctttaacaagctggccagcagcatgggcaaggaggagctgaggcaccggcgggcgcagatgcccactcccaaggccattgactgccgaaaatgttttggagcacctccagaatgctagagaccttaagcttccctctccagcctagggtggggaagtgaggaagaagggattctagagttaaactgcttccctgttgccttcatggagttgggaacaggctgggaaggatgcccagtc

SEQ ID NO: 465 - DNA, 485 bp, Homo sapiens
ggcacgagactgccccccaggctgctagatgtaggtgttaggcatgtcccacccacccgccgcctcccacggcacctcggggacaccagagctgccgacttggagactcctggtctgtgaagagccggtggtgcccgtgcccgcaggaactgggctgggcctcgtgcgcccgtggggtctgcgcttggtctttctgtgcttggatttgcatatttattgcattgctggtagagacccccaggcctgtccaccctgccaagactcctcaggcagcgtgtgggtcccgcactctgcccccatttccccgatgtcccctgcgggcgcgggcagccacccaagcctgctggctgcggccccctctcggccaggcattggctcagcccgctgagtggggggtcgtgggccagtccccgaggagctgggcccctgcacaggcacacagggcccggccacacccagcggccccccgcacagccacccgtggg

SEQ ID NO: 466 - DNA, 493 bp, Homo sapiens
atctgctgctcgtctcaggctcgtagttcgccttcaacatgccggaaccagcgaagtccgctcccgcgcccaagaagggctcgaagaaagccgtgactaaggcgcagaagaaggacggcaagaagcgcaagcgcagccgcaaggagagctactccgtatacgtgtacaaggtgctgaagcaggtccaccccgacaccggcatctcctctaaggccatgggaatcatgaactccttcgtcaacgacatcttcgaacgcatcgcgggtgaggcttcccgcctggcgcattacaacaagcgctcgaccatcacctccagggagatccagacggccgtgcgcctgctgctgcccggggagttggccaagcacgccgtgtccgagggcaccaaggccgtcaccaagtacaccagcgctaagtaaacttgccaaggagggactttctctggaatttcctgatatgaccaagaaagcttcttatcaaaagaagcacaatt

SEQ ID NO: 467 - DNA, 463 bp, Homo sapiens
acccggccggaagccgctgtcggggagccggcggtggggctggacgcaggtgcaactgacatgggtgaaccccagggatccatgcggattctagtgacagggggctctgggctggtaggcaaagccatccagaaggtggtagcagatggagctggacttcctggagaggactgggtgtttgtctcctctaaagacgccgatctcacggatacagcacagacccgcgccctgtttgagaaggtccaacccacacacgtcatccatcttgctgcaatggtggggggcctgttccggaatatcaaatacaatttggacttctggaggaaaaacgtgcacatgaacgacaacgtcctgcactcggacttcgaggtgggcgcccgcaaggtggtgtcctgcctgtccacctgtatcttccctgacaagacgacctacccgatagatgagaccatgatccacaatgggc

SEQ ID NO: 468 - DNA, 405 bp, Homo sapiens
cgttgctgtcgctgctccgaggttgaaatagactgcctgacgggggatcataagaggcattctgcacactcgtggtccagaccaatataaaatccctgccatctgtgacatgcccacggagttgcacattgctttgttgcctccttctcaaaactcaaatactctttattcatctaagggtctgggagagtcgggggtgttcctggggtgttccgtgtttttcgctatccatgacgcagtgagtgcagcacgacaggagagaggcctgcatggacccttgacccttaatagtccactgaccccggagaagattaggatggcctgtgaagacaagttcacaaaaatgattccgagagatgaacctggatcctacgttccttggaatgtacccatctgaatcaaatg

SEQ ID NO: 469 - DNA, 432 bp, Homo sapiens
gaccaagcagctgggtgacttctggacacggatggaggagctccgccaccaagcccggcagcagggggcagaggcagtccaggcccagcagcttgcggaaggtgccagcgagcaggcattgagtgcccaagagggatttgagagaataaaacaaaagtatgctgagttgaaggaccggttgggtcagagttccatgctgggtgagcagggtgcccggatccagagtgtgaagacagaggcagaggagctgtttggggagaccatggagatgatggacaggatgaaagacatggagttggagctgctgcggggcagccaggccatcatgctgcgctcagcggacctgacaggactggagaagcgtgtggagcagatccgtgaccacatcaatgggcgcgtgctctactatgccacctgcaagtgatgctacag

SEQ ID NO: 470 - DNA, 419 bp, Homo sapiens
ccctgaggaggcacagcgccttctgccacctctgggcacggcctcaaggtaatgaggctaggaggttttttctgaccaatagctgagttcttgggagaggagcagctgtgcctgtgtgattccttagtgtcaagtgggctctgggctggggtcggccctgggcaggcttctcctgcaccttttgtctgctgggctgagggacacgagggcaaccctgtgacaatggcaggtagtgtgcatccgtgaatagcccaatgcgggggttgctcatggagcatactgaggccgtgcagcagggagccccatgcccctgggtcgtgagcttgcctgcgtatggcgtggtgtcatggagcctcatgcccctgggtcgtgagctcgcctgagtatggggtggtgtcatggaaccgcatacccctggg

SEQ ID NO: 471 - DNA, 498 bp, Homo sapiens
ttcgtttcggtttctagggttgttacgaagctgcaggagcgagatggaggtggacgcaccgggtgttgatggtcgagatggtctccgggagcggcgaggctttagcgagggagggaggcagaacttcgatgtgaggcctcagtctggggcaaatgggcttcccaaacactcctactggttggacctctggcttttcatccttttcgatgtggtggtgtttctctttgtgtattttttgccatgacttgttcgctgatatctaaattaagaagttggttcttgagtgaattctgaaaatggctacaaacttcttgaataaagaagacaggactctcaatagaagaatttcacatctccaagggacccttcctttcattttacactttgttactaatttgcagaactctattaattgggtaggatttcacccattcctagctaagttcttaaaattaaaccctttggttcgtgtttaaaaactttcaaacatctgatggc

SEQ ID NO: 472 - DNA, 517 bp, Homo sapiens
acgagattttaacagctttacatgtaatattcatatataaaaaactttaagtgcttttctccaatttaaaaatctaaagaattcaaaaataaggcattcaatatttgaaaaaagtacagatttacaaaatgtgtatattctgtcatgaaaactccacaccaacattatacacttggaaaaaaatacaaacaggatatattacaaatttatgcagcaataacttagttcacaccatgcaataaaaagtacattaatcaagatacacaagcttttgtaggttctaaactgaaggacttttttctttttttttctgcagaatccttaaaacctgtggcacttaaaatttgttagcctttctaatgagaggtaaattatacacaacaatgatgaaaaagattaacagaccagttgtctattatgaatcattccagctttgttcaacaatggccgaaactcttttctcatattctcgtttgttttcctgataaagctgtgctgcctggctattggctggact

SEQ ID NO: 473 - DNA, 168 bp, Homo sapiens
gccatctatgcctcacagactgagcaagagtatctaaagatagaaaaaggagacggtggctcagggagtaaaggaaggccagttgagcaaacagaagtgttcctctgcatttcaaaaccttcttcctttctatagccctgtggtggaagattttattaaaatcctacg

SEQ ID NO: 474 - DNA, 404 bp, Homo sapiens
cgttgctgtcgcaactatttacaaagcatttacattgtattagctattataggtaatctagagatgatttaaagtgtatggtaggatgtgcacaggttatatgcaaatactacaccattttctataagggacttgaacatcatggactttagtatcctagggggttcttggaacccatcacccataggggcaccataggacaactatagtaccgtgtttatttcctattaattcaggttccgtttagagtctaaaactaaaacctaatcatttagtcacagtgtaaaaacaaatggaaataacagctcaaatcttcaaaatattactatagcattatgtttaaaataatctacaacaaaaatgtaccattttcaagcagtactacattaggagcccttttatag

SEQ ID NO: 475 - DNA, 374 bp, Homo sapiens
aactccgtgctgtcgaggaaagctgacgtgggagggcggaccctgagctactttggagacataatgcccttgctgatgggggagagacgacgcactggcctttttgtacgcctgaggtcagggggagcgggtgtaagacttagtttcctttccatttcttcctagtctggcctttgacacaaatctggtagaaagaagcctgataaattgagggcacttgtaccctccctgtgcccccagaaggttcttggagagaagtgcaagaatttgtgaacacggcggtggagggcgggtggatggccatgggctgggcctccgtatcaggcctgctcaccttgctgggagctttattctgatctcattttgaatgttcc

SEQ ID NO: 476 - DNA, 391 bp, Homo sapiens; identical to SEQ ID NO: 144

SEQ ID NO: 477 - DNA, 357 bp, Homo sapiens
gcaacgacctgccttgggcggggccggcacgctggagggcgtggaggcgtcgctgttctaccagtgtctggaaaacctgtgtgatcggcacaagtacagctgcccacccccagcacttgtcaaagaggccctcagcaatgttcagagactgaccttctatggattcctcatggctctctcaaagcaccgtggaatcaaccaagccctcggagctttgcctgacaagggggatctgatgcacgacccagcaatggatgaagagctggaacggctgtaagtgtcaagtgggaggatactgcccccttgtgggggccagacgggtcggacacggctgtgccccatctggggccaacacca

SEQ ID NO: 478 - DNA, 503 bp, Homo sapiens
tagttggtgaagatacagaacgtgccaactctatgggcctgtttctgcagaaaacaaacatcatccgtgactatctggaagaccagcaaggaggaagagagttctggcctcaagaggtttggagcaggtatgttaagaagttaggggattttgctaagccggagaatattgacttggccgtgcagtgcctgaatgaacttataaccaatgcactgcaccacatcccagatgtcatcacctacctttcgagactcagaaaccagagtgtgtttaacttctgtgctattccacaggtgatggccattgccactttggctgcctgttataataaccagcaggtgttcaaaggggcagtgaagattcggaaagggcaagcagtgaccctcatgatggatgccaccaatatgccagctgtcaaagccatcatatatcagtatatggaagagatttatcatagaatccccgactcagacccatcttctagcaaaacaaggcagatcatc

SEQ ID NO: 479 - DNA, 484 bp, Homo sapiens
tatttcctgattttaaaaatcgtcaccatcatagacctcctggcttctcttgtatctgtgttctaatggctcccagcagtgccttcacacagcccctttattccccttcttgtgcctgcccatgagcctgagtgtgacagatcaattagctttgtccctccaaactgtgggagcaggactagactcttctggcaggcagagagctcctcctcggccagtgttcgagcctggtccaccactcctcagttcttcttgctcttggcttttgtggccttggcatccagcgtgctctgggcatgagtgaggtgcttcacagcatcaagcacaaggactccaggcagcaccagccacagggcattcatgaagacaaagtaaaaccagaagtagagagggtggcccagctctccgtgctggaatccgtcgcggtgctctgtcaggaagtagagcacatccccatagatctggcccacagagaccacaagct

SEQ ID NO: 480 - DNA, 509 bp, Homo sapiens
ggcacgaggttaagacctgcaataatccagaatggctactctgatctatgttgataaggaaaatggagaaccaggcacccgtgtggttgctaaggatgggctgaagctggggtctggaccttcaatcaaagccttagatgggagatctcaagtgtcaacaccacgttttggcaaaacgttccatgccccaccagccttacctaaagctactagaaaggctttgggaactgtcaacagaactacagaaaagtctgtaaagaccaagggacccctcaaacaaaaacagccaagcttttctgccaaaaagatgactgagaagactgttaaagcaaaaagctctgttcctgcctcagatgatgcctatccagaaatagaaaaattctttcccttcaatcctctagactttgagagttttgacctgcctgaagagcaccagattgcgcacctccccttgagtggagtgcctctcatgatccttgacgaggagagagagcttgaaaagctgtttc

SEQ ID NO: 481 - DNA, 530 bp, Homo sapiens
ggcacgaggcgacccggcggcgggacaggcttgctgcttccttctcctcggcctcaccattccagaccaaaattgaaaaaatggttgacctcacccaggtaatggatgatgaagtattcatggcttttgcatcctatgcaacaattattctttcaaaaatgatgcttatgagtactgcaactgcattctatagattgacaagaaagagcccacctgaatgaccttgaaaatattattccatttcttggaattggcatcctgtattccttgagtggtcccgacccctctacagccatcctgcacttcagactatttgtcggagcacggatctaccacaccattgcatatttgacaccccttccccagccaaatagagctttgagtttttttgttggatatggagttactctttccatggcttacaggttgctgaaaagtaaattgtacctgtaaagaaaatcatacaactcagcatccagttggctttttaagaattctgtacttccaatttataatgaatactttcttag

SEQ ID NO: 482 - DNA, 414 bp, Homo sapiens
ggcttagcggataacaatttcacacaggattttggctccaacattccttttggcttgaccagtctaatttaaaatgtgtttgttggaggtcattaacgttacttgtacaatgctgtcactgtgtgacatccatatgaattttggtatatatcaatcaatcaatcaatcacattgcattcaatcaatcagctgtgattgattgattatgcttagaaatactatagtaactagatgcagtgtgaattttttccattaacaaacaaacaagtcagtggcttaaatgtgattatggtcctgcaaggtgattcttgctaaaatatctaaacttttgttttgttttaactgaatcattttttaacttaaaaagctggaaaatatcaaatgctgtttttttttttcattgtcaacaggggg

SEQ ID NO: 483 - DNA, 350 bp, Homo sapiens
aatcctctctcaaggacttcaaactctactcccactaatagctttttgatgacttctatcaagcctcgctaacctcgccttaccccccactattaacctactgggagaactctctgtgtagtaaccacgttctcctgatcaaatatcactctcctacttacaggactcaacatactagtcacagccctatactccctctacatatttaccacaacacaatggggctcactcacccaccacattaacaacataaaaccctcattcacacgagaaaacgccctcatgttcatacacctatcccccattctcctcctatccctcaaccccgacatcattaccgggttttcctc

SEQ ID NO: 484 - DNA, 572 bp, Homo sapiens
actttttaaagaagtaagcctttatttccttgttttgcaaataaaactggctaagttggttgctttttggtgattggtcaaagagaccaaatcccatatcctcgtccgactcctccgactcttccttggcttcaaccttagctggggctgcagcagcagcaggagcagctgtggtggcagcagccacaggggcagcagccacaaaggcagatggatcagccaagaaggccttgaccttttcagcaagtgggaaggtgtaatccgtctccacagacaaggccaggactcgtttgtacccgttgatgatagaatggggtactgatgcaacagttgggtagccaatctgcagacagacactggcaacattgcggacaccctccaggaagcgagaatgcagagtttcctctgtgatatcaagcacttcagggttgtagatgctgccattgtcgaacacctgctggatgaccagcccaaaggagaagggggagatgttgagcatgttcggcagcgtggcttcgctggctcccactttgtctccagtcttgatcagctgcacatcactcaggatttca

SEQ ID NO: 485 - DNA, 563 bp, Homo sapiens
  misc_feature 436, 457, 550: n = A,T,C or G
tgaaatcctgagtgatgtgcagctgatcaagactggagacaaagtgggagccagcgaagccacgctgctgaacatgctcaacatctcccccttctcctttgggctggtcatccagcaggtgttcgacaatggcagcatctacaaccctgaagtgcttgatatcacagaggaaactctgcattctcgcttcctggagggtgtccgcaatgttgccagtgtctgtctgcagattggctacccaactgttgcatcagtaccccattctatcatcaacgggtacaaacgagtcctggccttgtctgtggagacggattacaccttcccacttgctgaaaaggtcaaggccttcttggctgatccatctgtctttgtggctgctgcccctgtggctgctgccaccacagctgctcctgctgctgctgcagccccagctaangttgaagccaaggaagagtcngaggagtcggacgaggatatgggatttggtctctttgactaatcaccaaaaagcaaccaacttagccagttttatttgcaaaacaaggaaatnaaggcttacttct

SEQ ID NO: 486 - DNA, 411 bp, Homo sapiens
caagtagctttccacatttgtcacagaaatcagaggagagatggtgttgggagccctttggagaacgccagtctcccaggccccctgcatctatcgagtttgcaatgtcacaacctctctgatcttgtgctcagcatgatctttaatagaagttttattttttccgtgcactctgctaatcatgtgggtgagccagtggaacagcgggagacctgtgctagttttacagattgcctcccttatgacgcggctcaaagaaccaagttgtcagattgttccgacccactgatctcctactaccacaagagaatagtttagaataaccagctttactgttttgaaattacagctcccccctgtccatttaacaagatgcccgtgcccaataaggttcctccccactttgaattc

SEQ ID NO: 487 - DNA, 335 bp, Homo sapiens
ccgttgctgtcggcaggttgcggagggagcaagggtgaccgcagtccctgtgtcagctgccgacagcactgaggagttggccgaagtcgaagaaggagttggagtagtgggcgaagataatgacgcagccgcgagaggagcggaggcctttggcgacagtgaggaggacggagaggatgtgttcgaggtggagaagatcctggacatgaagaccgaggggggtaaagttctttacaaagttcgctggaaaggctatacatcggatgatgatacctgggagcccgagattcacctggaggactgtaaagaagtgcttcttgaatttaggaagaaaa

SEQ ID NO: 488 - DNA, 396 bp, Homo sapiens
cgttgctgtcgggactacaaaggcatttcttcctgcaatgacgaagaataaccatggccatattgtcactgtggcttcggcagctggacatgtctcggtccccttcttactggcttactgttcaagcaagtttgctgctgttggatttcataaaactttgacagatgaactggctgccttacaaataactggagtcaaaacaacatgtctgtgtcctaatttcgtaaacactggcttcatcaaaaatccaagtacaagtttgggacccactctggaacctgaggaagtggtaaacaggctgatgcatgggattctgactgagcagaagatgatttttattccatcttctatagcttttttaacaacattggaaaggatccttcctgagcgtttcct

SEQ ID NO: 489 - DNA, 345 bp, Homo sapiens
  misc_feature 309, 315, 340: n = A,T,C or G
gcggcacgagtcgatctgctgctcgtctcaggctcgtagttcgccttcaacatgccggaaccagcgaagtccgctcccgcgcccaagaagggctcgaagaaagccgtgactaaggcgcagaagaaggacggcaagaagcgcaagcgcagccgcaaggagagctactccgtatacgtgtacaaggtgctgaagcaggtccaccccgacaccggcatctcctctaaggccatgggaatcatgaactccttcgtcaacgacatcttcgaacgcatcgcgggtgaggcttcccgcctggcgcattacaacaangcgctngaccatcacctccagggagatccanacggc

SEQ ID NO: 490 - DNA, 1092 bp, Homo sapiens
  misc_feature 2, 4, 5, 6, 7, 8, 9, 11, 12, 13, 14, 15, 16, 17, 18, 19,20, 21, 22, 23, 24, 25, 26, 27, 28, 29, 30, 31, 32, 33,34, 35, 36, 37, 38, 39, 40, 41, 42, 43, 44, 45, 46, 47,48, 49, 50, 51, 52, 53, 54, 55, 56, 57, 58, 59, 60, 61,62, 63: n = A,T,C or G
  misc_feature 64, 65, 66, 67, 68, 69, 70, 71, 72, 73, 74, 75, 76, 77, 78,79, 80, 81, 82, 83, 84, 85, 86, 87, 88, 89, 90, 91, 92,93, 94, 95, 96, 97, 98, 99, 100, 101, 102, 348, 349, 350,351, 352, 353, 354, 355, 356, 357, 358, 359, 360, 491, 492: n = A,T,C or G
  misc_feature 493, 494, 495, 496, 497, 498, 499, 500, 501, 502, 503, 504,505, 506, 507, 508, 509, 510, 511, 512, 513, 514, 515, 516,517, 518, 519, 520, 521, 522, 523, 524, 525, 526, 527, 528,529, 530, 531, 532, 533, 534, 535, 536, 537, 538, 539: n = A,T,C or G
  misc_feature 540, 541, 542, 543, 544, 545, 546, 547, 548, 549, 550, 551,552, 553, 554, 555, 556, 557, 558, 559, 560, 561, 562, 563,564, 565, 566, 567, 568, 569, 570, 571, 572, 573, 574, 575,576, 577, 578, 579, 580, 581, 582, 583, 584, 585, 586: n = A,T,C or G
  misc_feature 587, 588, 589, 590, 591, 592, 593, 594, 595, 596, 597, 598,599, 600, 601, 602, 603, 604, 605, 606, 607, 608, 609, 610,611, 612, 613, 614, 615, 616, 617, 618, 619, 620, 621, 622,623, 624, 625, 626, 627, 628, 629, 630, 631, 632, 633: n = A,T,C or G
  misc_feature 634, 635, 636, 637, 638, 639, 640, 641, 642, 643, 644, 645,646, 647, 648, 649, 650, 651, 652, 653, 654, 655, 656, 657,658, 659, 660, 661, 662, 663, 664, 665, 666, 667, 668, 669,670, 671, 672, 673, 674, 675, 676, 677, 678, 679, 680: n = A,T,C or G
gngnnnnnntnnnnnnnnnnnnnnnnnnnnnnnnnnnnnnnnnnnnnnnnnnnnnnnnnnnnnnnnnnnnnnnnnnnnnnnnnnnnnnnnnnnnnnnnnnnnacagagatgaaagaggggtgggatccacactgagagagtggagagtgacatgtgctggacactgtccatgaagcactgagcagaagctggaggcacaacgcaccagacactcacagcaaggatggagctgaaaacataacccactctgtcctggaggcactgggaagcctagagaaggctgtgaaccaaggagggagggtcttcctttggcatgggatggggatgaagtaaggagagggactggannnnnnnnnnnnngattcactatggggggaggtgtattgaagtcctccagacaaccctcagatttgatgatttcctagtagaactcacagaaataaagagctgttatactgcgaaaaaaaaaaaaaaaaaaaaaaaaaaagtannnnnnnnnnnnnnnnnnnnnnnnnnnnnnnnnnnnnnnnnnnnnnnnnnnnnnnnnnnnnnnnnnnnnnnnnnnnnnnnnnnnnnnnnnnnnnnnnnnnnnnnnnnnnnnnnnnnnnnnnnnnnnnnnnnnnnnnnnnnnnnnnnnnnnnnnnnnnnnnnnnnnnnnnnnnnnnnnnnnnnnnnnnnnnnnnnnnnnnnnnnnnnnnnnnnnnnnnnnnnnnnnnnnnnnnnnnnnnnnnnnnnnnnnnnnnnnnnnnnnnnnnnnnnnnnnnnnnnnnnnnnnnnnnnnnnnnnnnnnnnnnnnnnnnnnnnnnnnnnnnccacgtgacccgntacactttgcccagngnccttaacgcccggttccttttgctttcttncctttcctttttttgccccgtttnnccgggtttttccccgttaaagctnttaaatcggggggcttncccnttttaggggttcccnaattaanggctttacngggncctttgaacccccaaaaaaantttnnttttngggggggaagggttcncctagggggccatttncccctnnaaaaaagggtttttnnccccntttgacnnttgggaacccccnttn

SEQ ID NO: 491 - DNA, 566 bp, Homo sapiens
tcgctagctccgcctgcggtacgtgctcccgcctccgactcaaaatgcctgtctggggaggtggaaacaagtgtggggcctgtgggaggaccgtgtaccacgcagaagaggtgcagtgtgatggcaggagcttccaccgctgctgctttctctgcatggtttgcaggaaaaatttagatagcacaacagtggcaattcacgatgaagagatctactgcaaatcctgctacggaaagaagtatgggccaaaaggctacggttatggccagggcgctggcacgcttaacatggaccgtggcgagaggctgggcatcaaaccagagagtgttcagcctcacaggcctacaacaaatccaaacacttctaaatttgctcagaaatatggaggtgctgagaagtgttccagatgtggggattctgtatatgctgccgagaagataattggagctggaaagccctggcacaaaaactgtttccgatgtgcaaagtgtgggaagagtcttgaatcaacaactctgactgaaaaagaaggtgaaatctattgtaaaggatgctatgcaaagaac

SEQ ID NO: 492 - DNA, 478 bp, Homo sapiens
gacttcaggaaaaatcaacccagcaccagcagctaccaaccaccattccatctcttcacttgaacagcattagttaagtccagatgtgggaacccttctcttggaagaagttcctaattgtgtctcagaccggtgtaaacaaaccagccagccgccaccttgctaaacctataagctttttaaaatccaatatattctgccaagaatatgccttgatagttagccctcagcccataggtgttttttgttttttaacagaattatatatgtctgggggtgaaaaaacccttgcattccaaaggtccatactggttacttggtttcattgccaccacttagtggatgttcagtttagaaccattttgtctgctccctctggaagccttgcgcagagcttactttgtaattgttggagaataactgctgaatttttagctgttttgagttgattcgcaccactgcaccacaactcaatatg

SEQ ID NO: 493 - DNA, 400 bp, Homo sapiens
cgttgctgtcggtaattacaaattaagggttaaatcagagattattcaacagagagggagaaaggaggagacagagggaggacctgttgtgttccagccattctggtattcctttatgtatctaatttcattcaaacctcacaacagtcttgtgaggcccttatataattactcccattttgcagatgaagtaactgaggcttagaaaggttaatagcaccggggaacaatttctctgggtgagaattgggactctgttgctggtcttctcagttcatttcctgaggtggatttactgagagaaggtgaaataaagccatatttagtataccagagaaggtagattttaagaatggtctcagtgttaatactgagaaaaagtcctgtcagttcagaaaag

SEQ ID NO: 494 - DNA, 399 bp, Homo sapiens
cgttgctgtcgaaaatatagattaattggctcagctttaatacctttctaggaggtgtcacaatgtagggtaccaagggttggattgtgatggggcatggtcgtacactgctcattgtgccacaggtgtgactggaaagcatgatattctagggttggtttgtagattcaaataatccagaaatatacctaataagattgagtgaaaaatttgagtcaaatatctagggcattcacagagtagctgtgagttcttggtaatgtgaaaaaggccttgtttttcaaaaactcctgggtttcctgttaaaaaatcttaaagcccaaccttatgaatatagtgccccaaaaggcggaagcttcttccattatcttattttctttgaaactttatttaattaaa

SEQ ID NO: 495 - DNA, 550 bp, Homo sapiens
gagggactgtttaaggttgccaaggtgaagcgagctgagaggctttgtcctcgtgccagtaactctgaaatctctcttaattcctgctgtccaggcagcagaatgccatggtttccccaagtaggtagctgctttagcagttaaagcccaaatgtctgttctgttgatcagaggtctctgaatttctgaagtggtgtttcgtttctggtgactgagttaatcctttacaatccctcttgtaaagtgtgctaatagaaagaatccacctttcaaagctgcagaaccagaccgtgccctaaattgaccaacgtaactgatgtgcctcaggaagtctcttgccagctgtccctgtgaagaccccctcctcccccccagctgctgccttgcacactgaagcatctcagactgtgcaaagccgtgtagtcatcaagacagtaaatcccaaggcttggttaagtgctgtgtgataacttgtttggatgagacttaacttaaaaccacttacaataaacttgggaaactaccgtcaaaaaaaaaaaaaaaaaaaaaa

SEQ ID NO: 496 - DNA, 133 bp, Homo sapiens
tggctctggatagcaccttatggacagttgtgtccccaaggaaggatgagaatagctactgaagtcctaaagagcaagcctaactcaagccattggcacacaggcattagacagaaagctggaagttgaaatg

SEQ ID NO: 497 - DNA, 409 bp, Homo sapiens
  misc_feature 164: n = A,T,C or G
caagtagctttccacatttgtcacagaaatcagaggagagatggtgttgggagccctttggagaacgccagtctcccaggccccctgcatctatcgagtttgcaatgtcacaacctctctgatcttgtgctcggcatgattctttaatagaagttttatttttncgtgcactctgctaatcatgtgggtgagccagtggaacagcgggagacctgtgctagttttacagattgcctcctaatgacgcggctcaaaaggaaaccaagtggtcaggagttgtttctgacccactgatctctactaccacaaggaaaaatagtttaggagaaaccagcttttactgtttttgaaaaattacttcacctgtcaagttaacaagtatgcctgtgccaataaaaggttctccact

SEQ ID NO: 498 - DNA, 491 bp, Homo sapiens
  misc_feature 24, 162, 165, 189, 192, 364, 423, 467: n = A,T,C or G
ttttttttttaaagaagtaagccnttatttccttgttttgcaaataaaactggctaagttggttgctttttggtgattagtcaaagagaccaaatcccatatcctcgtccgactcctccgactcttccttggcttcaaccttagctggggctgcagcagcanagnggagcagctgtggtggcagcagcnagngggcagcagccacaaaggcagatggatcagccaagaaggccttgaccttttcagcaagtgggaaggtgtaatccgtctccacagacaaggccaggactcgtttgtacccgttgatgatagaatggggtactgatgcaacagttgggtagccaatctgcagacagacactggncaacattgcggacaccctccagggaaggcgagaattgcagagttttcctctgtggattntcaaggcatttcagggttgttagatgttgccttgttcgaacacntgttgggtgaccagcccaaaggag

SEQ ID NO: 499 - DNA, 352 bp, Homo sapiens
  misc_feature 56, 99, 119, 177, 179, 263, 266, 290, 293, 322, 324: n = A,T,C or G
tttttttttttttttttttttttttttttttttttttttgtgaaaaaccaaacctnaaaaagccactttaattccggcctaacagcgccaggggcaatntctggggacagactctgggnacaatgctgtgtggcgaccactcactcacacacggctccaagaaggcccccaaggggnanttaccttcagggggactgagccaagggggaaaggggtggccccagaacaggggaaggggcaggcatggggggaaaaggtgctanttnttggcaaaggagatcttcatggcnttnttctgcgtaatcttaaagccctgcagggntncgcgagctgcccctgcctgtacctcatt

SEQ ID NO: 500 - DNA, 501 bp, Homo sapiens
  misc_feature 190, 472, 478: n = A,T,C or G
ttttttttttaaacgtgattcttttgttttaaataaatacttagaacacgacttggctcctacaagcatctggactctaggtctcagtactggagtgtctcacccatgggccccacgcagggacgccacggttccctcccaccccgtgatcaagacacggaatcggctgccgatggttggatcgcaatgngccccttttctagagccttccccggccatctacaggcaggatgcggctgggaaaaagacaactggaatttctcgaaggttgatggtccgcacggttgaggattctacgtggttctcttggttcccctgggtgtgtgtgtgtgtgtggaggaggccgcggcctttagatcaccttcttgagctcgtcgtacaggaccagcacgaaggcgccccccatgccccgcaggacgtttgggaccacgcacctttgaagaaggctttgcccccttcatctttgaagatnttcctncaacagtcgaaggttgccctgta

SEQ ID NO: 501 - DNA, 455 bp, Homo sapiens
  misc_feature 376, 390, 426, 433, 451: n = A,T,C or G
ttttttttgataatttatgattttattgtctttcctttgtccggcctttaacatgtttctgtaatttaaataaaaatctatttactttctccattttagcaaatggtttctttacccaaataggttgcactatagtccccatatggttttctactgttccacaaccactatttcacaaagattgacaaaactttaataaaagttaaatttacaggacatcttaaggataacttggggaaatatgtaggtaaaaaaggaatcgagtccacaaattaaggaatattttgctaatatggcccaacaccaatttcaggcaaatccaatctacttaactcatatatttaatgtggggtaatttttcttaaccaaaatttangggggggtatggantggatattatttatggcccttggacaagggtggacngtgtggntttgttgtggactagggngggg

SEQ ID NO: 502 - DNA, 507 bp, Homo sapiens
  misc_feature 358, 476: n = A,T,C or G
tcattttctccccttcggtagagattttggaggcaacatcaacgtggagaccatcagtgcctttattgacggtggaggcagtgtgctggtagctgccagctccgacattggtgaccctcttcgagagctgggcagtgagtgcgggattgagtttgacgaggagaaaacggctgtcattgaccatcacaactatgacatctcagaccttggccagcatacgctcatcgtggctgacactgagaacctgctgaaggccccaaccatcgttgggaaatcatctctaaatcccatcctctttcgaggtgttgggatggtggccgatcctgataaccctttggtgctggacatcctgacgggntttccacctctttactccttcttcccggacaagcctattcacccagtattccacatggcggttggggaagaacaccctcctcattgctggggttccagggcagggaacaattgcccgngttcatttttcagcgggttccttgatttttt

SEQ ID NO: 503 - DNA, 549 bp, Homo sapiens
ggataaacttgtgtatgcggatacctgcttcagtaccatcaagttaaaagcagaagatgcttctggtagagagcatttaatcactctcaagttgaaggcaaagtatcctgcagaatcaccagattattttgtggattttcctgttccattttgtgcctcctggacacctcagagctccttaataagcatttatagtcagtttttggcagcaatagaatcactaaaggcattctgggatgttatggatgaaatcgatgagaagacctgggtacttgagccagaaaaacctccacggagtgcaacagcacgcagaattgcattaggtaataatgtttccataaatatagaggtagaccccaggcatcctactatgcttcctgagtgcttctttcttggagctgaccatgtggtaaaacccctgggaattaagctgagcaggaacatacatttgtgggatccagaaaatagtgtgttacaaaatttgaaagatgttttagaaattgattttccagctcgtgctatcctggaaaaatctgattttactatgga

SEQ ID NO: 504 - DNA, 156 bp, Homo sapiens
gccgagggaagggcccggcagctgaggagccgctgagcttgctggacgacatgaaccactgctactcccgcctgcgggaactggtacccggagtcccgagaggcactcagcttagccaggtggaaatcctacagcgcgtcatcgactacattctcg

SEQ ID NO: 505 - DNA, 539 bp, Homo sapiens
cagcaaacatggatcactggcttcagaggttccccacacatgtcaaagatgtggccactgtgtgccggcagctagcagagaagagaatgctggatccatcaattaagggaacctttcactggtctggcaatgaacagatgactaagtatgaaatggcatgtgcaattgcagatgccttcaacctccccagcagtcacttaagacctattactgacagccctgtcctaggagcacaacgtccgagaaatgctcagcttgactgctccaaattggagaccttgggcattggccaacgaacaccatttcgaattggaatcaaagaatcactttggcctttcctcattgacaagagatggagacaaacggtctttcattagtttatttgtgttgggttctttttttttttaaatgaaaagtatagtatgtggcactttttaaagaacaaaggaaatagttttgtatgagtactttaattgtgactcttacgatctttcaggtaaatgatgctcttgcactagtgaaattgtctaaagaaacta

SEQ ID NO: 506 - DNA, 523 bp, Homo sapiens
aagtcactgagaatgagcactttcttctcggacacagcatggatctgcctggctgtccccacagtactatgtgggacagtattttgcaaatacaagaagagctcagggcagctgtggagctggatggtctgcctggcaggcctctgtgcagtctgcctgctcatcctgtcccctttttggggcttgatcctcttctcggtgtcatgcttcctcatgtatacttacttatctggccaagaattgttacctgtggatcagaaggcagtcctggtgacaggtggtgattgcgggcttggccatgctttgtgcaagtatctggatgagctgggcttcacggtatttgccggagttttgaatgaaaatggcccaggagctgaggaattgcgaagaacctgctctccgcgcctctcggtgctccaaatggacatcacgaagccagtgcagataaaagatgcttacagcaaggttgcagcaatgctgcaggacagaggactgtgggctgtgatcaacaatgctggggtgc

SEQ ID NO: 507 - DNA, 208 bp, Homo sapiens
ggcacagggggcaccagctggccttgccctctctggtctgggctgtctaccttcctcactgtatctttgcccagacccacctgggccagtaggcccctgtccccagccacacaccttagatgctggcatgccttactccaggtgcctgtgtttggccgaggcctgtgtgattcccggtctgcaccacatggcggggttgggggccgct

SEQ ID NO: 508 - DNA, 570 bp, Homo sapiens
gctttgttactaatatggaggcacaaaacactactgaagtatacgtaaagtggaaatttaaaggaagagatatttacacctttgatggagctctaaacaagtccactgtccccactgactttagtagtgcaaaaattgaagtctcacaattactaaaaggagatgcctctttgaagatggataagagtgatgctgtctcacacacaggaaactacacttgtgaagtaacagaattaaccagagaaggtgaaacgatcatcgagctaaaatatcgtgttgtttcatggttttctccaaatgaaaatattcttattgttattttcccaatttttgctatactcctgttctggggacagtttggtattaaaacacttaaatatagatccggtggtatggatgagaaaacaattgctttacttgttgctggactagtgatcactgtcattgtcattgttggagccattcttttcgtcccaggtgaatattcattaaagaatgctactggccttggtttaattgtgacttctacagggatattaatattacttcactactatgtgtttagtacag

SEQ ID NO: 509 - DNA, 580 bp, Homo sapiens
agccaggcacgatggccaccttcccaccagcaaccagcgccccccagcagcccccaggcccggaggacgaggactccagcctggatgaatctgacctctatagcctggcccattcctacctcggaggtggaggccggaaaggtcgcaccaagagagaagctgctgccaacaccaaccgccccagccctggcgggcacgagaggaaactggtgaccaagctgcagaattcagagaggaagaagcgaggggcacggcgctgagacagagctggagatgaggccagaccatggacactacacccagcaatagagacgggactgcggaggaaggaggacccaggacaggatccaggccggcttgccacaccccccacccctaggacttattcccgctgactgagtctctgaggggctaccaggaaagcgcctccaaccctagcaaaagtgcaagatggggagtgagaggctgggaatggaggggcagagccaggaagatcccccagaaaagaaagctacagaagaaactggggctcctccagggtggcagcaacaataaatagacacgcacggcagccacagct

SEQ ID NO: 510 - DNA, 357 bp, Homo sapiens
ggcacgagagtgcgcatcatgcagttctgccatacgctgcgggaatttgcgcttgagtatcggacttgccgggaacgagtgctacagcagcagcagaagcaggccacataccgtgagcgcaacaagacccggggacgcatgatcaccgagacagagaagttctcacgtgtggctggggaagcccccagcaacccctctgtgccagtagcagcgagcatcgggccaggccggggagatgctgacagtcatgctagtatgaagagtatgctgaccagcaggcctgaggacaccacacacaatcgccgtagcagaggcatggtccagagcagctccccaatcatgcccacagtggggccc

SEQ ID NO: 511 - DNA, 78 bp, Homo sapiens
tgcaagatggacacgagccacaagctgcactgcgaacctgggcactccgcgccgatgcacaccggcctgtgggtctat

SEQ ID NO: 512 - DNA, 452 bp, Homo sapiens
  misc_feature 7, 340, 341, 343, 347, 348, 353, 358, 359, 361, 365, 366,378, 388, 392, 400, 408, 409, 412, 428, 444: n = A,T,C or G
ttttaanccccttgtaccggtttggaattcccgggtcgacccacgcgtccgggcttatcttatgatctgggatcagaagtctctgaagaggtgcggtggcttcctgatacgagacgacttcgtgctgacagctgctcactgttggggaaggtgaggagcagaaaacagcccacaccctcctggaaacactccacagagacccctgccttcttccgaaggagctccctgggctcctgtgaacactcatgccaggaggtctccttatagggtgagaaaagggcagttaagtttgtggagagaggggaaggttggttccacaggtgctgctgaattcaaaaannanaggnngaccntcccnncntatnnagaactgggggngtcttttggnatangaatacanactgaacnnttncacctgtgttttctanggggaacctaaccctntaaaacta

SEQ ID NO: 513 - DNA, 324 bp, Homo sapiens
ggctatccagcgtactccaaagattcaggtttactcacgtcatccagcagagaatggaaagtcaaatttcctgaattgctatgtgtctgggtttcatccatccgacattgaagttgacttactgaagaatggagagagaattgaaaaagtggagcattcagacttgtctttcagcaaggactggtctttctatctcttgtactacactgaattcacccccactgaaaaagatgagtatgcctgccgtgtgaaccatgtgactttgtcacagcccaagatagttaagtgggatcgagacatgtaagcagcatcatggaggtttga

SEQ ID NO: 514 - DNA, 245 bp, Homo sapiens
cgaaaatggtattacaatgctgcaggattcaataaactggggttaatgcgagatgatacaatatacgacgatgaagatgtaaaagaagccataagaagactttctgagaacctttataatgacaggatgtttcgcattaagagggcactggacctgaacttgaagcatcatatcttgcctaaagagcagtggaccaaatatgaagaggaaaatttctaccttgaaccgtatctgaaagaggttat

SEQ ID NO: 515 - DNA, 538 bp, Homo sapiens
ggcacgaggccgcttgtgctgcagccatgtctctagtgatccctgaaaagttccagcatattttgcgagtactcaacaccaacatcgatgggcggcggaaaatagcctttgccatcactgccattaagggtgtgggccgaagatatgctcatgtggtgttgaggaaagcagacattgacctcaccaagagggcgggagaactcactgaggatgaggtggaacgtgtgatcaccattatgcagaatccacgccagtacaagatcccagactggttcttgaacagacagaaggatgtaaaggatggaaaatacagccaggtcctagccaatggtctggacaacaagctccgtgaagacctggagcgactgaagaagattcgggcccatagagggctgcgtcacttctggggccttcgtgtccgaggccagcacaccaagaccactggccgccgtggccgcaccgtgggtgtgtccaagaagaaataagtctgtaggccttgtctgttaataaatagtttatataccaaaaaaaaaaaaaa

SEQ ID NO: 516 - DNA, 563 bp, Homo sapiens
  misc_feature 522, 546, 553: n = A,T,C or G
tgaaatcctgagtgatgtgcagctgatcaagactggagacaaagtgggagccagcgaagccacgctgctgaacatgctcaacatctcccccttctcctttgggctggtcatccagcaggtgttcgacaatggcagcatctacaaccctgaagtgcttgatatcacagaggaaactctgcattctcgcttcctggagggtgtccgcaatgttgccagtgtctgtctgcagattggctacccaactgttgcatcagtaccccattctatcatcaacgggtacaaacgagtcctggccttgtctgtggagacggattacaccttcccacttgctgaaaaggtcaaggccttcttggctgatccatctgcctttgtggctgctgcccctgtggctgctgccaccacagctgctcctgctgctgctgcagccccagctaaggttgaagccaaggaagagtcggaggagtcggacgaggatatgggatttggtctctttgactaatcaccaaaaagcaaccaacttanccagttttatttgcaaaacaaggnaataaangcttacttct

SEQ ID NO: 517 - DNA, 291 bp, Homo sapiens
  misc_feature 57, 103, 233: n = A,T,C or G
agttggagaaaccttttattggcacaggcattccttgttaacttgacagggctgaanctaatttttcaaaaacagtaaaagctggtttctcctaaactatttnccttgtggtagtagagaatcagtgggtcagaaacaactcctgaccacttggtttccttttgagccgcgtcattaggaggcaatctgtaaaactagcacaggtctcccgctgttccactggctcacccacntgattagcagagtgcacgaaaaaataaaacttctattaaagaatcatgctgagcacaa

SEQ ID NO: 518 - DNA, 340 bp, Homo sapiens
acttcaagttggagaaaccttttattggcacaggcattccttgttaacttgacagggtgaagctaatttttcaaaaacagtaaaagctggtttctcctaaactattttccttgtggtagtaaatcagtgggtcagaaacaactcctgaccacttggtttccttttgagacgcgtcattaggaggcaatctgtaaaactagcacaggtctccccgctgttccactggctcaccacatgattagcagaatgcacgaaaaataaacttcctattaaagaatcatgctgacacaatcagaagttgtgacattgcaactccaaatgcagggcctgaactgcgtcc

SEQ ID NO: 519 - DNA, 325 bp, Homo sapiens
  misc_feature 325: n = A,T,C or G
cccagtctggccttgaactcctggagtatccttttgcctcagcctcccgagtagctgggactgcaggtgtataccacctccccaacttggatttactagtagtagcaagtgtagacaagagtctcctatttggaatgtaaattgttggttggaatgtacgttggcacaacttggggaaagtttggcaatgtatatcaaaagcattaaaattgtgtatatcttgtggcctggcaatactccttttatgaatttattataaaaaaaagtacatttatttaaaaacttagctggctgggtgtggtggctcattcctgtaatcccagcn

SEQ ID NO: 520 - DNA, 364 bp, Homo sapiens
cgttgctgtcgggaggtggcagccatctccttctcggcatcatggccgccctcagaccccttgtgaagcccaagatcgtcaaaaagagaaccaagaagttcatccggcaccagtcagaccgatatgtcaaaattaagcgtaactggcggaaacccagaggcattgacaacagggttcgtagaagattcaagggccagatcttgatgcccaacattggttatggaagcaacaaaaaaacaaagcacatgctgcccagtggcttccggaagttcctggtccacaacgtcaaggagctggaagtgctgctgatgtgcaacaaatcttactgtgccgagatcgctcacaatgtttcctccaagaaccg

SEQ ID NO: 521 - DNA, 823 bp, Homo sapiens
  misc_feature 20, 21, 22, 23, 24, 25, 26, 27, 28, 29, 30, 31, 32, 33, 34,35, 36, 37, 38, 39, 40, 41, 42, 43, 44, 45, 46, 47, 48,49, 50, 51, 52, 53, 54, 55, 56, 57, 58, 59, 60, 61, 62,63, 64, 65, 66, 67, 68, 69, 70, 71, 72, 73, 74, 75, 76,77: n = A,T,C or G
  misc_feature 78, 79, 80, 81, 647, 729, 744, 759: n = A,T,C or G
gggcctcagagcatgctcgnnnnnnnnnnnnnnnnnnnnnnnnnnnnnnnnnnnnnnnnnnnnnnnnnnnnnnnnnnnnnnacttttttttctttttttacatctgattttaatgcttcgttaacttcaaaaggaactggtagagttcagaaggtgagctgttgtttttctaaacctcttcccaggaaggggacattgacacttgaatttttgtcacctttttcctcattagaaggaaagtagaaagccttactgtaggatttttaaaaaaaaatccatctcaccccatattggtcttaaataagtatagactaattaacctaagctacctttaacaacgtagaatttagatgggttcatatatgtgagaaaaacctgaatataggacaggggtcctacttttttccccacctctgtcgcccaggctagagtatagtggtgtgatcttggcccactgcaacctctgcttcctaggttcaagtgattctcctgcctcagcctcccaagtagctgggattgtaagagtatgccaccacgcccagctactttttgtatttttagtagagacagggtttcatcatgttggccaggatggtctcttaactcctgccctcaagtgatccaccagagaggagatcctcggcctncccaagtgctgggattataggcatgagccacccgtgcccagcctactttctaattaattaaaaaaaaaaaaaaaaaaacttnccaaatgagctgatnaaaaactgacgtgangctgctttgccttcaataatacctagttttcactggtccaactcgtttccaaatagaaattacg

SEQ ID NO: 522 - DNA, 268 bp, Homo sapiens
ggcacgagggagcaacagggtcagcttctgtatgttggttggaacaatacggcaagtgctcgaaatgacatccagagaaatctaaactgctgtgggttccgaagtgttaacccaaatgacacctgtctggctagctgtgttaaaagtgaccactcgtgctcgccatgtgctccaatcataggagaatatgctggagaggttttgagatttgttggtggcattggcctgttcttcagttttacagagatcctgggtgtttggctgacct

SEQ ID NO: 523 - DNA, 354 bp, Homo sapiens
  misc_feature 279, 290, 299, 311: n = A,T,C or G
ggacattaaaatgcgggggggagggtgtcttagaatataggacatttatctcattttaaccttcacaacgacccagtacaatatatactaactttacttaaatgtttaaactgaggcttagagaggctaaataacgtgtccaaagtcacacagctaatcagtgtgagagctgggattcaaattcatgtctctctgcttctggagcacaaaacactcctcctccccagcacacctgtccacgcagctgcctgggatgcctggtgtctataataccctcancctgggtgcanctacctttntggacctagtcnggagcattggaactccctagggtgaaagagctcgtgcccactc

SEQ ID NO: 524 - DNA, 300 bp, Homo sapiens
aaaggaagaagaagaaggagagcatgaaggaaagatttgtgaactggaaaaaagcaacaaagattgaaaagccatgtactcaagtaccaccaagggatctgccattgggaccctccagggctggatttgatgagttaactgtgaaataccacaagcctgaaaactgaattttgggacttctacccaaatggaaaaataacaactatttttgttgttgttgtttgaaaatgcctctaaaattatatattaattttattctatgcaggggaattaatttagtttttaacaatctaacaataa

SEQ ID NO: 525 - DNA, 408 bp, Homo sapiens
ctgtcgatttaaattatggagcactttatcatataaaaaacttcaattatatttaaacagtaagtctttggatttttttgccttgtaatttccatattacataataatgagataaacattaatgttttcagggtactttaaattttagataattactcattgtattcatgtgaaatttgtttttactgcatgtgtgggttggaggactgttttcacttctgattcatctttactcttatctcatcagagctcatacctcttgtagttgggggattgcagtttataattccaataaatggggcaaattcaataataacataatacaaatgagtttgaatgcaggacaagtcttcaaagcatacacaacatgggcctacatatgtacaacaataataatttataagttac

SEQ ID NO: 526 - DNA, 552 bp, Homo sapiens
gcacgcggccatggccgactccgagctgcagctggttgagcagcggatccgcagcttccccgacttccccaccccaggcgtggtattcagggacatctcgcccgtcctgaaggaccccgcctccttccgcgccgccatcggcctcctggcgcgacacctgaaggcgacccacgggggccgcatcgactacatcgcaggcctagactcccgaggcttcctctttggcccctccctggcccaggagcttggactgggctgcgtgctcatccgaaagcgggggaagctgccaggccccactctgtgggcctcctattccctggagtacgggaaggctgagctggagattcagaaagacgccctggagccaggacagagggtggtcgtcgtggatgatctgctggccactggtggaaccatgaacgctgcctgtgagctgctgggccgcctgcaggctgaggtcctggagtgcgtgagcctggtggagctgacctcgcttaagggcagggagaagctggcacctgtacccttcttctctctcctgcagtatgagtg

SEQ ID NO: 527 - DNA, 300 bp, Homo sapiens
  misc_feature 66, 100, 195, 197, 237, 254, 259, 271, 272, 276: n = A,T,C or G
atataattgaaattatgttacatttaagtaatagtaagattatttcattttttttaatttttgtangagatgagggtctcaccatgttgcccaggctggnctcaaatttctggcctcaagtgatcttcccacttcagcctcccaaagcactgggattataggcatcctgccagtaatagtaaaattattaatgancnattttattccattttttaatactaagtcttgcaaatccantgtgttttcacacttantgcanatctcatttcannctanccacagttaaagtgctaaatggcc

SEQ ID NO: 528 - DNA, 418 bp, Homo sapiens
ggcacgagccagctctgagtggggttgctgcctgtattccctgtttctcaggaacttacatgggtctggggaggctaggtaggtgattgtacgtggttgctcttctccttggctgggggaggtaatgagcagatctctgtgggtgtggagcttgttggggggatgtctaggaagcttcagcttagccacattcccaagtttaggtgcactgagccatatagcccagtgtatgcatgtgtgggtgtgttcatgcacacacacactctctctcttgtctctctgtctctctctcactctttcttactctcttctcaggtcacttgtacacttggtttcctagtagaagctcacttgccgcctctcaggggggtcccggattgcatccatcacaatcccaaaactagagttggcgggaact

SEQ ID NO: 529 - DNA, 331 bp, Homo sapiens
cactgacgcaggtcttaaggagctttccgacttcctccgagtccagcagtccctgggcaccaggaaggaactgcagaaggagctccaggagcgtctttctcaggaatgcccgatcaaggaggtggtgctttatgtcaaagaagaaatgaagaggaatgatcttacagaaacagcagtgattgatcttctgtggacatgtataatgaacgctgatgagtggaacaagaaggaagaacttgttgcagagcaggctctgaagcacctgaagcaatatgctcccctgctggccgtgttcagctcccaaggccagtcagagctgatcctcctccag

SEQ ID NO: 530 - DNA, 455 bp, Homo sapiens
  misc_feature 81, 195, 231, 247, 298, 307, 317, 395, 427, 446, 451: n = A,T,C or G
ttttttttaaatcaaagagtagtttattaaaaaaggaatcaaacaggaaactctaagtaccagtgtgtacattgtacaatnttaaatgactcacgagaatgaagtttttttcaaatatattaagatcacaccaccttgttgtttatcgaaagatattcaaggagaaagatctgactctccaaactgcatctgagnattgccactttaaacaggacctcatttcaaacatgncaacaacgccactggntaataaaggctttgggaatggggtgctcattctattatttcactacaaacngcatagganaggcaggagnagttggggaatttattctaaaataggaatgggagggttgtccatctacagcaggcactccttcacttcctctgtttgncctttttaggcagtactccttggtcggtcttngaacggttttccaaccctnttcantggg

SEQ ID NO: 531 - DNA, 406 bp, Homo sapiens
caagtagctttccacatttgtcacagaaatcagaggagagatggtgttgggagccctttggagaacgccagtctcccaggccccctgcatctatcgagtttgcaatgtcacaacctctctgatcttgtgctcagcatgattctttaatagaagttttattttttcgtgcactctgctaatcatgtgggtgagccagtggaacagcgggagacctgtgctagttttacagattgcctcctaatgacgcggctcaaaaggaaaccaagtggtcaggagttgtttctgacccactgatctctactaccacaaggaaaatagtttagtagtaaaccagcttttactgttttgaaaattagcttcacctgtcaagttaacaagaatgcctgtgccaataaagttccccact

SEQ ID NO: 532 - DNA, 547 bp, Homo sapiens
ccgttgctgtcggttctggaaggtgtgtgcacagagggtgctcatgggactcgcatgcagctctcagcactgggtgggagggcgttggcttgtccagaatggggacgtggggcagccacccctgcccagcgagagcgcagacaccgtgtgaggggacagcagcccttggtgcaaagccagagactgatcctggctctgacggctgaagagggaagacccaaggctgggtggcgtggctcgtgaatccacttagaattcttggcttgtgtcgcatactgggtgtcacggcacacatttactctgcattgtccccgtctttcccatcgcctagcgtttggggaggaacagggagagagcttcggggcgtctgtctccgtgctctcctgcctccaccgccttggttttgcttcctgctggaggcagggcacctgctgcgacccagattcttctgcaggatgtgtctgtctttgtcacggtggacagagggtgacatcataggagcagctcgctggccagaaggggatgggggcatccctgtgcctcactc

SEQ ID NO: 533 - DNA, 255 bp, Homo sapiens
agaattctagctacgatgccatctgatgtcgaattccgcacgaggtctaatcatagatggagagaaagccgaagcctattactgtaatgtgatagaaggatccgtggatattatttggaactgtgccaataagctagttttcagcagaattttgcatttatgtaggattttcccatctcttaacacagtgccttgcacatgactctaaatgaatgcttgttgaattgaattgcagctttaaaaatatctcacata

SEQ ID NO: 534 - DNA, 261 bp, Homo sapiens
ggcacgagatcccctcgaccgctcgcgtagcattaggccgcctccgtaccggtgagttctatccaggagccctgggtactttccagggccagctgacctaacgctggggggccagccgtcccctgcccagctcatccgctggatccagactggggccatctgtggctctcccccgctgtagggatagtcaagagcaactgtgctgtgccactcaagccttgggctaagggatcgcactggggtgtgctctttcggggtgct

SEQ ID NO: 535 - DNA, 400 bp, Homo sapiens
  misc_feature 400: n = A,T,C or G
cgttgctgtcgattttgaggggcactctaccttggttatgattcagtagaggaaaaagaccacctttcttcaatttacaaattaaatcttctggagggtcgctatcacaaaacattgacgatgtatgtattataattttttagaaaaaccaccatcgtgtcacgtcgacgatgccaaattatgttagcgtgagcagaaacaccgtgggggaggaaggcagcagctgaagaaaaaagctcaaatgatctagtcactttcgatactgtacttcagatgcgaaatggatattcgagtggaaacctgacaaagtgcgcctgctttgatgtgaactggtatagacaatgaccagtggctgggtcagtgggatgtctctctgtgagcacaaaggcttatcaaatgn

SEQ ID NO: 536 - DNA, 601 bp, Homo sapiens
ggcacgaggcccaccccgccgaaggacgtctccccggacccatcgctgtccaccccaggctcggccggctcggcccggcaggacgagaaagagtgcctcaagtaccaggtgcccctgcccgacagcatgaagctggagtcgtcccactcccgtggcagcatgaccgctctgggtggagcctcctcgtcgacccaccaccccatcaccacctacccgccctacgtgcccgagtacagctccggactcttcccccccagcagcctgctgggcggctcccccaccggcttcggatgcaagtccaggcccaaggcccggtccagcacaggcagggagtgtgtgaactgtggggcaacctcgaccccactgtggcggcgagatggcacgggacactacctgtgcaacgcctgcgggctctatcacaaaatgaacggacagaaccggcccctcattaagcccaagcgaaggctgtctgcagccaggagagcagggacgtcctgtgcgaactgtcagaccaccacaaccacactctggaggaggaatgccaatggggaccctgtctgcaatgcctgtgggctctactacaagcttcacaatattaaca

SEQ ID NO: 537 - DNA, 534 bp, Homo sapiens
tttcgctccatgatgcgttatctgggtctggaaacccaaaccctcaaggatggcctggcgcatgggggaaccagcctgctggggcatggggctacccaggggcttactatcctggggcctaccccgggcaggcacccccaggggcttatcctggacaggcacctccaggcgcctaccatggagcacctggagcttatcccggagcacctgcacctggagtctacccagggccacccagcggccctggggcctacccatcttctggacagacaagtgcccccggagcctaccctgccactggcccctatggcgcccctgctgggccactgattgtgccttataacctgcctatgcctgggggagtggtgcctcgcatgctgataacaattctgggcacggtgaagcccaatgcaaacagaattgctttatatttccaaagagggaatgatgttgccttccactttaacccacgcttcaatgagaacaacaggagagtcattgtttgcaatacaaagctggataataactggggaa

SEQ ID NO: 538 - DNA, 472 bp, Homo sapiens
ggcacgagggcaggggagagcatggctcagcggatggtctgggtggacctggagatgacaggattggacattgagaaggaccagattattgagatggcctgtctgataactgactctgatctcaacattttggctgaaggtcctaacctgattataaaacaaccagatgagttgctggacagcatgtcagattggtgtaaggagcatcacgggaagtctggccttaccaaggcagtgaaggagagtacaattacattgcagcaggcagagtatgaatttctgtcctttgtacgacagcagactcctccagggctctgtccacttgcaggaaattcagttcatgaagataagaagtttcttgacaaatacatgccccagttcatgaaacatcttcattatagaataattgatgtgagcactgttaaagaactgtgcagacgctggtatccagaagaatatgaatttgcaccaa

SEQ ID NO: 539 - DNA, 505 bp, Homo sapiens
tgccaacatgccatccagactgaggaagacccggaaacttaggggccacgtgagccacggccacggccgcataggcaagcaccggaagcaccccggcggccgcggtaatgctggtggtctgcatcaccaccggatcaacttcgacaaataccacccaggctactttgggaaagttggtatgaagcattaccacttaaagaggaaccagagcttctgcccaactgtcaaccttgacaaattgtggactttggtcagtgaacagacacgggtgaatgctgctaaaaacaagactggggctgctcccatcattgatgtggtgcgatcgggctactataaagttctgggaaagggaaagctcccaaagcagcctgtcatcgtgaaggccaaattcttcagcagaagagctgaggagaagattaagagtgttgggggggcctgtgtcctggtggcttgaagccacatggagggagtttcattaaatgctaactacttttaaaaaaaaaaa

SEQ ID NO: 540 - DNA, 211 bp, Homo sapiens
aatgtgcctcagcctgtagtgctgtgtggcaacagcattctggttcccactgacaagatctcccaccactctggtgggatctgcagaggcagggagtgggggttgtgtctaggggaagtcatcttttgagatccagatagacatggtttgtgcacttacgtccagatgggaagcatccttgctgcaaccctaaaataatcatgcaccctgt

SEQ ID NO: 541 - DNA, 415 bp, Homo sapiens
cagcgtccaagcttcctgaaaagcaggtgataaacttgtagtagttgacttctcagccacgtggtgtgggccttgcaaaatgatcaagcctttctttcattccctctctgaaaagtattccaacgtgatattccttgaagtagatgtggatgactgtcaggatgttgcttcagagtgtgaagtcaaatgcatgccaacattccagttttttaagaagggacaaaaggtgggtgaattttctggagccaataaggaaaagcttgaagccaccattaatgaattagtctaatcatgttttctgaaaatataaccagccattggctatttaaaacttgtaatttttttaatttacaaaaatataaaatatgaagacataaacccagttgccatctgcgtgacaataaaacattaatgc

SEQ ID NO: 542 - DNA, 504 bp, Homo sapiens
ttgaagagcagctcaggctgcaacggaagcactgggggagaagtcccctgacagtgccacggtgtccggatatgatataatgaaatctaaaagcaaccctgacttcttgaagaaagacagatcctgtgtcacccggcaactcagaaacatcaggtccaagagtctgaaggaaggcctgacggtgcaagaacggttgaagctctttgaatccagggacttgaagaaagactaggtgtgtcccatccaagttgagcacgcgccttccccagcttgcagcagcacaccccaagcgctgcttttcacctgtacctttgttttattattattattattattgctgttgttgtcatcgttaactgtgggcatggaatgcgtgaggctggcttctgggttgtccacaccactctctgctgtgttgacttcctgttgtcttcatcaaagcttttttccgtggtattctaaaattaggccagcagtgggggctgggagggcatctgtgttagt

SEQ ID NO: 543 - DNA, 491 bp, Homo sapiens
atgaactcggtttaagacagggcttcttcaccattgcgagaacgttcaccgggacgagtggcaagagtcttggcttggatagcatgaagagccccagtacaaggaagaatactggaaatgctcaattcgtggagcgcgtttaaacgacgatttatttggttttcaatgaccgaggacttatgacaggatgattacatttgaccttgggacatgaacgcttggactgctgacttgtgtgtaaagctgtttgtttgtttgtgtcttgcttgacagtggttctcgatcatgatgatacctgatgctttggacatgtccacttactcctctattattcgttggatcattgtttattctgatagatagtgacttatgttcggatgtcgatcacaggattgtgattgttagtccactgtatctctgatcgaataggtctatatattattatttagatagaaaaagtagcaatccacttaggagatttattgatctgc

SEQ ID NO: 544 - DNA, 285 bp, Homo sapiens
caagtagctttccacatttgtcacagaaatcagaggagagatggtgttgggagccctttggagaacgccagtctcccaggccccctgcatctatcgagtttgcaatgtcacaacctctctgatcttgtgctcagcatgattctttaatagaagttttattttttcgtgcactctgctaatcatgtgggtgagccagtggaacagcgggagacctgtgctagttttacagattgcctcctaatgacgcggctcaaaaggaaaccaagtggtcaggagttgtttctg

SEQ ID NO: 545 - DNA, 471 bp, Homo sapiens
  misc_feature 11, 12, 375, 414, 421: n = A,T,C or G
tttgtactttnnaaggatcccagcgattcgcaggagggtggtgtggagtcagcatttcacaagacctccacaggagccccagctgccatcaagaaactctaccaggtgaaggggaagaagaacatccgtgccaccgagcgggcactgaactgggacagcttcaacactggggactgcttcatcctggacctgggccagaacatcttcgcctggtgtggtggaaagtccaacatcctggaacgcaacaaggcgagggacctggccctggccatccgggacagtgagcgacagggcaaggcccaggtggagattgtcactgatggggaggagcctgctgagatgatccaggtcctgggccccaagcctgctctgaangagggcaaccctgaggaagactcacagctgacaaggcanatgccangccgcagctctgtataagtctctgatgcaactgacagatgaacttgacaa

SEQ ID NO: 546 - DNA, 249 bp, Homo sapiens
  misc_feature 42, 202: n = A,T,C or G
ggcgtgcaaacagagcgccactgggaggctgaaacctttagnccgatgcctgcttgcaaggtcaggcaagctggattctggtccccacctttgcagagagaacagcgatgttgtgcgcccatttctcagatcaaggaccggcccatcttactacctccaagagtgcttttctctctaataagaaaacatctactttgaaacntctactgggcgagaccaggagtgatggctcagcctgtaattctggaa

SEQ ID NO: 547 - DNA, 259 bp, Homo sapiens
cctcttccaccgggccatttctgagagtggcgtggccctcacttctgttctggtgaagaaaggtgatgtcaagcccttggctgagcaaattgctatcactgctgggtgcaaaaccaccacctctgctgtcatggttcactgcctgcgacagaagacggaagaggagctcttggagacgacattgaaaatgaaattcttatctctggacttacagggagaccccagagagagtcaaccccttctgggcatgtgattgatg

SEQ ID NO: 548 - DNA, 271 bp, Homo sapiens
  misc_feature 48: n = A,T,C or G
tttgtatttggtgaaatggttttaattatactccatgtgtattttgcncactttttttgggaattcaagggaaagtgtttcttgggtttggaatgttcagaggaagcagtattgtacagaacacggtattgttatttttgttaagaatcatgtacagagcttaaatgtaatttatatgtttttaatatgccattttcattgaagtattttggtcttaagatgactttagtaatttaactgtttatgttacccacgttgggatccagttggt

SEQ ID NO: 549 - DNA, 313 bp, Homo sapiens
tttgcctcatggctcggttctatacttacatcaacccagcggagatcgaagctcaatttgatgaggatgaaaagaaaaacagactggaaaagagtaacccatatttcatgtcaggggccaattcacagaaacagatgtgaaggtcaggaggcaagtggaggatggactgggcccgcagatgccctgacctctgcccccaggtagcaggacactccattggatggcccctgatgaggaagacttcagaattgggaactaaaccatgaatgctattttcttttttctttttcttttctttttttttttttttttt

SEQ ID NO: 550 - DNA, 575 bp, Homo sapiens
acgtacgttcatacacaagccttttcacacagcactcccctcagacaccctcagagagttcacactgatgggaaatgaccatgggaccaccaagctctaggtcatccatctctgcatccaaatagtagggaaacgtggagataatcaacactcaggaccttcagccttgaacgcccattagtgctatgttatagaacctacaaaaaagaaatggaacaaatgtagtggatccagggaacgcttttgtccaaggattcaccgtattccaaaccagagatgttcaaattggtgagaaacccaacaaatgcctttcatatatacgagaaccaaatgaagtcagaatttgccattattgcacattacatttttgggggggaaagtgcttatgaatggtgcaggttgactctgatattcattcccaaatgacagtatggcagagtgttccagaaatgagagtggcatctttatggaatcactatggatactgactgtctcagtaaacagctgtcttgtctgtgtgtatattgtttgatcagggtacatggcagccagtcacagattggaattacatatga

SEQ ID NO: 551 - DNA, 664 bp, Homo sapiens
ttctcctctcccggctcctcgacctacccatcccctgtgcacagtggcttcccctccccgtcggtggccaccacgtactcctctgttccccctgctttcccggcccaggtcagcagcttcccttcctcagctgtcaccaactccttcagcgcctccacagggctttcggacatgacagcaaccttttctcccaggacaattgaaatttgctaaagggaaaggggaaagaaagggaaaagggagaaaaagaaacacaagagacttaaaggacaggaggaggagatggccataggagaggagggttcctcttaggtcagatggaggttctcagagccaagtcctccctctctactggagtggaaggtctattggccaacaatcctttctgcccacttccccttccccaattactattccctttgacttcagctgcctgaaacagccatgtccaagttcttcacctctatccaaagaacttgatttgcatggattttggataaatcatttcagtatcatctccatcatatgcctgaccccttgctcccttcaatgctagaaaatcgagttggcaaaatggggtttgggcccctcaaagccctgccctgcacccttgtacagtgtctgtgccatggatttcgtttttcttggggtactcttgatgtga

SEQ ID NO: 552 - DNA, 536 bp, Homo sapiens
aaattaacaacatgaagaccaagtttaaagaaacaattgagaagtgtgataatctagagcacaaactaaatgatcttctaaaagaaaagcagtctgtggaaagaaagtgcactcagctaaacacaaaagtggccaaactcaccaacgagctcaaagaggagcaggaaatgaacaagtgtttgcgagccaaccaagtcctcctgcagaacaagctaaaagaggaggagagggtgctgaaggagacctgtgaccaaaaagatctgcagatcaccgagatccaggagcagctgcgtgacgtcatgttctacctggagacacagcagaagatcaaccatctgcctgccgagacccggcaggaaatccaggagggacagatcaacatcgccatggcctcggcctcgagccctgcctcttcggggggcagtgggaagttgccctccaggaagggccgcagcaagaggggcaagtgaccttcagagcaacagacatccctgagactgttctccctgacactgtgagagtgtgctgggaccttc

SEQ ID NO: 553 - DNA, 553 bp, Homo sapiens
tcggctcgaggtggatttgaagcccaatgggtcagaaataatggtcacaaatgaaaacaaaagggaatatatcgacttagtcatccagtggagatttgtgaacagggtccagaagcagatgaacgccttcttggagggattcacagaactacttcctattgatttgattaaaatttttgatgaaaatgagctggagttgctcatgtgcggcctcggtgatgtggatgtgaatgactggagacagcattctatttacaagaacggctactgcccaaaccaccccgtcattcagtggttctggaaggctgtgctactcatggacgccgaaaagcgtatccggttactgcagtttgtcacagggacatcgcgagtacctatgaatggatttgccgaactttatggttccaatggtcctcagctgtttacaatagagcaatggggcagtcctgagaaactgcccagagctcacacatgctttaatcgccttgacttacctccatatgaaacctttgaagatttacgagagaaacttctcatggccgtggaaaatgct

SEQ ID NO: 554 - DNA, 601 bp, Homo sapiens
cactgtgcccagccaaaagagaaatttctacatgaacaaggcaatttcagtgtcttacagcggccaaaccatgacgtgaagaatgagataggagacaggagatcaccataagcgtccctgatatagcagcacacattttcacgtttccacttaaatcgttttgcacaaagtcttgcttcgctcagatgagatgagatatgatttcctagagatgtaaaaataagaatgaatgtggcgcccccttcttccagatgtaatagaaagctctgccctatcacaaggggggtgttgaagcgccccttgtgttttaactgtatttaactgagcacaagatgcacaagctgtggtgggaaaccctcagtttacctttggagtcttccctgcagatcgcagacctgtttccaggctgatgtttctggtgtgtaattgctagcgtttctgaagggttttcccaattgttttagccttgtgaagtattcttaattataacttgcctttcagcgatggtacatgacttgattcaacgtttggttctgaacttacacactgatgcgtttactcatctaacataatctgacagggcctcagcaagggagccata

SEQ ID NO: 555 - DNA, 110 bp, Homo sapiens
cggctcgagtcaagagaaaacacaagaaggacatcagccagaacaagcgagccgtgaggtctgcgcaccgcctgcgagagggccaagaggaccctgtcgtccagcaccca

SEQ ID NO: 556 - DNA, 470 bp, Homo sapiens
ctgcagtggcaatagtgttaaaaaatctcattctcatgatttttggctctagctaggaatagtttagtcaggactcagaaaatttgagcttagttctgggattatgaaaacatggggacaaaaacaataacttgtggatgtctggttcctgctgtctgcagccaggtatctcaggttgcaatggtcagaagtcccagtgagggagctagaaacagagctatctgttcctcatagtgccagtgtgtttacatttataggaccacatatccctggtttctgggggagggtttcactgttacatcaccaagaggccctgaaaagaggaaaaaaaaaaaaaaaggcccgggctgggggcccacccctttaattttaaccttttgggggggttggggggggggattaaaagggccaaaatttaaaaaccccccggccaaactgggaaaacccccttttttataaaaaaaaaaaaa

SEQ ID NO: 557 - DNA, 290 bp, Homo sapiens
gtgcacttcggcggagagcgcattgcctatgaggtcagcgtgcaagaggcagtggcgctgtatggaggacacacacctgcaggcatgcagaccaagtacctcgatgtcggctggggcctgggcagcgtcactcatgagttagcccccggcatcgactgcccggagaccgccaccttcctggacactttccactactatgatgccgatgacccggtccattatccccgagccctctgcctctttgaaatgcccacaggggtgccccttcggcggcatttaattccaattta

SEQ ID NO: 558 - DNA, 481 bp, Homo sapiens
aacaccagcccgtgggctgccccctgcctccccaccctccccatggcccacccatctgggctgtctctgcagggcagagccgtccagacctgggatcagggaagctgctggcatcgtccccacccccagcctgggggtctgggctggggcagggattgctcagtggaagcaggactgggggtctggcttgccccctccctgggcctccatcacccctgagcatccctctggactcagagggaacaaggtgggagagagagtttgagacagctccgtgtggagagcttagcccctggaggcagcacaaggaggatgtgatatgtgggggagtgagcactgggttgggagccgggtcctggtttccaatttgggttctgctgtgtgactctgggcaagtcactctccctctctgggcatgtctgctacaaatggacaagattatttcagaggtcactgaagactgtgattacatgcacctgcc

SEQ ID NO: 559 - DNA, 205 bp, Homo sapiens
gtcccaccaaagatctccaatatctcctcggatgtcactgtgaatgagggcagcaacgtgactctggtctgcatggccaatggccgtcctgaacctgttatcacctggagacaccttacaccaactggaagggaatttgaaggagaagaagaatatctggagatccttggcatcaccagggagcagtcaggcaaatatgagtgca

SEQ ID NO: 560 - DNA, 645 bp, Homo sapiens
ggaattcggctcgagcgcgtctccgcgcccgcggacttctgcctgcctccttctctgaacgctcacttccgaggagacgccgacgatgaagacaccgtggaaggttctcctgggactgctgggtgctgctgcgcttgtcaccatcatcaccgtgcccgtggttctgctgaacaaaggcacagatgatgctacagctgacagtcgcaaaacttacactctaactgattacttaaaaaatacttatagactgaagttatactccttaagatggatttcagatcatgaatatctctacaaacaagaaaataatatcttggtattcaatgctgaatatggaaacagctcagttttcttggagaacagtacatttgatgagtttggacattctatcaatgattattcaatatctcctgatgggcagtttattctcttagaatacaactacgtgaagcaatggaggcattcctacacagcttcatatgacatttatgatttaaataaaaggcagctgattacagaagagaggattccaaacaacacacagtgggtcacatggtcaccagtgggtcataaattggcatatgtttggaacaatgacatttatgttaaaattgaaccaaatttaccaagttacagaatcacatg

SEQ ID NO: 561 - DNA, 271 bp, Homo sapiens
gagtgctgtaaatgcattgatggaaaaaaagtgggtaaagaacttacagaaaagccaaaatttattctgtcggtattacttctgtggaacttcgggttattaattgtggaccatattcattttcagtacaatggctttttatttggattaatgctactctccattgcacgattatttcagaaaaggcatatggaaggagcatttctctttgctgttctcctacatttcaagcatatctacctctatgtagcaccagcttatggtgtatatc

SEQ ID NO: 562 - DNA, 277 bp, Homo sapiens
  misc_feature 43: n = A,T,C or G
tcttaggagtttcttgtttgccctcttgtgtaattacggtctngtttttttcagtaatgtcctgtttgcccttcttatcagcatctatctagctacattctgacaggataactgcaaactgaatgattcctgggcatcataatggatgtttctttctacttaggtgtctcccctcctctctgcttatatctagcatgcctgttttgggtggtccctggggttgtgggatttcccaggggctacccttcctgctcttggctagatatctgcctctcta

SEQ ID NO: 563 - DNA, 239 bp, Homo sapiens
gcacatgaattttttgatgttcttcctgtgcataaatttcagaaaacaccacagggatggcgagaagtatttgttgacattgatccacaggtttctgataaactgaggtttgttttggcaccttctgccaccccagcagaagccttcatacaacatgacgaaacaagggatcatgttgaagtgtgtcctgatgctggtgttatcatcgaggaactttctcaacgcattgcattaactgg

SEQ ID NO: 564 - DNA, 119 bp, Homo sapiens
  misc_feature 84, 88: n = A,T,C or G
acggaagatgactttgtatcactgcaagcgcttcaacaccttcatccatgaagatatctggaacattcgtagtatctgcagcancaanaatatccaatgcaagaacgggaagatgaact

SEQ ID NO: 565 - DNA, 275 bp, Homo sapiens
gtgctgcatcaggatttgatttgtatgccatctgttgcaatgcacttggttttacttgcttgtcaatgagaaatactgcttccaaatgtcttcatggttttgtccatactggactttgggttatgatttttcaccttctactcccctgaaatcattatcctaaagtaactttttttaggcacctattttctggggatcaacatgtaaaaaaacatttatattgtcttgaggagttgtcaacaacaataaattgaaataaaaaagaaatgtatgaa

SEQ ID NO: 566 - DNA, 286 bp, Homo sapiens
  misc_feature 64, 65, 66, 67, 68, 69, 70, 71, 72, 73, 74, 75, 76, 77, 78,79, 80, 81, 82, 83, 84, 85, 86: n = A,T,C or G
atttgctcattgctgtaccacatctgctctagggaatctggattatgttatacaaggcaagcannnnnnnnnnnnnnnnnnnnnnnggttacgaagacaaagtcccagaattgtatctcatactgtctgggattaagggcaaatctattacttttgcaaactgtcctctacatcaattaacatcgtgggtcactacagggagaaaatccaggtcatgcagttcctggcccatcaactgtattgggccttttggatatgctgaacgcagaagaaagggtggaatcac

SEQ ID NO: 567 - DNA, 596 bp, Homo sapiens
tcggctcgagggctgtaagctaattgtggtgtctagtaagtagcataatgagatgtgaggagttggaactttgcgtgttttgcgtattttcatctgcattcagcttcttactctgggtttgtactcgagtgttatttctttacaaatgcccttgtaattaccactctgaagtctgctgactgtgtctcttgaacatacttaggatattctgcacattatggaaaaaggtaaattttagaagtttctgctctactaactgtagatatttatgaccctgcgagttatctatttttataaccacctgtggtccattgttcattttaattcacatttcttatgaagtatggtaacagggagggagacacctagattagcagctcaatttgtactacttcagccaatctgtgaatgtaaaaactacactgttgccttgctaggatccaccctcctgtaatatggaacaaatatctgaatgaaatccaccctaggagacggagtcaaactaaacttgtggtttttcatttaacttttgactacagcatggccccatggcatccacaccaagaaggtgttgtgatgaggtgccggtgtgcaaa

SEQ ID NO: 568 - DNA, 494 bp, Homo sapiens
gctttctgctgcaatggagagaaatcataacagacggtggcacaaggaggccatcttttcctcatcggttattgtccctagaagcgtcttctgaggatctagttgggctttctttctgggtttgggccatttcagttctcatgtgtgtactattctatcattattgtataacggttttcaaaccagtgggcacacagagaacctcactctgtaataacaatgaggaatagccacggcgatctccagcaccaatctctccatgttttccacagctcctccagccaacccaaatagcgcctgctatagtgtagacatcctgcggcttctagccttgtccctctcttagtgttctttaatcagataactgcctggaagcctttcattttacacgccctgaagcagtcttctttgctagttgaattatgtggtggtgtttttccgtaataagcaaaataaatttaaaaaaatgaaaagttgaaaaaaaaaaaaaaggg

SEQ ID NO: 569 - DNA, 599 bp, Homo sapiens
taagctcggaattcggctcgagcacaaagttctgttcttcttcctggcagcttcggacgaaattacacaggcatctcccatgcccaccacccgttaggaatgtccattcctgggctgcgtgcgcaggtccagcagccagtctgtgcaggcgcctggcccggccagggagattgaggcagacccccacaagccctgaaccccagtctcaagttttctgcacgacctgtacttcagtcaccagacactcctccaggccggctttgcccgcctcccagaccacctgcagagacgagaggaggcagggtgagtcggccaccccccagataacagagcccacgtcctgatctgcgggggcctgtcccatctcagatctgctctgtgggccaggcatggtggctcacgcctgtcatcccggcactttggaccaggcgcggtgggtcacacctgtaatcccagcactttgggaggccgaggcgagcggaccataaggtcaggagatccaggccatcctggccaacatggtgaaaccccttctctactgggaatgcaaaattagctgggtgtgttggtgcatgcctgtggtcccagctgcttgggag

SEQ ID NO: 570 - DNA, 509 bp, Homo sapiens
aaaacgctcccccgtcgtgcttcctggggaagggggcgttcgctgcgctcggagcggcgtcccttccaacccgccggtctcatttcttctcgttttcacaggcggcatgcgttcctgcggacgatcgcatcttgtgtcgctgaagcgcctcccccagggaccggcggaccccagccatccagggggcaagaggaattacgtgctctgtgggtctcccccaacgcgcctcgccggatctgagggagaacaagaccgatcggcggccactgcgcccttaactgcatccagcctggggctgaggctgaggcactggcgaggagagggcgctcctctctgcacacctactagtcaccagagactttagggggtgggattccactcgtgtgtttctattttttgaaaagcagacattttaaaaaatgggtcacgtttggtgcttctcagatttctgaggaaattgctttgtattgtatattacaatgatcaccgactgaaaatattgttttaca

SEQ ID NO: 571 - DNA, 99 bp, Homo sapiens
  misc_feature 37: n = A,T,C or G
ctctaaacttttaaataatcgtgaaatgtatgcgcantgaagcgaattcagctatttcctctaccttttgtgtggaatttaaaatactgaacttgtgag

SEQ ID NO: 572 - DNA, 622 bp, Homo sapiens
gtaagctcggggcaatcaagctggctaggttcctgccacaagttcagactagtcttctgtaggtgagaaagcgcataatgatattaatatccacctcccaaaccccagagtgtgttacattccagggtgataaacctagaggggccttcttcctcttcccagaggaaattcacttacatttcaagataatgaataatttctctcctgaatgggaggaatgggtaggtcaccagcagctttgataaaagcttggaggcttctaaatttaagattcttctcctgtgatgcaacccactgcacaggaaacatctgttgccttacgggaaatggggcatggggaaatgacacaaggtgttgtaaatgctttgtgctttcagtagcaaatcttttatggcaccagcccagcagtctggtgtcttctggcagtatatgtatatgaaactgtggcgggctagcctgttggcttgcaagagggacaaactctaagacacttcacagtttctgacttaacaggggagagtggcaggatgtgaaggtgaaggagcaggcagggcaaattacatagcaccatccatagctaaggtaatagatgaattgttaatgttaaaaataatgacagctg

SEQ ID NO: 573 - DNA, 299 bp, Homo sapiens
  misc_feature 266: n = A,T,C or G
gagagtattaaatgtgaattgcctctgcctcgctttatgatgtcaaagaatgatggtgagatacgatttgggaacccagctgagctgcatggaactaaggttcagattccatatttaactacagaaaaaaattccttcaaaagaatggacgatgaggataaacaggaaacacagtctcccacgatgtcacccctcgcctcccctccttcttccccgcctcattaccagagggtgcccttgagccatggctacagcaaactgcgganagcggcagaacagatgcatccagcaccttatga

SEQ ID NO: 574 - DNA, 579 bp, Homo sapiens
aactgctgaacctgatgacagccatgccctctatgccaagaagctgtggactgccccagaactgctcagtgggaaccccttgccaaccacaggcatgcagaaggctgacgtctatagctttgggatcatcctgcaggagatagcacttcgcagtggtcctttctacttggagggcctggacctcagccccaaagagattgtccagaaggtacgaaatggtcagcggccatatttccggccaagcattgaccggacccaactgaatgaagagctagttttgctgatggagcgatgttgggcgcaggacccagctgagcggccagactttggacagattaagggcttcattcggcgctttaacaaggagggtggcaccagcatattggacaacctcctgctgcgcatggaacagtatgccaataacttggagaagctggtggaggaacgcacacaggcctatctggaggaaaaacgcaaggctgaagctctgctctaccaaatcctaccccattcagtggcagagcagttaaaacggggagagactgtacaggctgaggcctttgacagtgttaccatcta

SEQ ID NO: 575 - DNA, 541 bp, Homo sapiens
taagctcggaattcggctcgaggtccaaactgaggcatcaccacaggcggtggcgttttaccttcagccactttgtggttgaccctgaccaggaatatgaggtgaccgttcaccacctgcccaagcccatccctgatggggacccaaaccaccagtccaagaatttccttgtgcctgactgtgagcacgccaggatgaaggtaaccacgccatgcatgagctcaggcagcctgtgggaccccaacatcaccgtggagaccctggaggcccaccagctgcgtgtgagcttcaccctgtggaacgaatctacccattaccagatcctgctgaccagttttccgcacatggagaaccacagttgctttgagcacatgcaccacatacctgcggtaactctgctctttttgacccctctagcatagctcaggaccacccctccaagccctgagtctcttctctgctggtctgacagaaccgcgttgctagaagctcgcgactcagggctgtgcttagtccatagtgatcatggcgccttgccctt

SEQ ID NO: 576 - DNA, 561 bp, Homo sapiens
ctaactcgtcttccggtgggaatttcttcacgtgggccggagtcggagactgagtttaactttactgaggagctctaaatttaggcgggtatgagtgatttcagtgaagaattaaaagggcctgtgacagatgatgaagaagtggaaacatctgtgctcagtggtgcaggaatgcattttccttggcttcaaacatacgtagaaactgtggccattggagggaaaaggaggaaggattttgctcagacaacaagtgcttgtttaagttttatccaagaagctctgctgaagcaccaatggcagcaagctgcagaatacatgtacagttattttcagaccttggaagattcagatagctacaaaaggcaggctgcacctgagcaacatggagagtttcaatacttttgctaaccggatgaaaaatattggcgtcatgaattatttaaagatctccttacaacatgcattataccttctgcatcatggaatgcttaaagatgctaagagaaatctgagtgaggcagagacatggagacatggtgaaaatacgtcttcccggga

SEQ ID NO: 577 - DNA, 346 bp, Homo sapiens
gttcctctagtgtgtggatttgattttgtgtctttgtgcttcctgttgcctcctggtgaacgcagttctgacctttcctttgtttgcaggtatgcttcagaagtgtccttctgttgatgacttcgtaagtgccctcgtttccgacttggatctggacttcgaaactttcctcatggattctgaataaaagaaacactctacacctcttaaatcaaggtcatgtagataatgactttgttataaatgctacagctgtgagagcttgtttctgatttcattgttcgcttctgtaattctgaaaaactttaaactggtagaacttggaataaataatttgttttaatta

SEQ ID NO: 578 - DNA, 248 bp, Homo sapiens
ccacagcccacagccatgggctgggacctgacggtgaagatgctggcgggcaacgaattccaggtgtccctgaacagctccatgtcggtgtcagagctgaaggcgcagatcacccagaagatcggcgtgcaccccttccagcagcgtctggctgtccacccgaacggagtggcgctgcaggacagggtcccccttgccagccagggcctgggccccggcagaacggtcctgctggtggtggacaaatg

SEQ ID NO: 579 - DNA, 490 bp, Homo sapiens
aattcaagatttcagttctgtggcagaaatgcttcggctgtgccagtgttttattcttctatgagtactgcaatggtcattttcaaatctggagttgtaaacagaaactctagaatgagtttcacctatcagattgcagattgcaacagagactatcacaaggcatttggcaacctgagaagccctggatggccagataactacgacaatgacaaggattgcaccgttactctcacagccccccagaaccacaccatttccctcttttttcattcacttggcatcgagaactcagttgaatgcagaaacgatttcttggaggtgagaaatggaagtaacagcaattcaccattactgggcaagtactgtggaactctgctgccaaaccctgtcttctctcaaaataatgaactatacctacgatttaagagtgatagtgtaacttctgatcgtggatatgaaatcatctggacttcatcaccctctggat

SEQ ID NO: 580 - DNA, 254 bp, Homo sapiens
cccgccctgcacctctgctgttaaacaccccagccatcccttctttcaaaagggatcctttcataggagaacacactgaggagatacttgaagaatttggattcagccgcgaagagatttatcagcttaactcagataaaatcattgaaagtaataaggtaaaagctagtctctaacttccaggcccacggctcaagtgaatttgaatactgcatttacagtgtagagtaacacataacattgtatgcatggaa

SEQ ID NO: 581 - DNA, 269 bp, Homo sapiens
ctgcttttgcctgtgtcctgttggtggttctcttcgtcatgatcaacaaatatggtcgacggtccaaatttggaatgaagggtcccgtggctgtcatcagtggtgaggaggactcagccagcccactgcaccacatcaaccacggcatcaccacgccctcgtcactggatgcggggcccgacactgtggtcattggcatgactcgcatccctgtcattgagaacccccagtacttccgtcagggacacaactgccacaagccggacacg

SEQ ID NO: 582 - DNA, 382 bp, Homo sapiens
agtgagtcatccgtccagaagcggggagagcagcagcggcccaagcaggagctgcagcgagccgggtacctggactcagcggtagcaacctcgccccttgcaacaaaggcagactgagcgccagagaggacgtttccaactcaaaaatgcaggctcaacagtaccagcagcagcgtcgaaaatttgcagctgccttcttggcattcattttcatactggcagctgtggatactgctgaagcagggaagaaagagaaaccagaaaaaaaagtgaagaagtctgactgtggagaatggcagtggagtgtgtgtgtgcccaccagtggagactgtgggctgggcacacgggagggcactcggactggagctgagtgcaagcaaac

SEQ ID NO: 583 - DNA, 593 bp, Homo sapiens
tgaagaacggtgccacttacgaagccaaaatcaaggatgtggatgagaaagcagacatcgcactcatcaaaattgaccaccagggcaagctgcctgtcctgctgcttggccgctcctcagagctgcggccgggagagttcgtggtcgccatcggaagcccgttttcccttcaaaacacagtcaccaccgggatcgtgagcaccacccagcgaggcggcaaagagctggggctccgcaactcagacatggactacatccagaccgacgccatcatcaactatggaaactcgggaggcccgttagtaaacctggacggtgaagtgattggaattaacactttgaaagtgacagctggaatctcctttgcaatcccatctgataagattaaaaagttcctcacggagtcccatgaccgacaggccaaaggaaaagccatcaccaagaagaagtatattggtatccgaatgatgtcactcacgtccagcaaagccaaagagctgaaggaccggcaccgggacttcccagacgtgatctcaggagcgtatataattgaagtaattcctgataccccagcagaagctggtggtctcaag

SEQ ID NO: 584 - DNA, 245 bp, Homo sapiens
gcaggattggccggctagtgtttcctctcatttccctttgatacagtcaacaagcctgaccctgtaaaatggaggtggaaagacaagctcaagtgttcacaacctggaagtgcttcgggaagaaggggacaatggcagaacaggtgttggtgacaattgtcaccaattggataaagcagctcaggttgtagtgggccattaggaaactgtcggtttgctttgatttccctgggagctgttctctg

SEQ ID NO: 585 - DNA, 575 bp, Homo sapiens
cctttattaacaacttcaaggtgcaaatttgtgagattccagacaggcagttcaatgagcagctggattttgctggttcccaagagcaaggaaaattcccttgttttaaaaagccagatccatttggaatagtctttcttccccacatattacagcatgaacgtgactctaaagtacctgccgagggtctttctttttgtgacggtgggcgctgttccccactgtcgtggacttctcacagcgctcagtgtgcattcggttgcttctctccataacgcctctcagctaactgtgctgtttctgtgctcctgggttgttaatgttcaagtcttggctctataccattttccttatcatttaggattccactgggaagacatcactaagttgtgaaatcaaacttcatgagttggctgagatcatagggttgggtgtcctctgagcacttgcaggctgggggaagacagaaaacctggacaacttgcaattgtttgcaacaaagtggaaaaactaaagtagttttgatatgtgcattagtttgcttggactgctataacgaaatactacttggtggc

SEQ ID NO: 586 - DNA, 590 bp, Homo sapiens
tcattgattttatttgctgttccaaaatccaggaaatgttggagtttcttttatcaggcctcaaagcagaagaataattctccgtggttcttggctctaccctctagactcttggttttgtcttctgagtcttcctttttcatcaaagctagagtgtgtttttacctgagttcttttctcaggctgcttctttccagtagaattttaggggaactagtggtctctattttgtactgtttctgtcctttttgatccaagatggcagtgtttctactgatacagaagattttgtgggcctcctgtgattctccttgggatttactccattagacaaaagccacactcataaatatcttctttatgagacctaagcttcttacagactctgtttttcggttgaaaggatctgtgaaacataatcttctgaacagccttttgtatgactgaatagcacaatcagccctccgtatccacaggttccacatcccagattcaaccaactgtggactaaaaatacaaaaattagctgggtgtggtggtgcgtgcctgtaatcccagctactcaggatgctgaggcaggagaatcactt

SEQ ID NO: 587 - DNA, 150 bp, Homo sapiens
  misc_feature 32, 118, 132: n = A,T,C or G
gttaaaaaggcgggcggaaccaaacctaagangccagttggggcagccaagaagcccaagaaggcggctggcggcgcaactccgaagaagagcgctaagaaaacaccgaagaaagcgnagaagccggccgcngccactgtaaccaagaaa

SEQ ID NO: 588 - DNA, 160 bp, Homo sapiens; identical to SEQ ID NO: 12

SEQ ID NO: 589 - DNA, 223 bp, Homo sapiens
  misc_feature 204: n = A,T,C or G
ggggcagcaatgggaccatctgtgacaaccagagggactgccagccggggctgtatgtgccttccagaggagggcctggctgtttccctgtgtgcacacccctggcccgtggagggcgagctttgccatgaccccgccagccggcttctggacctcatcacctgggagctagagcctgatggagccttggaccgatgccctgtnccagtggcctcctctgcca

SEQ ID NO: 590 - DNA, 587 bp, Homo sapiens
tgctagctcttaccaaaacagatggtagagagagttgctggctatttaaaaagctctttcatcttttaattcacctcttcttttcacctctttaaccactcctcaggaacagaacacttctaggactgggggtcttttagctccataagcaagtgagcagatgggacaagttagtcttttctccctagaaacaaaggggatgcccagtggtttccctttgcttcccaacctaaaatttcaagtttaataaaatagcaattagcagaagtgaccaaattgggagataattatcagtcatgaggaaagacacagatttcggtcataaagaatgtaagggctataagtagaaactttctataacctaaatgatgttatagaattatttttgagcaggagcagaaagattaaatatgatcacttcatacttctaaatcagaaataggaagattaaaaccacagaacagtttgtgatttctattgctgtagctaggtatcttactctgtccactcttgttcaagtatctaactcttctggaaaccaaataggctttagaagagattatcctatattcctatcagtataatac

SEQ ID NO: 591 - DNA, 424 bp, Homo sapiens
gatacccccctctgtcttgtgaaggcagggggaaggtggggtcctggagcaaaccaccccgcctgccctcatggcccctctgacctgcactggggagcccgtctcagtgttgagccttttccctctttggctcccctgtaccttttgaggagccccagctacccttcttctccagctgggctctgcaattcccctctgctgctgtccctcccccttgtcctttcccttcagtaccctctcagctccaggtggctctgaggtgcctgtcccacccccacccccagctcaatggactggaaggggaagggacacacaagaagaagggcaccctagttctacctcaggcagctcaagcagcgaccgccccctcctctagctgtgggggtgagggtcccatgtggtggcacaggcccccttgagtggg

SEQ ID NO: 592 - DNA, 446 bp, Homo sapiens
tggaattgggtgcccctttgcaggtgtcggctgctccttcaagggaagcccacagtctgtgcaagagcatgaggtcacctcccagacctcccacctaaacctgctgttggggttcatgaaacagtggaaggcccggctgggctgtggcctggagtctgggcccatggccctggagcagaacctgtcagacctgcagctgcaggcagccgtggaagtggcgggggacctggaggtcgattgctaccgggcaccctgctccgagagccaggaggagctggccctgcagcacttcatgaaggagaagcttctggctgagctggaggggaagctgcgtgtgtttgagaacattgttgctgtcctcaacaaggaggtggaggcctcccacctggccctggccacctctatccaccagagccagctggaccgtgagcgcatcctgagcttgg

SEQ ID NO: 593 - DNA, 194 bp, Homo sapiens
catcgcccgtgcggaattgttcctcttcttcaccaccatcctccagaacttctccatggccagccccgtggccccagaagacatcgatctgacaccccaggagtgtggtgtgggcaaaatacccccaacataccagatccgcttcctgccccgctgaaggggctgagggaagggggtcaaaggattccagggtc

SEQ ID NO: 594 - DNA, 341 bp, Homo sapiens
atggctgctgttgtccaacagaacgacctagtatttgaatttgctagtaacgtcatggaggatgaacgacagcttggtgatccagctatttttcctgccgtaattgtggaacatgttcctggtgctgatattctcaatagttatgccggtctagcctgtgtggaagagcccagtgacatgattactgagagttcactggatgttgctgaagaagaaatcatagacgatgatgatgatgacatcacccttacagttgaagcttcttgtcatgacggggatgaaacaattgaaactattgaggctgctgaggcactcctcaatatggattcccctggccctat

SEQ ID NO: 595 - DNA, 240 bp, Homo sapiens
caaaactgcatgccaatggaaagatcctgttctataatgtagttgtagaaaacctagacaaaccatccagttcagagctccattccattccagcaccagccaacagcacaaaactaatccttgacaggtgttcctaccaaatctgcgtcatagccaacaacagtgtgggtgcttctcctgcttctgtaatagtcatctctgcagaccccgaaaacaaagaggttgaggaagaaagaattg

SEQ ID NO: 596 - DNA, 179 bp, Homo sapiens
  misc_feature 17, 19, 30, 33, 38, 49, 55, 79, 101, 110, 138, 145, 162: n = A,T,C or G
accacccaaccgtaacnanccctctcacantgnaatgnagtgcacggtntgaatntgcacacaccaacatgctgagtgnagtcgggggtttgtgctgggcntgctcttcnttggggccgggctgttcatctacttcangaatcanaaacgacatctggactnaaccaacaagattcctt

SEQ ID NO: 597 - DNA, 320 bp, Homo sapiens
tttgttagtctgttgaagaaaatgttgctgattgatgcagatttaagaattactccagctgagaccctgaaccatccttttgttaatatgaaacatcttctagatttccctcatagcaaccatgtaaagtcctgttttcatattatggatatttgtaagtcccacctaaattcatgtgacacaaataatcacaacaaaacttcacttttaagaccagttgcttcaagcagtactgctacactgactgcaaattttactaaaatcggaacattaagaagtcaggcattgaccacatctgctcattcagttgggcaccatgg

SEQ ID NO: 598 - DNA, 533 bp, Homo sapiens
gaggtgaacaccacaaggagagatggcatctggcctgggccccgcctagcagcagctccacctcctaggccaggccctgtgggatgcgccactagaccaccatggacggatcccacagcgcagccctgaagctgcagcagctgcctcccacaagtagctccagcgccgtaagcgaggcctccttctcctacaaggaaaacctgattggcgccctcttggcgatcttcgggcacctcgtggtcagcattgcacttaacctccagaagtactgccacatccgcctggcaggctccaaggatccccgggcctatttcaagaccaagacatggtggctgggcctgttcctgatgcttctgggcgagctgggtgtgttcgcctcctacgccttcgcgccgctgtcactcatcgtgcccctcagcgcagtttctgtgatagctagtgccatcataggaatcatattcatcaaggaaaagtggaaaccgaaagactttctgaggcgctacgtcttgtcctttgttggctgcggtttggct

SEQ ID NO: 599 - DNA, 442 bp, Homo sapiens
acaggtattactactaccaccggcagtaccgccgcgtgccagacatcactgagtgcaaggaggaggacatcatgtgcatgtatgaagccgaaatgcagtggaagagggactacaaagtcgaccaagaaattatcaacattatgcaggatcggctcaaagcctgtcagcagagggaaggacagaactaccagcagaactgtatcaaggaagtggagcagttcacccaggtggccaaggcctaccaggaccgctatcaggacctgggggcctacagttctgccaggaagtgcctggccaaacagaggcagaggatgctgcaagagagaaaagctgcaaaagaggccgccgctgccacctcctgaggcagctgtgggtgcccctgctgtgtggctctgtatgactgttgctgaaatataaagccctgcaacctgaaaaaaaaaaa

SEQ ID NO: 600 - DNA, 660 bp, Homo sapiens
ccccaacaccaccatcaaactctcctaggccatgccaagacccaggacataggacggacccctggtacccagaagaggagttcttgctcactaacccggatccgcctcgtgcccctgcctcctggagcttcccattccaggagaaaaggctccacttcccagcccttccttgcccctgacatttggactcttcccttgggccgaccactctgttctcattctccttcccaccaacatccatccgtccttctcagacaaaccactcactgggtaccccacctcctctctcatatgcccaacacgaccactgcctccctgcccccacacctgcacccaaacagacacatcaacgcaccccactcacagacaccccttaccccacccccactgtacagagaccaagaacagaaattgtttgtaaataatgaaccttattttttattattgccaatcccctaagatattgtattttacaaatctccctcttcccttcgcccctcccttgttttatattttatgaagttagtgcgggctttgctgctccctggcccaggaaagagggactacctgaccctcacctggcacccccctgctgctgcccaagccgctgggcctttttaattgccaaactgctctcttcatcagctcagcacatgcttt

SEQ ID NO: 601 - DNA, 494 bp, Homo sapiens
atgccccgcatagatgcggacctcaagctcgacttcaaggatgtcctgctccgacctaagcggagcagcctcaagagccgagccgaggtggatcttgaacgcaccttcacgtttcgaaattcaaagcagacctactcagggattcccatcatcgtggccaacatggacactgtgggcacgtttgagatggcagccgtgatgtcacagcactccatgtttacagcaattcataagcattactccctggatgactggaagctctttgccacaaatcacccagaatgcctgcagaatgtagccgtgagttcaggcagtgggcagaatgatctggaaaagatgaccagcatcctggaagctgtgccacaggttaagtttatttgcctggatgtggccaatgggtattcaaaacattttgtggaattcgtgaaacttgtccgtgccaaatttcctgaacacaccattatggcagggaacgtggtgacaggagaaatggt

SEQ ID NO: 602 - DNA, 500 bp, Homo sapiens
acctgctcacatgctgtggcagcatgtgtggggacggctgtaatggtggctatcctgctgaagcttggaacttctggacaagaaaaggcctggtttctggtggcctctatgaatcccatgtagggtgcagaccgtactccatccctccctgtgagcaccacgtcaacggctcccggcccccatgcacgggggagggagatacccccaagtgtagcaagatctgtgagcctggctacagcccgacctacaaacaggacaagcactacggatacaattcctacagcgtctccaatagcgagaaggacatcatggccgagatctacaaaaacggccccgtggagggagctttctctgtgtattcggacttcctgctctacaagtcaggagtgtaccaacacgtcaccggagagatgatgggtggccatgccatccgcatcctgggctggggagtggagaatggcacaccctactggctggttgccaactcctggaacactgac

SEQ ID NO: 603 - DNA, 567 bp, Homo sapiens
ccagcggcctcttccccttcctggtgctgcttgccctgggaactctggcaccttgggctgtggaaggctctggaaagtccttcaaagctggagtctgtcctcctaagaaatctgcccagtgccttagatacaagaaacctgagtgccagagtgactggcagtgtccagggaagaagaaatgttgtcctgacacttgtggcatcaaatgcctggatcctgttgacaccccaaacccaacaaggaggaagcctgggaagtgcccagtgacttatggccaatgtttgatgcttaacccccccaatttctgtgagatggatggccagtgcaagcgtgacttgaagtgttgcatgggcatgtgtgggaaatcctgcgtttcccctgtgaaagcttgattcctgccatatggaggaggctctggagtcctgctctgtgtggtccaggtcctttccaccctgagacttggctccaccactgatatcctcctttggggaaaggcttggcacacagcaggctttcaagaagtgccagttgatcaatgaataaataaacgagcctatttctctttgc

SEQ ID NO: 604 - DNA, 569 bp, Homo sapiens
gaggtccggaccctatttgtcagtggccttcctctggatatcaaacctcgggagctctatctgcttttcagaccatttaagggctatgagggttctcttataaagctcacatctaaacagcctgtaggttttgtcagttttgacagtcgctcagaagcagaggctgcaaagaatgctttgaatggcatccgcttcgatcctgaaattccgcaaacactacgactagagtttgctaaggcaaacacgaagatggccaagaacaaactcgtagggactccaaaccccagtactcctctgcccaacactgtacctcagttcattgccagagagccatatgagctcacagtgcctgcactttaccccagtagccctgaagtgtgggccccgtaccctctgtacccagcggagttagcgcctgctctacctcctcctgctttcacctatcccgcttcactgcatgcccagatgcgctggctccctccctccgaggctacttctcaaggctggaagtcccgtcagttctgctgaatactatgtccaagtgtgtgatggcggctgcaatctgtctt

SEQ ID NO: 605 - DNA, 650 bp, Homo sapiens
accctgcagccaccagcactgcctggctccacgtgcctcctggtctcagtatggcgctgtcctgggttcttacagtcctgagcctcctacctctgctggaagcccagatcccattgtgtgccaacctagtaccggtgcccatcaccaacgccaccctggaccggatcactggcaagtggttttatatcgcatcggcctttcgaaacgaggagtacaataagtcggttcaggagatccaagcaaccttcttttacttcacccccaacaagacagaggacacgatctttctcagagagtaccagacccgacaggaccagtgcatctataacaccacctacctgaatgtccagcgggaaaatgggaccatctccagatacgtgggaggccaagagcatttcgctcacttgctgatcctcagggacaccaagacctacatgcttgcttttgacgtgaacgatgagaagaactgggggctgtctgtctatgctgacaagccagagacgaccaaggagcaactgggagagttctacgaagctctcgactgcttgcgcattcccaagtcagatgtcgtgtacaccgattggaaaaagataagtgtgagccactggagaagcagcacgagaaggagaggaaacaggaggagggggaat

SEQ ID NO: 606 - DNA, 271 bp, Homo sapiens
  misc_feature 224, 229: n = A,T,C or G
cggttggctcggcgcgggagtcggctgcacgtgcgggcgggggcgatgcgtcactgattcggtgaggcgcggccgaggggtcggctttcctcgcgagcctgcggctgggcttcttctcagaggaacgagaatgaatatgactcaagcccgggttctggtggctgcagtggtggggttggtggctgtcctgctctacgcctccatccacaagattgaggagggcnatctngctgtgtactacaggggatgagctttactaactagccccagt

SEQ ID NO: 607 - DNA, 282 bp, Homo sapiens
  misc_feature 14, 31, 58, 60, 66, 89, 125, 197, 211: n = A,T,C or G
gtaaaatgttaaantttcagctgtatttttnttttcttttccgatgtggctactaganantttaanatgacacatggctcacattttanttcttttagccagtgctgctctagactgagtttgcntgaggtgtaactgtctagagctatagtgacatgtaagtaatatacatgctttgtacaaaatctccctataanctgctgattttganattgaagtcatgaaagacagattgaaccgatagagtcctttgagagtcaccagttactggtccactctctg

SEQ ID NO: 608 - DNA, 312 bp, Homo sapiens
ccctggaggtctatcctgcatacctggagagcttctctggtcctgcccaccttgaaagttgcagactttgttgtaacatctatgtgatgagcttccctgtgaagccccatttgacaggtgggccagcagtgttttatcagcactctgatggcccacatttcccaggaaaacttcttgaaacttaccgttgtgggcagtggtcagagcgtgtagttcttatgactgtcttgtttcatctgtggagcacgtgtggagcagttggtacagcagtttctgtggggtttggcatgggtgattttggttagtaaccat

SEQ ID NO: 609 - DNA, 242 bp, Homo sapiens
cttgggttcccttattctcccagtctgtgatgaattgctttgacttctgacacctcgtatgaaaactgcacgtgcagtctgattatttagcaagactgaggcttgagggtgcgcactcctgacggggagctgagagtggaaacaggtgttgcccgaaacgaaggagtggggacttaatgtctgtattttggcgctgactttcaggtttcgtcgcgagccggctgcaagttttgaacctaagt

SEQ ID NO: 610 - DNA, 78 bp, Homo sapiens
gaactttgccgttgaagctgctaactaccaagacactattggccgcctgcaggatgagattcagaatatgaaggagga

SEQ ID NO: 611 - DNA, 525 bp, Homo sapiens
gccgggtcaactgctcggtctatgtgcagctggagaaggtgtgcaggggaaaccctgctgatgtcaccgaggccaggttgtctttctactcgggacactcttcctttgggatgtactgcatggtgttcttggtgctgtatgtgcaggcacgactctgttggaagtgggcacggctgctgcgacccacagtccagttcttcctggtggcctttgccctctacgtgggctacacccgcgtgtctgattacaaacaccactggagcgatgtccttgttggcctcctgcagggggcactggtggctgccctcactgtctgctacatctcagacttcttcaaagcccgacccccacagcactgtctgaaggaggaggagctggaacggaagcccagcctgtcactgacgttgaccctgggcgaggctgaccacaaccactatggatacccgcactcctcctcctgaggccggaccccgcccaggcagggagctactgtgagtccagctgaggcccacccaggtggtccct

SEQ ID NO: 612 - DNA, 77 bp, Homo sapiens
  misc_feature 17: n = A,T,C or G
cccagacagactcgganagatggcaggcggaagacaccggcgcgtcgtgggcaccctccacctgctgctgctggtgg

SEQ ID NO: 613 - DNA, 476 bp, Homo sapiens
acgacaacgtcctgcactcggccttcgaggtgggcgcccgcaaggtggtgtcctgcctgtccacctgtatcttccctgacaagacgacctacccgatagatgagaccatgatccacaatgggcctccccacaacagcaattttgggtactcgtatgccaagaggatgatcgacgtgcagaacagggcctacttccagcagtacggctgcaccttcaccgctgtcatccccaccaacgtcttcgggccccacgacaacttcaacatcgaggatggccacgtgctgcctggcctcatccacaaggtgcacctggccaagagcagcggctcggccctgacggtgtggggtacagggaatccgcggaggcagttcatatactcgctggacctggcccagctctttatctgggtcctgcgggagtacaatgaagtggagcccatcatcctctccgtgggcgaggaagatgaggtctccatc

SEQ ID NO: 614 - DNA, 160 bp, Homo sapiens
agagctcatcactgttaactcagcctgggtttttcacagcagtcatggaaatagattcattaataatagtaacaaatatatagtctccctctcaaagaaaccttgagtggcagtggcataccagatacacagtaggaaatactgtagaattatgttgtta

SEQ ID NO: 615 - DNA, 272 bp, Homo sapiens
cagttatctaagctttgattccttacagcaggaggctgcccttgagcctgagcagaagcagctacaatggccgtcaggggccacatttctcaaaaggttggcagaacctgaattaccagaccctttttaaatcccagttgtgtccctttttaagctgtgagaccagttttttgaattccattgctttgaaatgtttcctattactgatttttttttttaactttccttgacatcttgaatgtgtttttttgattgatgttcaatatacccag

SEQ ID NO: 616 - DNA, 341 bp, Homo sapiens
  misc_feature 74, 81, 86, 93, 96, 100, 105, 108, 111, 117, 129, 137, 197,208, 210, 231, 257, 259, 261, 263, 268, 275, 290, 292, 294,316, 320: n = A,T,C or G
gctgtactggagccacccgcgaaaattcggccagggttctcgctcttgtcgtgtctgttcaaaccggcacggtnctggatnccggnaaatatnggncctncaatnatngtngcccgnccaagttgtttntcccggtncaagttaaccggcggaaaagggaattaattccgggttttttccattttaaaaggtttggngaaacttaaanantgggcttccttttcccttttncaaggaaggggaatttaattccccgngngngncaatncttaacnttccaaattggaaanananaacccaattggaattaaatttncctntttggttaattaattaaaaca

SEQ ID NO: 617 - DNA, 556 bp, Homo sapiens
taagctcgggattcggctcgagggcctccggcggtgcggccggcgcgacctccctctgcttcgtgtacccgctggatttcgccagaacccgcctggcagcggacgtgggaaagtcaggcacagagcgcgagttccgaggcctgggagactgcctggtgaagatcaccaagtccgacggcatccggggcctgtaccagggcttcagtgtctccgtgcagggcatcatcatctaccgggcggcctacttcggcgtgtacgatacggccaagggcatgctccccgaccccaagaacacgcacatcgtggtgagctggatgatcgcgcagaccgtgacggccgtggccggcgtggtgtcctaccccttcgacacggtgcggcggcgcatgatgatgcagtccgggcgcaaaggagctgacatcatgtacacgggcaccgtcgactgttggaggaagatcttcagagatgaggggggcaaggccttcttaagggtgcgtggtccaacgtcctgcggggcatggggggcgccttcgtgctggtcctgtacgacgagctcaag

SEQ ID NO: 618 - DNA, 553 bp, Homo sapiens
cctcctgctgctctcggcggccctggccctgaccgagacctgggccgtgggctacgtggacgacacccatttcgtgaggttcgacagcgacgccgcgagtccgagagaggagccgcgggcgccgtggatagagcaggaggggccggagtattgggaccggaacacacagatctacaaggcccaggcacagactgaccgatagagcctgcggaacctgcgcgggtactacaaccagagcgaggccgggtctcacaccctccatagcatgtacgggtgcgacgtggggccggacgggcgcctcctccgcgggcatgaccagttcgcctacgacggcatggattacatcgccctgaacgaggacctgcgctcctggaccgccgcggacacggcggctcatatcacccatgcgcaagtgggaggcggcccgtgaggcggagcatcggagagcctacctggagggcgagtgcgtggagtggctccgcagatacctggagaacgggaaggacaagctggagcgcgctgaccccccaaagacacacgtgacccaccaccc

SEQ ID NO: 619 - DNA, 579 bp, Homo sapiens
caaagccggttcccggcccagtcccgtcctgcagcagtctgcctcctctttcaacatgacagatgccgctgtgtccttcgccaaggacttcctggcaggtggagtggccgcagccatctccaagacggcggtagcgcccatcgagcgggtcaagctgctgctgcaggtgcagcatgccagcaagcagatcactgcagataagcaatacaaaggcattatagactgcgtggtccgtattcccaaggagcagggagttctgtccttctggcgcggtaacctggccaatgtcatcagatacttccccacccaggctcttaacttcgccttcaaagataaatacaagcagatcttcctgggtggtgtggacaagagaacccagttttggcgctactttgcagggaatctggcatcgggtggtgccgcaggggccacatccctgtgttttgtgtaccctcttgattttgcccgtacccgtctagcagctgatgtgggtaaagctggagctgaaagggaattccgaggcctcggtgactgcctggttaagatctacaaatctgatgggattaagggcctgtacca

SEQ ID NO: 620 - DNA, 367 bp, Homo sapiens
ccccaaattcctgtgcaacgtggctggctgccttttcttcatcaacacctactgctctgtggccttcctgggcgtcatcacttataaccgcttccaggcagtaactcggcccatcaagactgctcaggccaacacccgcaagcgtggcatctctttgtccttggtcatctgggtggccattgtgggagctgcatcctacttcctcatcctggactccaccaacacagtgcccgacagtgctggctcaggcaacgtcactcgctgctttgagcattacgagaagggcagcgtgccagtcctcatcatccacatcttcatcgtgttcagcttcttcctggtcttcctcatcatcctcttctgcaacctg

SEQ ID NO: 621 - DNA, 383 bp, Homo sapiens
ggttaggcatctatccaatctcccatgccagtaattctacagaaacagattaggttagctagataagcatgtttacaattaaatttatgctgtatccttctaatcaccactttctcatcaaaatgctcacaaatcatctgcatcattgtccattctttaaaaatgtataaacccatctctactaaaaatacaaaattagctgggcatgatggcgcacgcctgtaatcccagctgttcaggaggctgaagcagaagaattgcttgaaccccggagacggaggttgcagtcagccgagattgcaccattgctctctagcctgggcaacaagagcaaaactccatctcaaaaaaaaaaaaaaaaaaaaagggtaaattttttttaa

SEQ ID NO: 622 - DNA, 470 bp, Homo sapiens
gcccagcgacggcttaagccagcccccgactggcctggccacactgctctccagtagcacagatgtctgctcctcctcttgaacttgggtgggaaaccccacccaaaagccccctttgttacttaggcaattccccttccctgactcccgagggctagggctagagcagacccgggtaagtaaaggcagacccagggctcctctagcctcatacccgtgccctcacagagccatgccccggcacctctgccctgtgtctttcatacctctacatgtctgcttgagatatttcctcagcctgaaagtttccccaaccatctgccagagaactcctatgcatcccttagaaccctgctcagacaccattacttttgtgaacgcttctgccacatcttgtcttccccaaaattgatcactccgccttctcctgggctcccgtagcacactataacatctgctggagtgttgct

SEQ ID NO: 623 - DNA, 468 bp, Homo sapiens
attccgcgacttctcgaagtgggcaggtcccaccttgtggaggatggaggtgaccggggacgccggggtaccagaatctggcgagatccggactctaaagccgtgtctgctgcgccgcaactacagccgcgaacagcacggcgtggccgcctcctgcctcgaagacctgaggagcaaggcctgtgacattctggccattgataagtccctgacaccagtcaccctggtcctggcagaggatggcaccatagtggatgatgacgattactttctgtgtctaccttccaatactaagtttgtggcattggctagtaatgagaaatgggcatacaacaattcagatggaggtacagcttggatttcccaagagtcctttgatgtagatgaaacagacagcggggcagggttgaagtggaagaatgtggccaggcagctgaaagaagatctgtccagcatcatcctcctatc

SEQ ID NO: 624 - DNA, 521 bp, Homo sapiens
aagctcgggaattcggctcgaggtggactggctgacaaagggacccagcttcccatcactaccccaggtctccaccagccttctggagaacctgaagaccagctgcccacagagccaccttcaggaccctcggggctgcccctgctgcctgtgctgttcgctcttggggggcttctgctcctctccaatgcctcctgtgtcgggggggtcctctggcagcggagactcaggcgtcttgctgagggcatctcagagaagacagaggcagggtcggaagaggaccgagtcaggaacgaatatgaggagagccagtggacaggagagcgggacactcagagctccacggtcagcacaacagaggcagagccgtattaccgctccctgagggacttcagcccccagctgcccccgacgcaggaggaggtgtcttattcccgaggtttcacaggtgaagatgaggatatggccttccctgggcacttgtatgatgaggtagaaagaacgtaccccccgtctggagc

SEQ ID NO: 625 - DNA, 547 bp, Homo sapiens
ggctcgagcccagagtttaagaaccgccctctagaggcagccctccttgctagtctgggacttcccggtggagtgaggaacccagcaacacgctcctgacttcccttcccaaggactcgacctgagaaccgccatgtactcggagatccagagggagcgggcagacattgggggcctgatggcccggccagaatacagagagtggaatccggagctcatcaagcccaagaagctgctgaaccccgtgaaggcctctcggagtcaccaggagctccaccgggagctgctcatgaaccacagaaggggccttggtgtggacagcaagccagagctgcagcgtgtcctagagcaccgccggcggaaccagctcatcaagaagaagaaggaggagctggaagccaagcggctgcagtgcccctttgagcaggagctgctgagacggcagcagaggctgaaccagctggaaaaaccaccagagaaggaagaggatcacgcccccgagtttattaaagtcagggaaaacctgcggagaattgccacactgacc

SEQ ID NO: 626 - DNA, 230 bp, Homo sapiens
  misc_feature 22, 38, 52, 58, 77, 132, 157, 177, 191, 195: n = A,T,C or G
actcattccaatcaggccctanaccagttgtttgacanaatcatggcattanacattnatgagcgccacctactgcntcttggtcatggagaagaagagctggagacagagaaagatttcagcaggtatggnagagttaattatgttctggctcgangaatagaacttttagaagangtcaaacgattgcnaaanagtctaggggttccaggagatgcctcatatacctg

SEQ ID NO: 627 - DNA, 543 bp, Homo sapiens
aagctcggaattcggctcgaggattgattcttcaatgggttcagcatttcacttccctctgaaattaagtggcaaagtaatagcatcccttaaaaaacaggacattggtgagaggtacaatagcaggaggaattttgaaacatggagggatggctactggaaaagaactgatgaagtgcagagtctctccagacaatggtagaaaccacaggactacattaagattgggcccaaatactagtttaaaaaaaggtaaataaaactagctttacttaagagtacagccagcttaattactggctagtggacatatttcagacaaatctaactggagagaaaaacagaccaggagagaaagcgaagttacaatgaaatggaactagagaaacctcacaaagggataaaggaggtaattaaaggttaaagccagatagcctcgagctcaaaggagaaatattggaggccagataggaaagtgccttcctactcagggggttatggatccagggtggctaaataatagaagtagagttccacccaggg

SEQ ID NO: 628 - DNA, 580 bp, Homo sapiens
gaaactggcccagcagatcaagcaggaagtgcggcaggaggtagaagagtgggtggcctcaggcaacaaacggccacacctgagtgtgatcctggttggcgagaatcctgcaagtcactcctatgtcctcaacaaaaccagggcagctgcagttgtgggaatcaacagtgagacaattatgaaaccagcttcaatttcagaggaagaattgttgaatttaatcaataaactgaataatgatgataatgtagatggcctccttgttcagttgcctcttccagagcatattgatgagagaaggatctgcaatgctgtttctccagacaaggatgttgatggctttcatgtaattaatgtaggacgaatgtgtttggatcagtattccatgttaccggctactccatggggtgtgtgggaaataatcaagcgaactggcattccaaccctagggaagaatgtggttgtggctggaaggtcaaaaaacgttggaatgcccattgcaatgttactgcacacagatggggcgcatgaacgtcccggaggtgatgccactgttacaatatctcatcgatatactccc

SEQ ID NO: 629 - DNA, 584 bp, Homo sapiens
tcggctcgagaccagattgaatttttaaacactgagttcaaagctacaatgtacaacttgttggcctacataaaacacctagatggtaacaacgaggcagccctggaatgcttacggcaagctgaagagttaatccagcaagaacatgctgaccaagcagaaatcagaagtctagtcacttggggaaactacgcctgggtctactatcacttgggcagactctcagatgctcagatttatgtagataaggtgaaacaaacctgcaagaaattttcaaatccatacagtattgagtattctgaacttgactgtgaggaagggtggacacaactgaagtgtggaagaaatgaaagggcgaaggtgtgttttgagaaggctctggaagaaaagcccaacaacccagaattctcctctggactggcaattgcgatgtaccatctggataatcacccagagaaacagttctctactgatgttttgaagcaggccattgagctgagtcctgataaccaatacgtcaaggttctcttgggcctgaaactgcagaagatgaataaagaagctgaaggagagcagtttgttga

SEQ ID NO: 630 - DNA, 97 bp, Homo sapiens
ggggaaaggaggtctcactgagcaccgtcccagcatccggacaccacagcgggcccttcgctccacgcagaaaaaccacactttctcaaacctttca

SEQ ID NO: 631 - DNA, 497 bp, Homo sapiens
gagcttaaggaaaatgacagaatttttgtttctgtaacaaatgagcacttgatagacatggaccatgaagccagttttttcggggcctttttagttggctaactgacctggaaagaaaaagcaataacctcaaagtgactattcagttttcaggatgatacactatgaagatgtttcaaaaaatctgaccaaaacaaacaaacagaaaacagaaaacaaaaaaacctctatgcaatctgagtagagcagccacaaccaaaaaattctacaacacacactgttctgaaagtgactcacttatcccaagaaaatgaaattgctgaaagatctttcaggactctacctcatatcagtttgctagcagaaatctagaagactgtcagcttccaaacattaatgcaatggttaacatcttctgtctttataatctactccttgtaaagactgtagaagaaagcgcaacaatccatctctcaagtagtgtatcacagtagtag

SEQ ID NO: 632 - DNA, 281 bp, Homo sapiens
aagaccccgaacacctccaacatgaagcttcttcatgttttcctgttattctgtgcttccattaaggttttgcaaggtcacttatacatctccaagaggatctggtggagaaaaagtgcttagcaaaaaaatatatcacctctcctgggataaagtcttctgccagccatggcagagatgcattgagggcacctgtgtttgtaaactaccgtatcagtgcccaaagatggcactgcagtgtgtgcaactaacaggggaagttcccaacatactgtcacaaa

SEQ ID NO: 633 - DNA, 477 bp, Homo sapiens
aagcatatatactgtagggagaagtatcaaaatcatttaaggtcttttttccaaactagtgttcccctcccacatcccaataactcttggaagtctggtgctccctctaggtgaaaatcatttgctggcttatggagtcactgttgctgagtcccatcccccagttacagtgcagtggaaaacaggtttagaatctagaacttgtttgtatgttgtcacttggttatgttccaagtaggttagaaccatggaaaagagattgcaaatggtagtttcttctagatattcaaatgcatatatgtatgtacatgtaattataaataaataatgaatttttattaaagtgttgtatgaacataggtttttgtttgtttctgaggcaggagaatggcgtgaacccgggaggcggagcttccagtgagccgagatcgcaccactgcactccagcctgggtgacagagcgagactccctctcaa

SEQ ID NO: 634 - DNA, 562 bp, Homo sapiens
ggtatttaggttcccatatatgaattgtggggggatattaacatttagaccatagcacctactcatgaaagaacattaataattaacacctctagtgagtatttgtgagtctaggatttacagaacataaggatattgtacaaattttaaaagccaaaatgagttttagtattactaaacaacaactgttcagcaggaaaaaaaagaaaatagtaatacagaatccctgtaagcattacctgcactaaactgagcacacaattataactcaagctttacataaaaaaaatgctggtgacaaaggtaaaaattttttatctggcctctattttaagccgttattaaaaaataaacaggctgggcatgtgtcttacgcctgtaatcccaacactttgggaggccaaggcaggcggatcacctgagatcaggagttcaagaccagcctggccaacatggtgaaaccccatcaccactaaaaatacaaaaataagccaggcgtgatggcgcatgcttgtaatcccagctactcagaaggctgaggccggataattgcttgaatccg

SEQ ID NO: 635 - DNA, 234 bp, Homo sapiens
gttggggccaggacacccagtgagcccatacttgctctttttgtcttcttcagactgcgccatggggctcagcgacggggaatggcagttggtgctgaacgtctgggggaaggtggaggctgacatcccaggccatgggcaggaagtcctcaatcaggctctttaagggtcacccagagactctggagaagtttgacaagttcaagcacctgaagtcagaggacgagatgaaag

SEQ ID NO: 636 - DNA, 106 bp, Homo sapiens
  misc_feature 43: n = A,T,C or G
cttgaagacgttcagcctcatgacttaggaaaagttggagacngtcattgtgaccaaagacgatgccatggctcttaaaaggaaaaggtgacaaggctcaaattga

SEQ ID NO: 637 - DNA, 278 bp, Homo sapiens
  misc_feature 189, 223, 229, 250, 263: n = A,T,C or G
ttctgtcatcaaacaaaaacaggtatcagtgcattattaaatgaatatttaaattagacttaccagtaatttcatgtctacttttaaaatcagcaatgaaacaataatttgaaatttctaaattcatagggtagaatcacctgtaaaagctgtttgatttcttaaagttattaaactgtacatataccnaaaagaagctgtctggattaaatctgtaaaatcngtaganatttactacattgctgttaanatatttataagtntgtccttttcaccag

SEQ ID NO: 638 - DNA, 218 bp, Homo sapiens
gcgtcccggagcccacggtggtcatggctgccagagcgctctgcatgctggggctggtcctggccttgctgtcctccagctctgctgaggagtacgtgggcctgtcccagcaagggctctggcagctgacagggctttgtctgggacagctgcaaaccagtgtgccgtgccagccaaggacagggtggactgcggctacccccatgtcacccccaagg

SEQ ID NO: 639 - DNA, 272 bp, Homo sapiens
cgggagctgggtgaatgaggtgctgggcccggagctgccgaaatgtgttccagtctgtggagtccccagagaaccctttgaagaaaaacagaggataattggaggatccgatgcagatattaaaaacttcccctggcaagtcttctttgacaacccatgggctggtggagcgctcattaatgagtactgggtgctgacggctgctcatgttgtggagggaaacagggagccaacaatgtatgttgggtccacctcagtgcagacctcacggc

SEQ ID NO: 640 - DNA, 235 bp, Homo sapiens
cttaccttgtattggacgaagctgacagaatgcttgatatggggtttgaaccccagatccgtaaaattgttgaccaaatcaggcctgataggcagacactgatgtggagtgcaacctggccaaaagaagtaagacagcttgcagaggatttccttcgtgattacacccagatcaacgtaggcaatctggagttgagtgccaaccacaacatcctccagatagtggatgtctgcat

SEQ ID NO: 641 - DNA, 295 bp, Homo sapiens
atcgagctggacaaagatctttatggccctgacaaccacctcgttgagtggcatcggacacccacgacccaggagacggacggcttccaggtgaaacggcctggggacctgagtgtgcgctgcacgctgctcctcatgctggactaccagcctccccagttcaaactggatccccgcctagcccggctgctggggctgcacacacagagccgctcagccattgtccaggccctgtggcagtatgtgaagaccaacaggctgcaggactcccatgacaaggaatacatcaatgggg

SEQ ID NO: 642 - DNA, 499 bp, Homo sapiens
cctgcttatcacaatgaatgttctcctgggcagcgttgtgatctttgccaccttcgtgactttatgcaatgcatcatgctatttcatacctaatgagggagttccaggagattcaaccaggaaatgcatggatctcaaaggaaacaaacacccaataaactcggagtggcagactgacaactgtgagacatgcacttgctacgaaacagaaatttcatgttgcacccttgtttctacacctgtgggttatgacaaagacaactgccaaagaatcttcaagaaggaggactgcaagtatatcgtggtggagaagaaggacccaaaaaagacctgttctgtcagtgaatggataatctaatgtgcttctagtaggcacagggctcccaggccaggcctcattctcctctggcctctaatagtcaatgattgtgtagccatgcctatcagtaaaaagatttttgagcaaaaaaaaaaaaaaaaaaaaaaaggggggcccccc

SEQ ID NO: 643 - DNA, 449 bp, Homo sapiens
ttatatgtaattgcctgctgtcagtgaatcttgggtttaaggcccattagaaaatagcaggctttagtagagtggttttttccagtgagtacttttcagtcaacaggtttattgggaggtggctaaaatgcacatggaggtgagcccttccctgccagacaagcaaagaatcaagctgtatatttaaaacttggctgttaacccaaaggatttctacaggaagtttttttctcctttgatgtttgtagaggggtttttttttcccctcccgacaaaatcaatacacagaaaacccaaagctcttaatttgcaaaactgaatggatttgtgaaaataaatacctttttggcaaaaatgcaatttggcattaatcccttgatctaaaacttaaaaaaaaccaggctgaattcaaatttattgatggatcaatttaaagagttttaatctgg

SEQ ID NO: 644 - DNA, 583 bp, Homo sapiens
aggtgctgcaacaaaaggagcacacgatcaacatggaggagtgccggctgcgggtgcaggtccagcccttggagctgcccatggtcaccaccatccaggtgatggtgtccagccagttgagtggccggagggtgttggtcactggatttcctgccagcctcaggctgagtgaggaggagctgctggacaagctagagatcttctttggcaagactaggaacggaggtggcgatgtggacgttcgggagctactgccagggagtgtcatgctggggtttgctagggatggagtggctcagcgtctgtgccaaatcggccagttcacagtgccactgggtgggcagcaagtccctctgagagtctctccgtatgtgaatggggagatccagaaggctgagatcaggtcgcagccagttccccgctcggtactggtgctcaacattcctgatatcttggatggcccggagctgcatgacgtcctggagatccacttccagaagcccacccgcgggggcggggaggtagaggccctgacagtcgtaccccaaggacagcagggcctagcagtcttcacctctgagtc

SEQ ID NO: 645 - DNA, 507 bp, Homo sapiens
cctttcccccttcatgggagacaacgataacgaaaccttggccaacgttacctcagccacctgggacttcgacgacgaggcattcgatgagatctccgacgatgccaaggatttcatcagcaatctgctgaagaaagatatgaaaaaccgcctggactgcacgcagtgccttcagcatccatggctaatgaaagataccaagaacatggaggccaagaaactctccaaggaccggatgaagaagtacatggcaagaaggaaatggcagaaaacgggcaatgctgtgagagccattggaagactgtcctctatggcaatgatctcagggctcagtggcaggaaatcctcaacagggtcaccaaccagcccgctcaatgcagaaaaactagaatctgaagaagatgtgtcccaagctttccttgaggctgttgctgaggaaaagcctcatgtaaaaccctatttctctaagaccattcgcgatttagaagttgtggagggaagtgctgc

SEQ ID NO: 646 - DNA, 620 bp, Homo sapiens
tgcaatagagtgtcagccaaatgtgtcatacatcaaatcttcagcagcttttgcataatccaggagaattgaataatagttgaagttaattttgccagtgaaatgtacggaaagaaaaatgtttgaaatttaaattattcagatagctaaattcttaatcctaaaatttaaaccccttaattctgtctgtagtgttatatcaagactttttgatagtcatgaaactgagtaaaactttattcagattacttaaaaacagcttttcctgtggttaataacacctttattttgaacagagtactcttaagcaacttatattgtgctgattaaagatttaatctgtgcatattttttaccctgttgtttatttagttttgataactgtgaaataaaccataattaaatcacaaaagtcacctgcctcttttgtttccctggaaatttggccaaattttttttaacggaaagttctgctaatgaaaattgggaaattggagacatatattattttgactgtgtgtcctctgtcattaaagatggactatactagctgggtgtggttgctgatgcctataatcccaccactttgggaggccaaggcaggtagacggcttgagctc

SEQ ID NO: 647 - DNA, 377 bp, Homo sapiens
tgcacctcccggacttcaggcctgcctttccagcgagaattcttcatcctccacggttcactagctcctacctgaagaggaaagggggccatttgacctgacatgtcaggaaagccctaaactgaatgtttgcgcctgggctgcagaagccagggtgcatgaccaggctgcgtggacgttatactgtcttcccccacccccggggaggggaagcttgagctgctgctgtcactcctccaccgagggaggcctcacaaaccacaggacgctgcaacgggtcaggctggcgggcccggcgtgctcatcatctctgccccaggtgtacggtttctctctgacattaaatgcccttcatggaggttttgctccctttcctt

SEQ ID NO: 648 - DNA, 298 bp, Homo sapiens
  misc_feature 50: n = A,T,C or G
cttgcgcttgtttagccctgaaccaggagcaacagggtcagcttctggangttggttggaacaatacggcaagtgctcgaaatgacatccagagaaatctaaactgctgtgggttccgaagtgttaacccaaatgacacctgtctggctagctgtgttaaaagtgaccactcgtgctcgccatgtgctccaatcataggagaatatgctggagaggttttgagatttgttggtggcattggcctgttcttcagttttacagagatcctgggtgtttggctgacctacagatacaggaa

SEQ ID NO: 649 - DNA, 455 bp, Homo sapiens
tgctcttcctctgtggccagttggggaccagcatcatgaagtggatggtggtggtcttggtctgcctccagctcttggaggcagcagtggtcaaagtgcccctgaagaaatttaagtctatccgtgagaccatgaaggagaagggcttgctgggggagttcctgaggacccacaagtatgatcctgcttggaagtaccgctttggtgacctcagcgtgacctacgagcccatggcctacatggatgctgcctactttggtgagatcagcatcgggactccaccccagaacttcctggtcctttttgacaccggctcctccaacttgtgggtgccctctgtctactgccagagccaggcctgcaccagtcactcccgcttcaaccccagcgagtcgtccacctactccaccaatgggcagaccttctccctgcagtatggcagtggcagcctcacc

SEQ ID NO: 650 - DNA, 429 bp, Homo sapiens
gatttgatggtgcaacagctgcagcccggaaagaggtgataaggaacaagatccgagcaataggcaaaatggccagagtgttctcagtgctcagagaagagagtgagagtgtgctgacgctgaaaggcttgaccccaactggcatgctccccagcggagtactttctggagggaagcaaaccctgcaaagcgctatcaaaggattttcaccacaacataagatcactagcttcgaggaagccaagggcttagaccgaattaatgagaggatgccgcctcgcagagatgccatgccctctgacgccaaccttaactccatcaacaaggctctcacctcagagactaacggcacggacagcaatggcagtaatagcagcaatattcagtgaccacttcctgttcacttttttttttttttttttttttttt

SEQ ID NO: 651 - DNA, 265 bp, Homo sapiens
  misc_feature 46, 50, 62, 74, 91, 108: n = A,T,C or G
gtaatgatagcaaagccatcgtgaagacccttgctgctaccggganaggntttgactgtgcnagcaagactganatacagttggtgcagantctgggggtgcctccanagaggattatctatgcaaatccttgtaaacaagtatctcaaattaagtatgctgctaataatggagtccagatgatgacttttgatagtgaagttgagttggtgaaagttgccagagcacatcccaaagcaaagttggttttgcggattgccactga

SEQ ID NO: 652 - DNA, 543 bp, Homo sapiens
  misc_feature 43: n = A,T,C or G
ctgatcagtgttctagaacagatcagacattttgtaatgatgncctgaaataaacactaaccacctcgacaagcaacaggttcaactcctggcagagatgtgtatccttattgatgaaaatgacaataaaattggagctgagaccaagaagaattgtcacctgaacgagaacattgagaaaggattattgcatcgagcttttagtgtcttcttattcaacaccgaaaataagcttctgctacagcaaagatcagatgctaagattacctttccaggttgttttacgaatacgtgttgtagtcatccattaagcaatccagccgagcttgaggaaagtgacgcccttggagtgaggcgagcagcacagagacggctgaaagctgagctaggaattcccttggaaagaagttcctccagaagaaattaattatttaacacgaattcactacaaagctcagtctgatggtatctgggggtgaacatgaaattgattacattttgttggatggtgagcagcgtccctctcatgtgacacccacagtt

SEQ ID NO: 653 - DNA, 475 bp, Homo sapiens
gttcaatatgtcaagggaaaacatatccatttcggggcgcctttccaccagtatggaatcccattgcatatttggattacaataatctgtggaggacaatagataacatggggaaggagattccaactgatgcaccctgggaggctcaacatgctgacaaatgggacaaaatgaccatgaaagagctcattgacaaaatctgctggacaaagactgctaggcggtttgcttatctttttgtgaatatcaatgtgacctctgagcctcacgaagtgtctgccctgtggttcttgtggtatgtgaagcagtgcgggggcaccactcggatattctctgtcaccaatggtggccaggaacggaagtttgtaggtggatctggtcaagtgagcgaacggataatggacctcctcggagaccaagtgaagctgaaccatcctgtcactcacgttgaccagtcaagtgacaacatcatcat

SEQ ID NO: 654 - DNA, 224 bp, Homo sapiens
gccagcgcacccagtcgctgaacgaggcgttcgccgcgctgcggaagatcatccccacgctgccctcggacaagctgagcaagattcagaccctcaagctggcggccaggtacatcgacttcctctaccaggtcctccagagcgacgagctggactccaagatggcaagctgcagctatgtggctcacgagcggctcagctacgccttctcggtctggaggatg

SEQ ID NO: 655 - DNA, 269 bp, Homo sapiens
cccgcatgaagtatgtgtacttccagaacaaccagatcacctccatccaggaaggcgtctttgacaatgccacagggctgctctggattgctctccacggcaaccagatcaccagtgataaggtgggcaggaaggtcttctccaagctgaggcacctggagaggctgtacctggaccacaacaacctgacccggatgcccggtcccctgcctcgatccctgagagagctccatctcgaccacaaccagatctcacgggtccccaacaat

SEQ ID NO: 656 - DNA, 329 bp, Homo sapiens
ctttattagttgggcattctttatgaccttttctataaaacagtaaggacattaaaatgtaagatgcatgacaaaaatataagtggagaggctcattgtagttaacctatattaagtaatgtttaaggtaggtgttcagagtaatacttttctacattatactgagagaaagaaattataaattaaagtatatcaattattttactaattttactgttacgtaataaaatgcaatatatttaaaaattgttagattatgtgtgaacttaacttatattttatttacttacttaacttttcttttgggatggagtcttgctctgtcgccc

SEQ ID NO: 657 - DNA, 259 bp, Homo sapiens
tcctctatattcgttcttggctcccttgtatatttttctcaggaggcgtcacggtggggaacataggacgacagttagctatgggtgttcctgaaaagccccatagtgattgagtcttcaaaaccaccgattctgagagcaaggaagattttggaagaaaatctgactgtggattatgacaaagattatcttttttcttaagtaatctatttagatcgggctgactgtacaaatgactcctggaaaaaactcttcacct

SEQ ID NO: 658 - DNA, 592 bp, Homo sapiens
agccgctgcctctgttctcagcgtcagtgccgccactgcccccgccagagcccaccggccagcatgtcctctgctcacttcaaccgaggccctgcctacgggctgtcagccgaggttaagaacaagctggcccagaagtatgaccaccagcgggagcaggagctgagagagtggatcgagggggtgacaggccgtcgcatcggcaacaacttcatggacggcctcaaagatggcatcattctttgcgaattcatcaataagctgcagccaggctccgtgaagaagatcaatgagtcaacccaaaattggcaccagctggagaacatcggcaacttcatcaaggccatcaccaagtatggggtgaagccccacgacatttttgaggccaacgacctgtttgagaacaccaaccatacacaggtgcagtccaccctcctggctttggccagcatggcgaagacgaaaggaaacaaggtgaacgtgggagtgaagtacgcaaagaagcaggagcggaaattcgagccggggaagctaagagaagggcggaacatcattgggctgcagatgggcaccaacaagtttgccagccagc

SEQ ID NO: 659 - DNA, 463 bp, Homo sapiens
cgcctggcagtccgcctcggggcccaggccctcctgggggctgccaagatgctgctgcactcagaacagcacccaggccagctcaaggacaacgtcagctctcctggtggggccaccatccatgccttgcatgtgctggagagtgggggcttccgctccctgctcatcaacgctgtggaggcctcctgcatccgcacacgggagctgcagtccatggctgaccaggagcaggtgtcaccagccgccatcaagaagaccatcctggacaaggtgaagctggactcccctgcagggaccgctctgtcgccttctggccacaccaagctgctcccccgcagcctggccccagcgggcaaggattgacacgtcctgcctgaccaccatcctgccaccaccttctcttctcttgtcactagggggactagggggtccccaaagtggcccactttctgtggctctgatc

SEQ ID NO: 660 - DNA, 255 bp, Homo sapiens
ggacgacctcatctttaccagcaagaagtcactctttgggaagatcaaatcatttacctccaagaggactcctgatggatttgactcagtgccgctgaagacatcctcaggaggcccagacatggacctgtgagaggcactgcctgcctcacctgcctcctcaccttgcatagcacctttgcaagcctgcggcgatttgggtgccagcatcctgcaacacccactgctggaaatctcttcattgtggccttatca

SEQ ID NO: 661 - DNA, 513 bp, Homo sapiens
gccctgtgtgctgtatatgagcactgggttcccagagaaaagatcctcaccactaatacttggtcttcagagctttccaaactggcagcaaatgcttttcttgcccagagaataagcagcattaactccataagtgctctgtgtgaagcaacaggagctgatgtagaagaggtagcaacagcgattggaatggaccagagaattggaaacaagtttctaaaagccagtgttgggtttggtgggagctgtttccaaaaggatgttctgaatttggtttatctctgtgaggctctgaatttgccagaagtagctcgttattggcagcaggtcatagacatgaatgactaccagaggaggaggtttgcttcccggatcatagatagtctgtttaatacagtaactgataagaagatagctattttgggatttgcattcaaaaaggacactggtgatacaagagaatcttctagtatatatattagcaaatatttgatggatgaaggtgcacatcta

SEQ ID NO: 662 - DNA, 399 bp, Homo sapiens
ggtgcgccagagcccgggaaaggcctggagtggatggggatcatctatcctggtgactctgatatcaaatacagcccgtccttccaaggccaggtcaccatctcagccgacaagtccatcagcaccgcctacctgcagtggagcagcctgaaggcctcggacaccgccatgtattactgtgcgagacagtctgtcagctcctggtaccttgactactggggccagggaagcctggtcaccgtctcctcagcatccccgaccagccccaaggtcttcccgctgagcctctgcagcacccagccagatgggaacgtggtcatcgcctgcctggtccagggcttcttcccccaggagccactcagtgtgacctggagcgaaagcggacagggcgtgaccgcc

SEQ ID NO: 663 - DNA, 479 bp, Homo sapiens
  misc_feature 290, 293: n = A,T,C or G
agcacagtaaatgttagcatatttatttaaatagtcctgcagcagagaccctgcgattgtaaagtgatttaagtatttctgggtagtgtttgtgatttacggatttgttactgaaaaacaaaaaaaatcactactgtgaatttactactatgtaaccttgtggtcgtatttcattataaataaaataagaattgctcttctgccaaaaaaaaaaaccccaaaaaaaaaaaaaaaaaaaaaaaaaataaaggggggggggcccccaatttttatattttttcaaccaccanaancttcccacccagccaggatgcctccggggacctgtacaccacgagcagccagctgaccctgccggccacacagtgcctagccggcaagtccgtgacatgccacgtgaagcactacacgaatcccagccaggatgtgactgtgccctgcccagttccctcaactccacctaccccatctccctcaac

SEQ ID NO: 664 - DNA, 250 bp, Homo sapiens
  misc_feature 117: n = A,T,C or G
gccgctgcgatgaccaaaataaaggcagatcccgacgggcccgaggctcaggcggaggcgtgttccggggagcgcacctaccaggagctgctggtcaaccagaaccccatcgcgcanccctggcttctcgccgcctcacgcggaagctctacaaatgcatcaagaaagcggtgaagcagaagcagattcggcgcggggtgaaagaggttcagaaatttgtcaacaaaggagaaaaagggatcatggtttt

SEQ ID NO: 665 - DNA, 538 bp, Homo sapiens
tcggctcgaggcaggagctgttataatgatttaccatccaacgtttatgtctgctctggcccagattgtggtttaggaaatgataatgcagtcaaacaggctgaaacacttttccaggaaatctgccccaatgaagatttctgtccccctccaccaaatcctgaagacattatccttgatggagacagtttacagccagaggcttcagaatccagtgccataccagaggctaactcggagactttcaaggaaagcacaaaccttggaaacctagaggagtcctctgaataatggatatacaccaaactggatacccaactttggaaattctgactggtctcagagtctacttgatagaaggactgtttgagaaatgttagaaagcagcagcaattataaggcaaaataggtaatagaaatccaaaaggggattttccttatagaggacattccaagaacacacaacacttataaagcacattgacttgctcattttaaataccaaacttgtgtgactagcagatgaaaattataaatc

SEQ ID NO: 666 - DNA, 582 bp, Homo sapiens
tatatgtgttacatccttatttgaaaaggaatccttgactttgttaggagctctatatatctcctctcatagaaatgccatatattatcaggagactgttaatatctcatgtggaggacccatttgtgcaagcatatctttaaaattaaatattgtcaactattgaacatattcatatttttaaataaaggctacagtaaaccatttgcaaaaaaaaaaaaaaaaacctactagaatgaactttagcaaatgaaaggtgtggtgcttaaagatcattctcagggaactttacaaaaagtccaaaaccaacttatgactggagactgacttaggaaaaaaaattagaggatgaagccaaaactaacacattctaaagaactgcaaggaaagcaactatgtaattctgttgaaaaaggaaagctcaggaaatactctttttatttcttttgattctagctgtctgcgagcctggctgtggtgcacatggaacctgccatgaacccaacaaatgccaatgtcaagaaggttggcatggaagacactgcaataaaaggtacgaagccagcctcatacatgccctga

SEQ ID NO: 667 - DNA, 450 bp, Homo sapiens
  misc_feature 379: n = A,T,C or G
ccacattcattgcatccataaggccgttctccagtatgaattttctggtgaccaacaaggtgagcctgtgtaaggaaggccttcccacattcactacacacataaggccttggcctggtgtgaatcctctggtgctgaagtaggtgagactttctaagaaaagctttcccacattcactgcactcataaggcctttctccagtgtgaattttctggtgttgaacaacattgtatttgaggctgaaggcttttccacattcactacacttataaggcctttctccagtatgatttcgctgatgtttaataaggtcggagttgtacctaaacaatttgccacattcactgcactcataaggcctttcctctgtgtggattntctggtgctcaaacagtgtatgttggtggcaaaagtctttcccacattgggtgcagctgtaattattctgt

SEQ ID NO: 668 - DNA, 212 bp, Homo sapiens
tctgcggggaacagaacatgatcggcatgacgcccacggtcatcgctgagcattacctggctgaaacggagcagcgggagaagttcgggctaaagaagcgggagggggcctgggagctcatgaagaaggggtacacccagcaactggccttcatacaacccagctctgcctttgcggccttcgtgaaacgggcacccagcacctggctgacc

SEQ ID NO: 669 - DNA, 480 bp, Homo sapiens
ccttccccaagactgctcccaagcaatgctgaatggagacacgacctctggcctctacaccatttatctgaatggtgataaggctcaggcgctggaagtcttctgtgacatgacctctgatgggggtggatggattgtgttcctgagacgcaaaaacggacgcgagaacttctaccaaaactggaaggcatatgctgctggatttggggaccgcagagaagaattctggcttgggctggacaacctgaacaaaatcacagcccaggggcagtacgagctccgggtggacctgcgggaccatggggagacagcctttgctgtctatgacaagttcagcgtgggagatgccaagactcgctacaagctgaaggtggaggggtacagtgggacagcaggtgactccatggcctaccacaatggcagatccttctccacctttgacaaggacacagattcagccatcaccaactgtgctctgtc

SEQ ID NO: 670 - DNA, 586 bp, Homo sapiens
cccagctgtgacagtggccatttctgcagcctccaggcctcacctttatggaacaccttcccgctgctggctccaaccagaaaagggatttatatggggcttccttggacctgtctgcgccatcttctctgtgaatttagttctctttctggtgactctctggattttgaaaaacagactctcctccctcaatagtgaagtgtccaccctccggaacacaaggatgctggcatttaaagcgacagctcagctgttcatcctgggctgcacgtggtgtctgggcatcttgcaggtgggtccggctgcccgggtcatggcctacctcttcaccatcatcaacagcctgcagggtgtcttcatcttcctggtgtactgcctcctcagccagcaggtccgggagcaatatgggaaatggtccaaagggatcaggaaattgaaaactgagtctgagatgcacacactctccagcagtgctaaggctgacacctccaaacccagcatggtaagatcacgcattgctccagagcacttcactaaccgacccacctgaggagcatgtgcctatcacacaaggaaacctgggaat

SEQ ID NO: 671 - DNA, 567 bp, Homo sapiens
ttttaacaattgtataagtgcccaagtaattcactacagcctaaagccttgcctttgtaatttgacttctgacatgttggcaatcaaagcatgcacttgtaacaatgaaaaagaaaaagcattttatattactactcaataaaatgtgcatgaacttacagaattctcatccttccactgagtccgctgaagggatttatgtgcacaaccaccatgtgtcttctaggtgctggcccaccaccacacatcacaggctgatttccacaggcttcttcctaggggcctcgtgatctgaggggtggtgcctacttccactgtaagaaagaatcttggtggatttgtgtctcaaatcagataagagaagcctgtttaaagagcagatgccatcttctggcttcctcaaggagccagttaaaaaaccagagcattcctttttattgaaaaataaaattaatttgttatcaggttgtttcagttgtattggatgccctatctatctgctaaagcaaaaagtactaggctactaagtgcattttcatcacagaaaagagttgcatttgtattaac

SEQ ID NO: 672 - DNA, 502 bp, Homo sapiens
taagctcgggaattcggctcgaggggagacaaattcccggtaattaccaagtctgcactcgggtaccaaagctctgaagctctctgaacagttgccatacttgagttgatgaatgtgttattcatggtgtctcatctcatcaatgcatcttgagagacttaatgaaattttagcaacagtatagaatagctctatcgggtggggagtaatcattaaacagatgaaatcggccccagatttacatgtctctttagaatccacagtgtaagcaaactacagttacaaagggatgggggttgtaaaccctctgagactctgcacttttcgcacgtatggcatcgtcaagtgctgtcttattacagcctttgtaaggagaggcaggctcctcctggggtgggctctgcagctgctctatttccaggcatgtgatcgcccccgctctccagattccccagcactctgctgcgtgtaactccactcaattctccactcatccttcctt

SEQ ID NO: 673 - DNA, 102 bp, Homo sapiens
cggctcgagagttcttgaccccaaagaaacttcagtgtgtggacctccatgttatttccaatgacgtgtgtgcgcaagttcaccctcagaaggtgaccaagt

SEQ ID NO: 674 - DNA, 509 bp, Homo sapiens
tgacctcggctcactgcaacctccacctcctgggttcaagcgattctcctgcctcagcatcctgagtacaggcactacaggcacgtgagcaagagaagctgacagattcaaatgttcacaaacatttatgttctattttgatagatacataaactatgtttctcattcttatatactttatattagggcatgggattaaagtcaaaatagtggaaaattagtagaaataacatattttatatccaatttagtctccaaaatcccaacatgcactcttctgtatacgtttttcagtatgcttgactggaacggccaattctacagtagtcttggaagcaacatactgcagattaaataccttagtagcctatgttcttgaatgcggacataaaggagcaatgcttttcctatcttaaaaaaacagtttatatgaatgaaacttctgttctgtttaagaattatatgttgttgagtgtagttgtcaaagcaactagcacgattccaagtat

SEQ ID NO: 675 - DNA, 114 bp, Homo sapiens
  misc_feature 70: n = A,T,C or G
catcctcggacgccagcaaggtgacctctaagggggcagggctctcaaaggcctttgtgggccagaaggnaaggttccttcctggtggactgcagcaaagctggctccaacatg

SEQ ID NO: 676 - DNA, 246 bp, Homo sapiens
  misc_feature 47, 49, 69, 138, 169: n = A,T,C or G
tgggggcccaaaggggagcgtggggaggggctgaggataccccaaantncaggctaattagaggatgtngcaggggcagtggcctggatgcacagtgcctgatgcgagtaggctccagacaggaggagtgggacaganagcagctggacttgaaggtttgatgccaaancagacattttcctcacacccacctgctgctgtatgaatagctgtgtatctgtttttccataagattttgataatata

SEQ ID NO: 677 - DNA, 453 bp, Homo sapiens
ataagcttcttggtggtgaaactacaactctcacgtgtgctccagttctaaaattaacctgtgcctggtctctgaagccctttcttgctctgtgcctttcagccacatccttaggtgctaacggccatgagctccgactctccaaagtgagctccactttgggtctgaggagcccctggcagagtccacgctgcctcaggtatcatgggcgtaatgatcacccaggctccgggagatctcatggatgattactgtatgagacagaggggacttcagtctttccagggccttggtggaatttttggctctggtgttttcgccagacaataaacttacactggaagctttgattcaccctccacagtactccagaaaggactgtcctataagttgtacactttaaaaggtcatgtagaggttgtagtagaatggcttttcaccctggtgactttg

SEQ ID NO: 678 - DNA, 498 bp, Homo sapiens
  misc_feature 359: n = A,T,C or G
ctcggaattcggctcgagtgaaatgcacccaaaacctcccagctactttgcagagagactctactatgccatgaagggagcagggacgcgtgatgggaccctgataagaaacatcgtttcaaggagcgagattgacttaaatcttatcaaatgtcacttcaagaagatgtacggcaagaccctcagcagcatgatcatggaagacaccagcggcgactacaagaacgccctgctgagcctggtgggcagcgacccctgaggcacagaagaacaagagcaaagaccatgaagccagagtctccaggactcctcactcaacctcggccatggacgcaggttgggtgtgaggggggtcccancctttcggtcttctatttccctatttccagtgctttccagccgggtttctgacccagagggtggaaccggcctggactcctcttcccaacttcctccaggtcatttcccagtgtgagcacaatgccaaccttagtgttt

SEQ ID NO: 679 - DNA, 118 bp, Homo sapiens
  misc_feature 33, 42, 90, 92: n = A,T,C or G
cgtggctgtctcctctctccgccatggcgtgtnctcgcccantgatatcggtgtactccgaaaagggggagtcatctgggcaaaaatgtnantttgcctgctgtattcaaggctccta

SEQ ID NO: 680 - DNA, 485 bp, Homo sapiens
gctgccaggctttgtgaattacaggacatttgagacaatcgtgaaacagcaaatcaaggcactggaagagccggctgtggatatgctacacaccgtgacggatatggtccggcttgctttcacagatgtttcgataaaaaattttgaagagttttttaacctccacagaaccgccaagtccaaaattgaagacattagagcagaacaagagagagaaggtgagaagctgatccgcctccacttccagatggaacagattgtctactgccaggaccaggtatacaggggtgcattgcagaaggtcagagagaaggagctggaagaagaaaagaagaagaaatcctgggattttggggctttccagtccagctcggcaacagactcttccatggaggagatctttcagcacctgatggcctatcaccaggaggccagcaagcgcatctccagccacatccctttgatcatccagttcttcatgctcc

SEQ ID NO: 681 - DNA, 190 bp, Homo sapiens
aactgctctgaaggctacattcagaactacagatgcagaggtgatgacagcaaagtccaggaagccaggaagtccttcttctctggccatgcctccttctccatgtacactatgctgtatttggtgctatacctgcaggcccgcttcacttggcgaggagcccgcctgctccggcccctcctgcagttca

SEQ ID NO: 682 - DNA, 248 bp, Homo sapiens
caagaaatgtggggtgtgtcagaagacggtttactttgccgaagaggttcagtgcgaaggcaacagcttccataaatcctgcttcctgtgcatggtctgcaagaagaatctggacagtaccactgtggccgtgcatggtgaggagatttactgcaagtcctgctacggcaagaagtatgggcccaaaggctatggctacgggcagggcgcaagcaccctcagcactgacaagggggagtcgctgggta

SEQ ID NO: 683 - DNA, 263 bp, Homo sapiens
gctgcctgtgctgctccgtggagtgaaaaaggcagggtgtgctcgcagactgtgctataaactgcaatttctatttggggtcctcacggagaagaacaccaggaaagacagacaggaccagtgccatgggccagctttgctgctttcctttctcaagagatgaaggaaaaatcagtgaaaagaacggaggggagcccgatgacgctgaactagtaaggctcagtaagaggctggtggagaacgcggtgctcaaggctgtccag

SEQ ID NO: 684 - DNA, 536 bp, Homo sapiens
cttggtgaaaatagcatagaggaatggattggcacaggagttaagtggatagaagagtaccagcaagattttggagttgctaacagtgatgagaggcttgttcagaattgctgacagagcatagaatgagattggggccatgcatatgaagtcggtgaagatcaacacagccatcctcttggcaattttggtatctttgtcccctgggttgtactgcggatttcggactgtgatgtagatcttcacataacagcagcagacgatgacgaaggcaactatgttgagcgtcagaacaaaaacaatatatgccagagcaagaggggtctcggtgtccatgggcaggcagatactgactttggcatagctacttattcccaccaaaggaagcagggcgagaaggaagcagcaaacccagcccccaaccatgatggcacatgcgtgcctgaggcggatcttccggtccaggcgcatggcgaaggtgatggcataccagcgctccagggtgatgaccgtcagcgtatacaccgataactcgc

SEQ ID NO: 685 - DNA, 247 bp, Homo sapiens
cttagactagaaagtctagaagacacacacataatgaagggggaagatgatgctttgtcagacaaacatggctgcccagcctacgtgagccctgagatcctcaacaccactgggacctactccggaaaggctgcggacgtttggagcctgggggtgatgctctacacccttctggttggacgataccccttccatgactcagaccccagtgcccttttctccaaaattcggcgtggacagttctgca

SEQ ID NO: 686 - DNA, 534 bp, Homo sapiens
gggattaggctgaagtggcttagaaggcctcagccatgcttggatactcacattaggaggaccatgtggttggaaggatagactgccccctacctcccaccaccaccatgaagtttggtgacttgaggctggagctccctctgttacctttccatctagcaagttcccaaaggcaagactctctctgatggtcactttgtggtctgtgctttcagaaatacaggaatctgatatcaacatatcctagggtttctaccaatctctgttgaaagaagccagggtttgccactgtgaagcttgatttctgctggtgacttctgaccataagctagaaccatggtcgccactgttttccctctgtagtttctcaagtgaacactctcaggatacccagttccctcatagcctctgttctcagagaattggagttggcccaagaaacataaacatataaccacccatatctatcctggattctgaactcttcaatttggagtgactaacacaagttgttatctaaacctttaacctatc

SEQ ID NO: 687 - DNA, 550 bp, Homo sapiens
actgattacttgattcccttcttcactgtaatatacaaagtgtgtattgtattcagagcaccatggtgttctggttattggttaactctctgtcttctctactagagtgggaactccttaatgataggaatcttattttatacatctctttatttccagagcctcaaaaactgtcaggcaatgaaatgtggatttcggtaatgtctgaaagatgtgttgaaaatgcaagtgatcacattaagcatcagttggatggtaacataagtactaccttcagagttcaaagagatcacttagattggcatggttaaagaagacagaatgaaggagttaaagaaatgagttaaagaatgaatgagggccgggcacggtggctcacgcctgtaatcccagcactttgggaggccgaggtgggtggatcacctgaggtcaggagttcgagaccagctgaccaacatggtgaaaacccgtctctattaatacagaaagttagccgggtgtggtggtacacgcctgtaatccaagctacttgaatcgcttgaacccagga

SEQ ID NO: 688 - DNA, 522 bp, Homo sapiens
  misc_feature 328: n = A,T,C or G
tgtgcacacataaaatactaagaagctaaacttaatatctgcaggtagaagttttaaattcaagattttaaccaaataacagagttaatgctaaaatctcacttttgaagtttatgttgaatattagcattctaatatttaatatttttctatttttgaaataggaaatggaaaagatgcagtaggtttttcaaaagggtatcataggtgagcacttcttatagaagaagaaaactaagaggtagtgctatttacctcttcagcactaagtttatctttatttttatttatttctataaagagatgggagtctcactgtgttgcttangctggtcttgaactcctggcctccagtgatgctcctgccttggcctccgagagtgctgggattataggcatgaggcaccacacccagccagtaatctttagcttctagaaacaatcagatttccttaagattttgcaattaggtttagaggagctcacttgctttttcaaattgggttggatatgtccaaaaaa

SEQ ID NO: 689 - DNA, 266 bp, Homo sapiens
tgccccctccacacccctggtagctctgtgtcctgagaaatccagagtgtgggagacatcactgcatctgtccccccagcttctgtgaagggaagctgtggcctcttttgaatgtggggaacaactgaagactcaggggtcacccagaggtctggtggaaagcaacttcaggtttcatcttgctctattcctcaaaggtctggtctgtgggcctctgaggagaaaacaggtctagccaagacagggacaaaatggggaagggggtg

SEQ ID NO: 690 - DNA, 235 bp, Homo sapiens
ggagaaggaggaatatttggtccctggtcagtttctgctttgcttatggtgctgctatctggagtaatagctttcatggtgaacttatcaatttattggatcattgggaacacttcacctgtcacctataacatgttcggacacttcaagttctgcattactttattcggaggatatgttttatttaaggatccactgtccattaatcaggcccttggcattttatgtacattat

SEQ ID NO: 691 - DNA, 237 bp, Homo sapiens
  misc_feature 46: n = A,T,C or G
cttttttcccccccaacaaagtttttttgttttttgtttttttttntaagtagaaattccctccagttttattagcctctttatatgtcgtcaaattgcatgaattttttctggctgttggaaacctgaatgcttttagacccaaatggaaaatttctgaaatgctggattatctatttttaaacaagcagttgacttaaaactttctgtggcaacttctggttttctgacagttcc

SEQ ID NO: 692 - DNA, 547 bp, Homo sapiens
aggcctggttggccgccagcttgaggagttcctgaaccagagctcgcccttctacttctggatgaatggtgaccgcatcgactccctgctggagaacgaccggcagcagacgcacatgctggatgtcatgcaggaccacttcagccgcgcgtccagcatcatagacgagctcttccaggacaggttcttcacccgggagccccaggatacctaccactacctgcccttcagcctgccccaccggaggcctcacttcttctttcccaagtcccgcatcgtccgcagcttgatgcccttctctccgtacgagcccctgaacttccacgccatgttccagcccttccttgagatgatacacgaggctcagcaggccatggacatccacttccacagcccggccttccagcacccgccaacagaattcatacgagaaggcgacgatgaccggactgtgtgccgggagatccgccacaactccacgggctgcctgcggatgaaggaccagtgtgacaagtgccgggagatcttgtctgtggactgttccacc

SEQ ID NO: 693 - DNA, 590 bp, Homo sapiens
ccgtatcaccctgcatgtcttctgggaactgaactttgactttctccccaactactgctacaatgggtccactaaccgttttgtgcggactgccattcctttcacccaagaaccacaacgagacaaacctgccaacgtccagccttattacctctatggatccaagcctctcaacattgcctacagccacatctacagctcctacaggaatttcgtggggccacctcatttcaagactatctgcagactcctgggttatcagggcatcgctgtggtcatggaggaactgctaaagattgtgaagagcttgctccaaggaaccattctccagtatgtgaaaacactgatagaggtgatgcccaagatatgccgcttgccccgacatgagtatggctccccagggatccctggagttcttccaccaccagctgaaggacatcattgagtacgcagagctcaaaacagacgtgttccagagcctgagggaagtgggcaatgccatcctcttctgcctcctcatagagcaagctctgtctcaggaggaggtctgcgatttgctccatgccgcacccttccaaaacatcttgcct

SEQ ID NO: 694 - DNA, 566 bp, Homo sapiens
cctaatcctccctttgggcagtataggtgtttgcttttttgttttctttttttaagaaaaaccttgaaacctttgacactgacagatgtgtttgcaaggatacggcttcagtattactaatttccatgtgtatctggaagtatttttaaatggcataccaaaatccagaagtttaaagatgcctataaaagtaaacaacatttatttaaaaagaactctgaatatgccttcttttttaattagaaatatcttcgagacttgggtgtttgttaataactaataactggagtaagctacaggatctaaagcagccctttttacagtctagttaggagagagaaaataattgcaaatatccacttagaggcaaagaacaattttttattatcaaaaaggtttctgcacattgttgtggcaatattgtatctgtttagaaaatgggcttttccaaaagcaaacaaagataggttcctcaggtgaccaaaactgaaaatcaatatttccatgtttcattaatcaaggcataaaatacaattaaagcaaaatattttacattaaaaaaaaaa

SEQ ID NO: 695 - DNA, 222 bp, Homo sapiens
  misc_feature 110, 113: n = A,T,C or G
gtgaatatagccaagtattccatttattaacaaaataagtcttaccaagggagagctctgttcgtcccaaacaggccccgcagcccccgcgctgccgcatcagaccaganggngggaggagtggggagaagaccccagtcgctggggggtccactctgggggctctgccgggccaggcctaggagagggcgggggctgctgtgatccgagagctccctgacg

SEQ ID NO: 696 - DNA, 266 bp, Homo sapiens
  misc_feature 161, 163, 168, 179, 182, 191, 199, 203, 207, 208, 211, 218,219, 224, 226, 227, 234, 236, 245, 246, 248, 252: n = A,T,C or G
ctagaaggttaggtttatgtatcttgcaggagtcatttgtcactttctaggatgttattccttctggctttgttttagtttctttttaaatgagtaactggccacaatccatgtatacacacattcacaatgacttttctcaacttggtcaattaaaattncncctcnaaaaaaaaganaanaaaaatttncccctaangccnaccnnctngccgggnnggggngnnccacgcngnaattcccanncntttngggaggcgaggggg

SEQ ID NO: 697 - DNA, 248 bp, Homo sapiens
aagaaacagtactgttcacacctttcttcactgagattccagtgtacatgagaacatatatttattgcatgattttctagatacacagtctatgcattattcatatacatttattttagcctaaagtggttttcaaatccagttcttcaagccataaatgaccaagatccaagcaatctgaatttgtttttgtgattatttgactggaatgcttcttaagtggaataactatactccgttatccaccc

SEQ ID NO: 698 - DNA, 257 bp, Homo sapiens
  misc_feature 112: n = A,T,C or G
cggctcgaggggagatgcagcatcccagtttttggtcttctgtcaaaaacacagggatgaggtggtagctgagcacccagatgcttcaggtgaggagattgaagagctgctnaggtcacagtggagtctgctgagtgagaagcagagagcacgctacaacaccaagtttgccctggtggcccctgtccaggctgaagaagactctggtaatgtaaatgggaaaaaaagaaaccacacaaagaggatacaggacccta

SEQ ID NO: 699 - DNA, 263 bp, Homo sapiens
ggcggttggagcagcagtttgcatcgggtgaaaagaaagcaagggcattcctggcagagggaacagcctgagcaaagccatgcagagaatgaagacctacagaagaaaatgctaatttgaaaaaagatgcataaagcagtctatgttttagtctagtctttttaaacttacagaaatttattactatgtgtgtccatctaacttggcttattttctttatttggggatcaagggaatgccagaattatgatattagttttatt

SEQ ID NO: 700 - DNA, 188 bp, Homo sapiens
  misc_feature 38, 170: n = A,T,C or G
cttcctgtgtaacatctgccatttatttcctcagctgnacaaatctctgttttctctctgttacacactaacatcaatggctttgtacttgtgatgagagataaccttgcctagttgtgggcaacacatgcagaataatcctgttttacagctgcctttcgtgatcttantgcttgcttttttcaaga

SEQ ID NO: 701 - DNA, 215 bp, Homo sapiens
  misc_feature 105, 168: n = A,T,C or G
ggtttctgtgtggagacagtagaatataaaaataacaccttcgctgtctgggatgttggcagccacttcaaaatcagacctctgtggcagcattttttccagaanacaaaagagctatcagcttcccagtttgcacaattcatcaagaaattatgcggggtcactggnacaaatgatgaggctctcctggaagcttaacttcttatccatcccat

SEQ ID NO: 702 - DNA, 278 bp, Homo sapiens
cgcctgccaccggtgcacccagtccgctcacccagcccagtccgtccggtcctcaccgcctgccggccggcccaccccccaccgcagccatggacgccatcaagaagaagatgcagatgctgaagctggacaaggagaacgccatcgaccgcgccgagcaggccgaagccgacaagaagcaagctgaggaccgctgcaagcagctggaggaggagcagcaggccctccagaagaagctgaaggggacagaggatgaggtggaaaagtattctgaatcc

SEQ ID NO: 703 - DNA, 588 bp, Homo sapiens
tcctgcatactcaccaccaagctcaagaaataaatcatcaccaatacctttgaggtccctgagtaatccaccccagctaaaggcaaacccttcaatcaagtttatacagcaaaccctccattgtccatggtcaacagggaaggggttggggacaggtctgccaatctatctaaaagccacaatatggaagaagtattcaatttatataataaatggctaacttaacggttgaatcactttcatacatggatgaaacgggtttaacacaggatccacatgaatcttctgtgggccaagagatgttccttaatccttgtagaacctgttttctatattgaactagctttggtacagtagagttaacttactttccatttatccactgccaatataaagaggaaacaggggttagggaaaaatgacttcattccagaggcttctcagagttcaacatatgctataatttagaattttcttatgaatccactctacttgggtagaaaatattttatctctagtgattgcatattatttccatatcatagtatttcatagtattatatttgatatgagtgtctatatcaatgt

SEQ ID NO: 704 - DNA, 211 bp, Homo sapiens
  misc_feature 62, 199: n = A,T,C or G
agcaaatctggctatcttctccatccagtggacctaagcgttatgactggactgggaaaaantgggtgtactcccacgacggcgtgtccctccatgagctgctggccgcagagctcactaaagccttaaaaaccaaactggacttgtcttccttggcctattccggaaaagatgcttgatgcccagcccggtttaaagncattaaaagtat

SEQ ID NO: 705 - DNA, 463 bp, Homo sapiens
ctcgcccgacagcatagtacttgccgcccagccacgcccgcgcgccagccaccatgctaggtaacaagcgactggggctgtccggactgaccctcgccctgtccctgctcgtgtgcctgggtgcgctggccgaggcgtacccctccaagccggacaacccgggcgaggacgcaccagcggaggacatggccagatactactcggcgctgcgacactacatcaacctcatcaccaggcagagatatggaaaacgatccagcccagagacactgatttcagacctcttgatgagagaaagcacagaaaatgttcccagaactcggcttgaagaccctgcaatgtggtgatgggaaatgagacttgctctctggccttttcctattttcagcccatatttcatcgtgtaaaacgagaatccacccatcctaccaatgcatgcagccactgtgctgaattctgcaat

SEQ ID NO: 706 - DNA, 652 bp, Homo sapiens
ttgcagcctgcccagcagcagcagcaacagcagcagcagcattccctactgtctgcaccaggccctgcccaggccatgtctttgccacatgagggctcttctcccagtttggctgggtcccaacagcagctttccctgggtcttgcaggtgcccgacagccaggtttgccccagccactgatgcccacccagccaccagctcatgccctccagcaacgcctggctccatccatggctatggtgtccaatcaagggcatatgctaagtgggcagcatggagggcaggcaggcttggtaccccagcagagctcacagccagtgctatcacagaagcccatgggcaccatgccaccttccatgtgcatgaagccgcagcaattggcaatgcagcagcagctggcaaacagcttcttcccagatacagacctggacaaatttgctgcagaagatatcattgatcccattgcaaaggccaagatggtggctttgaaaggcatcaagaaagtgatggctcagggcagcattggggtggcacctggtatgaacagacagcaagtgtctctgctagcccagaggctctcggggggacctagcagtgatctgcaaaaccatgtggcagctgggagtggccaggagcggagtgctggtgatc

SEQ ID NO: 707 - DNA, 321 bp, Homo sapiens
ggtgaggggaacctcactttgaacgactgtggggacatgttttccgcgctctgcgagtcggctccccgagagctcaaggcaaactatgccttcaagatctatgacttcaacactgacaacttcatctgcaaggaggaacctggagctgacgctggcccggctcactaagtcagagctggatgaggaggaggtggtgcttgtgtgcgacaaggtcattgaggaggctgacttggacggtgacggcaagctgggctttgctgacttcgaggacatgattgccaaggcccctgacttcctcagcactttccacatccggatctg

SEQ ID NO: 708 - DNA, 464 bp, Homo sapiens
agttatgcggtcaacagcatcaaacaatttgtgttccttgtgctggtgcacttggacttggagctgatcaacgcagatgtggagatccctgagtttgacctcagcaggtacggcttcggtctgatgcagccggaacacgacgtgcccgtccgctaccgcatccgcccatgacacagggagcagatggatccacgtgctcgcctctgcccagcctgccccagcctgccccagcctcccagctttctgtgtgcacagttggcccgggtgcaggtgctagcattaccacttccctgcttttctcccagaaggctgggtccaggggagggaaaagctaagagggtgaacaaagaaaagacattgaaagctctatggattatccactgcaaagttttctttccaaaatcaggctttgtctgctcccaattcacctcgttactctcacctcgtgatatccacaaatgcta

SEQ ID NO: 709 - DNA, 446 bp, Homo sapiens
cagcagcaacctcagcagccagcaccctcgacgctctcccagcaggctgcgtatcctcagccccagtctcagcagtcccagcaaactgcctattcccagcagcgcttccctccaccgcaggagctatctcaagattcatttgggtctcaggcatcctcagccccctcaatgacctccagtaagggagggcaagaagatatgaacctgagccttcagtcaagaccctccagcttgcctccatccagtccaatggatcagatgggcaagatgagacctcagccatatggcgggactaacccatactcgcagcaacagggacctccgtcaggaccgcagcaaggacatgggtacccagggcagccatacgggtcccagaccccgcagcggtacccgatgaccatgcagggccgggcgcagagtgccaagggcggccgccgactagtgag

SEQ ID NO: 710 - DNA, 311 bp, Homo sapiens
aaaaagctataaaactgcaactatgctgttgaattagggaagcatcctgctaaattctccctggttggcattggagggcaagacctgaatgatgggaaccaaaccctgactttagctttagtctggcagctgatgagaagatataccctcaatgtcctggaagatcttggagatggtcagaaagccaatgacgacatcattgtgaactgggtgaacagaacgttgagtgaagctggaaaatcaacttccattcagagttttaaggacaagacgatcagctccagtttggcagctgtggatttaattgatgc

SEQ ID NO: 711 - DNA, 511 bp, Homo sapiens
cgcagtgtcgctcactaccgccgctgttgccttcggtgatgaggcaaagaaatggcggaaggaaaagcgagccgcgagagtgaagaggagtctgttagcctgacagtcgaggaaagggaggcgcttggtggcatggacagccgtctcttcgggttcgtgaggcttcatgaagatggcgccagaacgaagaccctactaggcaaggctgttcgctgctacgaatctttaatcttaaaagctgaaggaaaagtggagtctgacttcttttgccaattaggtcacttcaacctcttgttggaagattattcaaaagcattatctgcatatcagagatattacagtttacaggctgactactggaagaatgctgcgtttttatatggccttggtttggtctacttctactacaatgcatttcattgggcaattaaagcatttcaagatgtcctttatgttgaccccagcttttgtcgagccaaggaaattcatttacgacttgggctcatgttca

SEQ ID NO: 712 - DNA, 581 bp, Homo sapiens
acacaccttactcaacatcaaaaaattcatacctggagaaaaaacctataaatgtaatgaatgtggaaaggccttcaacgggccctcaacttttatccgtcatcatatgattcatactggtgaaaaaccgtacgaatgcaatgaatgtgggaaagccttcagccagcactcaaacctcactcagcatcaaaaaactcatactggggagaaaccctatgattgtgcagaatgtggaaaatcttttagttactggtcatcccttgctcaacacctgaaaattcatactggagaaaaaccttacaaatgcaatgaatgtggaaaggccttcagttactgctcatcccttactcaacatcggagaattcacacgagagaaaagccctttgaatgcagtgaatgtggaaaggctttcagttatctctcaaaccttaatcagcatcagaaaactcatactcaagagaaagcttatgaatgtaaagaatgtgggaaagcttttattcggagttcatctcttgctaagcatgaaagaattcatactggagagaaaccctatcagtgtcatgaatgtgggaaaaccttca

SEQ ID NO: 713 - DNA, 530 bp, Homo sapiens
tcggctcgagcaagtcttcactgccttcctgcgagccctgaggaagccttctttccccagacatggccaacaagggtccttcctatggcatgagccgcgaagtgcagtccaaaatcgagaagaagtatgacgaggagctggaggagcggctggtggagtggatcatagtgcagtgtggccctgatgtgggccgcccagaccgtgggcgcttgggcttccaggtctggctgaagaatggcgtgattctgagcaagcgggtgaacagcctgtaccctgatggctccaagccggtgaaggtgcccgagaacccaccctccatggtcttcaagcagatggagcaggtggctcagttcctgaaggcggctgaggactatggggtcatcaagactgacatgttccagactgttgacctctttgaaggcagagacatggcagcagtgcagaggaccctgatggctttgggcagcttggcagtgaccaagaatgatgggcactaccgtggagatcccaactggtttatgaagaaagcg

SEQ ID NO: 714 - DNA, 509 bp, Homo sapiens
gaatgaagaatgcaaaatggtttatcgttcaaactgtccactctgatccaaccctgtactgatagtacttcccagtatgatattgtgatgtttcatacaatgcagtgaacataaccaacttgttacctaaataaagaattgataaaaacagtgtgacatattactatttggtatgattcagtttttaatgttattttaaacttcttatatggttggcatatttctgaaaatttaattccaaagaggaattaaccaaactgtacaggacaatattaaccccttctgtactctagaaatatttatactccttttaaaaaaacctgcctttggccgggtgcattggctcacacctgtaatcccagcactttgggaggccaaggcgggtggatcacgaggtcaagagatcgtgaccatcctggccaacacggtgaaaccctgcctctactaaaaatacaaagattagctgggcatggtggtgcttgcctgtaatcccagctgcttgggaggct

SEQ ID NO: 715 - DNA, 87 bp, Homo sapiens
  misc_feature 18, 42, 47: n = A,T,C or G
cccaagatgccgaaaggnaagaaggccaagggaaagaaggtngctcnggccccagctgtcgtgaagaagcaggaggctaagaaagtg

SEQ ID NO: 716 - DNA, 137 bp, Homo sapiens
  misc_feature 20, 49, 53, 86, 90, 103, 106: n = A,T,C or G
ggcggaggtgcaggtctggngttgatggtcgaggccatctcctgggcgnctgncggcatcgtggtaaacaggtatgctgggcgganggtngtggtcgtacctntgnaggcatcaacatttctggcaatttctacaga

SEQ ID NO: 717 - DNA, 269 bp, Homo sapiens
  misc_feature 123: n = A,T,C or G
ggtcagggaccttctcaggtacttctactcccgaaggattgacatcaccctgtcgtcagtcaagtgcttccacaagctggcctctgcctatggggccaggcagctgcagggctactgcgcaanctctttgccatcctcctcccccaggacccctcgttccagatgcccctggacctgtatgcctatgcagtggccacaggggacgccctgctggagaagctctgcctacagttcctggcctggaattcgaggccttgacgcaggccgag

SEQ ID NO: 718 - DNA, 98 bp, Homo sapiens
  misc_feature 12, 39, 65, 76: n = A,T,C or G
ggaggacttggngccccctccacccatcattgacaagancttcatggacacgctgcccttctganccctgcctggnaacacgtgtgcacatgcgcact

SEQ ID NO: 719 - DNA, 654 bp, Homo sapiens
  misc_feature 484, 570: n = A,T,C or G
cccacacatgggaaccacacatttaaaatggcactgaaccaattttcagacatgagctttgctgaaataaaacacaagtatctctggtcagagcctcagaattgctcagccaccaaaagtaactaccttcgaggtactggtccctacccaccttccgtggactggcggaaaaaaggaaattttgtctcacctgtgaaaaatcagggtgcctgcggcagttgctggactttctccaccactggggccctggagtctgcgatcgccatcgcaaccggaaagatgctgtccttggcggaacagcagctggtggactgcgcccaggacttcaataatcacggctgccaagggggtctccccagccaggctttcgagtatatcctgtacaacaaggggatcatgggtgaagacacctacccctaccagggcaaggatggttattgcaagttccaacctggaaaggccatcggctttgtcaaggatgtanccaacatcacaatctatgacgaggaagcgatggtggaggctgtggccctctacaaccctgtgagctttgcctttgaggtgactcangacttcatgatgtatagaacgggcatctactccagtacttcctgccataaaactccagataaagtaaaccatgcagtactggct

SEQ ID NO: 720 - DNA, 310 bp, Homo sapiens
ttctgacagctggtgcgcctgcccgggaacatcctcctggactcaatcatggcttgtggtctggtcgccagcaacctgaatctcaaacctggagagtgccttcgagtgcgaggcgaggtggctcctgacgctaagagcttcgtgctgaacctgggcaaagacagcaacaacctgtgcctgcattcaaccctcgcttcaacgcccacggcgacgccaacaccatcgtgtgcaacagcaaggacggcggggctgggggaccgagcagcgggaggctgtctttcccttccagcctggaagtgttgcagaggtg

SEQ ID NO: 721 - DNA, 271 bp, Homo sapiens
tccaccagtgcttcctggcacaggtcggccgggctgcttcacttcttgtttccagagattcacggcaccagtccccctctggtacccagcctgacagggccatgttggtgggaccaaagctgtactgttgtttatgacgtgtttcatgtcagtatttcaggcccacccactgggctccccctcccagattgccaaagttgtggagtctgtttttcttagttgaatgtcttagttctctgggataggtgaacagatctcaagagcaaggaac

SEQ ID NO: 722 - DNA, 569 bp, Homo sapiens
attccaaactttggtttaagtaaacatatgttcaaaatcagattaacagatacaggtttcatagagaacaaaggtgatcatttgaagggcatgctgtaatttcacacaattttccagttcaaaaatggagaatacttcgcctaaaatactgttaagtgggttaattgatacaagtttctgtggtggaaaatttatgcaggttttcacgaatcctttttttttttttttttttttttaaaaaaaaaaattttttttttttcccccccgggaaaaaaaaaaagtttttttttttttttgaaacccccccccccccaaaaaaaaaaattttccccccccccccccccttaaaggggggaaaaggggggccccccccccccccccattttttttttttttttaaaaaaaaaaaggggttcccccggggggggaaggggggggtttttttttgccccggggaaccccccccccccccccccaaaaggggggggttaaaagggggccccccccccccccggggggttttttaaaatttttaaaaaaccttttaaccttttttttttggggggggg

SEQ ID NO: 723 - DNA, 207 bp, Homo sapiens
  misc_feature 181: n = A,T,C or G
ggcgcacgctccaaggcctggagattgagctgcagtcccagctgagcatgaaagcggggctggagaacacggtggcagagacggagtgccgctatgccctgcagctgcagcagatccagggactcatcagcagcatcgaggcccagctgagcgagctccgcagtgagatggagtgccaganccaagagtacaagatgctgctggaca

SEQ ID NO: 724 - DNA, 560 bp, Homo sapiens
gaatttccatgtgtggacggatgcctggatgaagcgaccggatctgcccaagggctacgacggctggcaggctgtggacgcaacgccgcaggagcgaagccagggtgtcttctgctgtgggccatcaccactgaccgccatctgcaaaggtgacatctttattgtctatgacaccagattcgtcttctcagaagtgaatggtgacaggctcatctggttggtgaagatggtgaatgggcaggaggagttacacataatttcaatggagaccacaagcatcgggaaaaacatcagcaccaaggcagtgggccaagacaggcggagagatatcacctatgagtacaagtatccagaaggctcctctgaggagaggcaggtcatggatcatgccttcctccttctcagttctgagagggagcacagacgacctgtaaaagagaactttcttcacatgtcggtacaatcagatgatgtgctgctgggaaactctgttaatttcaccgtgattcttaaaaggaagaccgctgccctacaaaatgtcaacatcttgggctcctttg

SEQ ID NO: 725 - DNA, 565 bp, Homo sapiens
gaggctgtaatgaaatattaactcaaacatttgcaactgtggaagtaggcagatggaataacaacaaaaagagccccataaaagcaagtgacttgacaaagtttggtgattgtggtggtagtgatgatgaagaagagtccacagttataagtgtcagtgaagacatgaacagtgaagggaatgtagattttgaatgtgataccaaactatacacgtctgcgcccaacacatctcagggtaaagataattctgtcttactagttctcagcagtgatgaaagccaacagtctgaaaacagtgagaatgaagaggatactttatgttttgttgaaaatagtggccaaagggagtcattaagtggagacacaggaagtctgtcatgtgacaatgcattgtttgtaattgacacaactcctggaatgagtgctgataaaaatttttacttggaagaggaagacaaggcaagtgaggttgccattgaggaagaaaaagaagaggaagaggatgaaaaaagtgaagaagattcatcagaccatgacgaaaatgaagatgagtttagtgatga

SEQ ID NO: 726 - DNA, 599 bp, Homo sapiens
ggatgggcaccctgctcatcagcaagatccgggaagagtacccagcaccgcatcatgaacaccttcagcgtcatgccctcacccaaggtgtcagacacggtggtggagccctacaacgccaccctctctgtccaccagctggtggaaaacacagatgaaacctactccattgataacgaggccctgtatgacatctgcttccgcaccctgaagctgaccacccccacctacggggacctcaaccacctggtgtcggccaccatgagcggggtcaccacctgcctgcgcttcccgggccagctgaacgcagacctgcgcaagctggcggtgaacatggtgcccttccctcgcctgcacttcttcatgcccggcttcgcgcccctgaccagccggggcagccagcagtaccgggcgctcacggtgcccgagctcacccagcagatgttcgactccaagaacatgatggccgcctgcgacccgcgccacggccgctacctgacggtggctgccatcttccggggccgcatgtccatgaaggaggtggacgagcagatgctcaacgtgcagaacaagaacagcagctacttcgtggagtggat

SEQ ID NO: 727 - DNA, 555 bp, Homo sapiens
gtggaattgccattccagtggatttggacagccaagttaatactcttttcatgaagagccattcaaatatggtgcagagagcagcaatgggttggagactatcagctcgctctgggccacgctttaaggaagctcttggagggcctgcttgggattacagaaatattattgaaaagttacaggatgtagtggcctccttggagcaccagttcagcccaatgatgcaggctgaattctcagtgttggttgatgtattgtacagtccagaactgctgttccctgagggaagcgatgcaagaataagatgtggcgctttcatgtcgaagttgattaatcatacaaagaaactaatggagaaagaagaaaaactgtgcattaaaattcttcagacattacgagaaatgttagagaagaaagacagctttgtggaagagggtaacacattaagaaagatacttctgaatcgatactttaaaggtgattatagtattggtgtgaatggacacctatcaggagcctactccaaaactgcacaggtgggaggaagcttttctg

SEQ ID NO: 728 - DNA, 215 bp, Homo sapiens
cggctcgagatcctgggtgccgacctggacgtcgtcatgtccctgaacaacctggatgaggagtccaacaagaagcacccattcccgtgccctacgtcctaccgcacggccctcacctactacctggacatcaccaacccgccgcgtaccaacgtgctgtacgagctggcgcagtacgcctcggagccctcggagcaggagctgctgcgcaagat

SEQ ID NO: 729 - DNA, 287 bp, Homo sapiens
  misc_feature 212: n = A,T,C or G
tgaaatactttcctggggcacacaggcaagtttacaaaaacctacaggaaatcaatgcttacattggccacagtgtggagaagcaccgtgaaaccctggacccgagcgcccccagggacctcatcgacacctacctgctccacatggaaaaacggaaatccgacccacacagtgaattcagccaccaaaacctcatcatcaacacgctctcnctcttctttgctggcactgagaccaccagcaccactctccgctacggcttcctgctcatgctcaaataccctcat

SEQ ID NO: 730 - DNA, 544 bp, Homo sapiens
acccggctaccctggccccagcggggatgcgggcgccccaggggttcagggctaccctggtccccccggccctcgaggactggccgggaaccgaggcgtgccaggacagcccgggagacagggcgtggagggccgggatgccactgaccagcacatcgtggatgtggcgctgaagatgctgcaagagcaactggcagaggtcgccgtgagtgccaagcgggaagccctgggtgcggtgggcatgatgggtcctccaggacctcctgggccccctgggtacccaggcaagcagggcccccatgggcaccctggccctcggggcgttcctggcatcgtgggagccgtgggtcagatcggcaacacggggcccaagggaaaacgtggagagaagggtgatccaggagaagtgggacgggggcaccccgggatgcctgggcccccagggatcccaggactccctggccggcctggccaggcaatcaacggcaaggatggagatcgagggtccccaggggctccaggagaggcaggtcgacctggcctg

SEQ ID NO: 731 - DNA, 302 bp, Homo sapiens
gttttcaaagtaaataccttaatcaaatttggaaatagtatttatggattttattcaacatagattatctattttgttaaaattatagaaatgaacagttcttttcccatggatgccttttttcatcttggcctattctgatcctttaagaacaagctttgtcctttcattaatacttctcacctataattacgaattttctctaaacttgtagattttattatccatgccatctatttataatcctatgacactcctatattgtttatggtttttttgtttttttttgttttttttttaaa

SEQ ID NO: 732 - DNA, 438 bp, Homo sapiens
gcgaaaatggaaaacagaatcaggatttggaaaaaattttactacaaagcaacagttatgtttgaatgcgataagggtttttacctcgatggcagcgacacaattgtctgtgacagtaacagtacttgggatcccccagttccaaagtgtcttaaagtgtcgacttcttccactacaaaatctccagcgtccagtgcctcaggtcctaggcctacttacaagcctccagtctcaaattatccaggatatcctaaacctgaggaaggaatacttgacagtttggatgtttgggtcattgctgtgattgttattgtcatagttgttggagttgcagtaatttgtgttgtcccgtacagatatcttcaaaggaggaagaagagagggaaagcagatggtggagctgaatatgccacttaccagactaaatcaaccactcca

SEQ ID NO: 733 - DNA, 269 bp, Homo sapiens
aaccaatactgaagttcaaaagtatcgaagaagtgatacaaagagcgaatagcaccgactatggactcacagcagccgtgttcaccgaaaaatctcgacaaagccctgaagttggcttctgccttagagtctggaacggtctggatcaactgctacaacgcgctctatccacaggctccatttggtggctttaaaatgtcaggaaatggcagagaactaggtgaatacgctttggccgaatacacagaagtgaaaactgtcaccatcaa

SEQ ID NO: 734 - DNA, 93 bp, Homo sapiens
  misc_feature 11: n = A,T,C or G
atctgattaanaaaaaaaaatactgattccttgtagcaacccaaaaaatgtaaagaaagaattcgacacaatggggttgcgtcacctatagtt

SEQ ID NO: 735 - DNA, 500 bp, Homo sapiens
tgctgatgtttagaaataaatagcagtgtgactgggaaagaggaattgcagttgtgggggtgtgagcctggcagcagccagccagcagcctctcccaggcgggagtctaccatccgagacggcgatgacaaagagcttcattccacattctttgttatctctacttcccaccctcttggcaactacagagcagtgtgggcagccccaagtgtggtccccagagagcgtttggctttcctgtctgtctatcctgagcgggtggagtctcaggttgtgtgcccctaaatcaagatttgcttccacagaagccattacttgcaattttttttttttttttttaaaaaagtctcgctgggccccccagggggggggggaggggggcaatctcacgggttccttggcccccggggttaaagcaattttcccccctaaccctccggagaagcggggataacaggccccccccggtgttaatttttgttttttaagaaaaaaggggg

SEQ ID NO: 736 - DNA, 539 bp, Homo sapiens
taagctcggattcggctcgaggttgtggtgctagtttctctaagccatccagtgccatcctcgtcgctgcagcgacacacgctctcgccgccgccatgactgagcagatgacccttcgtggcaccctcaagggccacaacggctgggtaacccagatcgctactaccccgcagttcccggacatgatcctctccgcctctcgagataagaccatcatcatgtggaaactgaccagggatgagaccaactatggaattccacagcgtgctctgcggggtcactcccactttgttagtgatgtggttatctcctcagatggccagtttgccctctcaggctcctgggatggaaccctgcgcctctgggatctcacaacgggcaccaccacgaggcgatttgtgggccataccaaggatgtgctgagtgtggccttctcctctgacaaccggcagattgtctctggatctcgagataaaaccatcaagctatggaatacccctgggtgtgtgcaaatacactgtccaggatgagagccactc

SEQ ID NO: 737 - DNA, 545 bp, Homo sapiens
agctcatctgcgagtgtggcctctttgaaaggccaacgccacagggggcggtgggcacgtgcagatggtgcagagggccatgaaggacctgacctatgcctccctgtgctttcccgaggccatcaaggcccggggcatggagagcaaagaagacatcccctactacttctaccgggacgacgggctcctggtgtgggaagccatcaggacgttcacggccgaggtggtagacatctactacgagggcgaccaggtggtggaggaggacccggagctgcaggacttcgtgaacgatgtctacgtgtacggcatgcggggccgcaagtcctcaggcttccccaagtcggtcaagagccgggagcagctgtcggagtacctgaccgtggtgatcttcaccgcctccgcccagcacgccgcggtcaacttcggccagtacgactggtgctcctggatccccaatgccccccaaccatgcgagccccgccaccgactgccaagggcgtggtgaccattgagcagatcgtggacacgctgcccgaccgcgg

SEQ ID NO: 738 - DNA, 586 bp, Homo sapiens
gctgggtgtacagcgtcctcgaaaccacgagcaagtgagcagatcctccgaggcaccagggactccagcccatgccatggcggattctgagcgcctctcggctcctggctgctgggccgcctgcaccaacttctcgcgcactcgaaagggaatcctcctgtttgctgagattatattatgcctggtgatcctgatctgcttcagtgcctccacaccaggctactcctccctgtcggtgattgagatgatccttgctgctattttctttgttgtctacatgtgtgacctgcacaccaagataccattcatcaactggccctggagtgatttcttccgaaccctcatagcggcaatcctctacctgatcacctccattgttgtccttgttgagagaggaaaccactccaaaatcgtcgcaggggtactgggcctaatcgctacgtgcctctttggctatgatgcctatgtcaccttccccgttcggcagccaagacatacagcagcccccactgaccccgcagatggcccggtgtaggcgaacttccctcatttctctctgcaatctgcaaataactcctccattgaa

SEQ ID NO: 739 - DNA, 219 bp, Homo sapiens
  misc_feature 48, 200: n = A,T,C or G
gtgttctgctagtaaatagttgaaggttgatcattgatctcctgcgtnttcagtctggcatggaaaagcccccgtgcaactggtaaagatatcaataagcaccaggaggtatctaaatccaccaggagccataggcatcacattgacgtccatttaccagtcttccctggcaagattcttctgaattgtgctgccttgtnccaaaagaggtatgggagg

SEQ ID NO: 740 - DNA, 109 bp, Homo sapiens
  misc_feature 33: n = A,T,C or G
agcaattagaattttaacactggcagttatgantaatatgaaggagaggtagatttctgagtgattctggtttaaccagctgggtggatggtggttccacgtattcagg

SEQ ID NO: 741 - DNA, 197 bp, Homo sapiens
cctcataaacctagagtcagagagtgcactatttaacttaatgtacaaaggttcccaatgggaaaactgaggcaccaagggaaaaagtgaaccccaacatcactctccacctgggtgcctattcagaacaccccaatttctttagcttgaagtcaggatggctccacctggacacctataggagcagtttgccctgg

SEQ ID NO: 742 - DNA, 274 bp, Homo sapiens
  misc_feature 49, 257, 260, 261: n = A,T,C or G
ggagaccatgacaatgacaaggaaagcgatgtggagatttaagagtggnttgggatgctgtgtcccaaggaatttcttttcacctcttggttgggctggagggaaaaggagtggctcctagagtcctgggggtcaccccagggcttttgctgactctgggaaagagtctggagaccacatttggttctcgaaccatctacctgcttttcctctctctcccaaggcctgacaatggtacctattagggatgagatacngtnnaggaaagctatct

SEQ ID NO: 743 - DNA, 271 bp, Homo sapiens
cctctcaactcatcactccttttgcctagatgggatctgctgcaggcaagatattcccggcctcagaagctgaggggagaaccttctgttcttccccaccttcggcttgcattcctccttcagcatcttcttaaggacagtttctactgcacagtgatcaaagttgcagaggggtgaagtgtggatatccaggaacccccattttactgttactgtctttactgcactttccactatccagggagggtagtttatgcccttgggtgctttg

SEQ ID NO: 744 - DNA, 309 bp, Homo sapiens
  misc_feature 26: n = A,T,C or G
acacaactgtgttcactagcaacctncaaacagacaccatggtgcatctgactcctgaggagaagtctgccgttactgccctgtggggcaaggtgaacgtggatgaagttggtggtgaggccctgggcaggctgctggtggtctacccttggacccagaggttctttgagtcctttggggatctgtccactcctgatgctgttatgggcaaccctaaggtgaaggctcatggcaagaaagtgctcggtgcctttagtgatggcctggctcacctggacaacctcaagggcaactttgccacatgagtga

SEQ ID NO: 745 - DNA, 430 bp, Homo sapiens
gcactcccaggcccctgcccccaggccctccccaggcgatggacaattatgatagcttatgtagctgaatgtgatacatgccgaatgccacacgtaaacacttgactataaaaactgcccccctcctttccaaataagtgcatttattgcctctatgtgcaactgacagatgaccgcaataatgaatgagcagttagaaatacattatgcttgagatgtcttaacctattcccaaatgccttctgttttccaaaggagtggtcaagcccttgcccagagctctctattctggaagagcggtccaggtggggccggggactggccactgaattatgccagggcgcactttccactggagttcactttcaattgcttctgtgcaataaaaccaagtgcttataaaatgaaaaaaaaaaaaaaggggggcccc

SEQ ID NO: 746 - DNA, 262 bp, Homo sapiens
  misc_feature 21, 24, 27, 33, 51, 71, 80, 121, 143, 170, 182, 188, 196,208, 228, 246, 251, 252: n = A,T,C or G
cgtcctcgtggaagtgacatngtnttnaaaccntgcgtggcaatgcctgangcaccgccgtgatgccccanggaagacanggcgactggaagtccaactacttcttaagatcatccaatantggatgattatcgaaatgtttnattgtgggagcagacaatgtgggctanaagcagatgcancagatncgcatgtncttcgcgggaangctgtggtgtgatgggcaanaacaccatgatgcgcaangccanncgagggcact

SEQ ID NO: 747 - DNA, 632 bp, Homo sapiens
taagctcgggaattcggctcgagcggctcgaggcccagatgtggagtgccagatgttgcagaatactcactatttccaaatagcccaaaatggacttccaaagtggtcacctacaggatcgtatcatatactcgagacttaccgcatattacagtggatcgattagtgtcaaaggctttaaacatgtggggcaaagagatccccctgcatttcaggaaagttgtatggggaactgctgacatcatgattggctttgcgcgaggagctcatggggactcctacccatttgatgggccaggaaacacgctggctcatgcctttgcgcctgggacaggtctcggaggagatgctcacttcgatgaggatgaacgctggacggatggtagcagtctagggattaacttcctgtatgctgcaactcatgaacttggccattctttgggtatgggacattcctctgatcctaatgcagtgatgtatccaacctatggaaatggagatccccaaaattttaaactttcccaggatgatattaaaggcattcagaaactatatggaaagagaagtaattcaagaaagaaatagaaacttcaggcagaacatccattcattcattcattggattgatatca

SEQ ID NO: 748 - DNA, 299 bp, Homo sapiens
cattaacctacactcttccggacggctcttaaaacttgcaggacataatgaaattgggaagagcagagtgttgaagtctatagcatggccttctgcttgaccctgagttcctgaattgaatgtgggagaccacaggccatacttctctaggcactcacatgtctcccttggcataaggaaacatgttagtaatatagttttttagatccaaacagtttatttggatctaaaagtttaagtgttcagttgaaaaacagctattgattttattagtagcaaattatcaccattaaagccag

SEQ ID NO: 749 - DNA, 396 bp, Homo sapiens
actgtccaaaccttcttctctcctgtcaacagtggccagccccccaactatgagatgctcaaggaggagcacgaggtggctgtgctgggggcgccccacaaccctgctcccccgacgtccaccgtgatccacatccgcagcgagacctccgtgcccgaccatgtcgtctggtccctgttcaacaccctcttcatgaacccctgctgcctgggcttcatagcattcgcctactccgtgaagtctagggacaggaagatggttggcgacgtgaccggggcccaggcctatgcctccaccgccaagtgcctgaacatctgggccctgattctgggcatcctcatgaccattctgctcatcgtcatcccagtgctgatcttccaggcctatggatagatc

SEQ ID NO: 750 - DNA, 314 bp, Homo sapiens
cgcaactggggcattatactcccgaagcttaacgcctgatgatgatgtttttcaatatcttgcacatacctatgcttcaagaaatcccaacatgaagaaaggagacgagtgtaaaaacaaaatgaactttcctaatggtgttacaaatggatactcttggtatccactccaaggtggaatgcaagattacaactacatctgggcccagtgttttgaaattacgttggagctgtcatgctgtaaatatcctcgtgaggagaagcttccatccttttggaataataacaaagcctcattaattgaatatataaagc

SEQ ID NO: 751 - DNA, 245 bp, Homo sapiens
  misc_feature 163, 171: n = A,T,C or G
gggacctaccccgcgctacttcacctgggacgaggtggcccagcgctcagggtgcgaggagcggtggctagtgatcgaccgtaaggtgtacaacatcagcgagttcacccgccggcatccagggggctcccgggtcatcagccactacgccgggcaggatgcnacggatcnctttgtggccttccacatcaacaagggccttgtgaagaagtatatgaactctctcctgattggagaactgtctc

SEQ ID NO: 752 - DNA, 465 bp, Homo sapiens
cgagacaaccccagtacgtgaagatgtatgagaaccagcagctgggcaagctggagccacacgtcttcgcgctggccgacgtggcctactacaccatgctcaggaagcgcgtgaaccagtgcatcgtgatctcgggtgagagcggctccggcaagacccagagcaccaacttcctcatccactgcctcaccgccctcagccagaagggctacgccagcggcgtcgagaggaccatcctgggtgctggccctgtgctggaggtgagcggggaagctggtcggtctgtgggagggggcatttgtttggaaaatgcgggtttcaggccaagctcggtggcccacatctataatcccaatgctttggaaggctgagggaggaggattgcttgagcccaggagttcaagatcagcctgggcaacatagcaagaccttttctctacaaaaaaaaaaaaaagggggggcccc

SEQ ID NO: 753 - DNA, 552 bp, Homo sapiens
agctcggaattcggctcgagtctgctcagcctggtgaacccacaggcccgagtttcacccagtccccactccacggtgcagctgcggcttatctctcagcccagcgagatgccagccttcctgtcccgggccagcgctctgacatgcagaaggtgaccctgggcctgcttgtgttcctggcaggctttcctgtcctggacgccaatgacctagaagataaaaacagtcctttctactatgactggcacagcctccaggttggcgggctcatctgcgctggggttctgtgcgccatgggcatcatcatcgtcatgagtgcaaaatgcaaatgcaagtttggccagaagtccggtcaccatccaggggagactccacctctcatcaccccaggctcagcccaaagctgatgaggacagaccagctgaaattgggtggaggaccgttctctgtccccaggtcctgtctctgcacagaaacttgaactccaggatggaattcttcctcctctgctgggactcctttgcatggcagggcctcatctcacctctcgca

SEQ ID NO: 754 - DNA, 505 bp, Homo sapiens
caacacgctgggctaccacgtccgccaggagccgcggagcatgagcaagaggctcttcctcgtaacgcgagcccagtcccccttcaaagtttatcattaccagttaaagatccagttcatcaaccaaactgagacgccaatacaaacaacttttaccatgtcactactcggaacaaaagagaaaatgcaaaaaattcccatcactctggaagtaagaggtgtagccccctagggtgatgacatttatttttcttgcagaacataaatggactctgtaattttcaagaggcaggccagctacaactactttattccagacgcaaaccagaggtatctgagacacatgtcaatcaatttagtttattttgccaaagttaaagacgttatcgagacacagcctcaggaggtcctggtgacctgtatccaaggtggtcaggctacagcttggctctatacattataggaagatataagacatcaatcagtacttgtaagatgtacactg

SEQ ID NO: 755 - DNA, 394 bp, Homo sapiens
taagctcgggattcggctcgagtggaccctcctgaacattttattttaaagaactatgatatccagtatttttccatgagagatattgatcgacttggtatccagaaggtcatggaacgaacatttgatctgctgattggcaagagacaaagaccaatccatttgagttttgatattgatgcatttgaccctacactggctccagccacaggaactcctgttgtcgggggactaacctatcgagaaggcatgtatattgctgaggaaatacacaatacagggttgctatcagcactggatcttgttgaagtcaatcctcagttggccacctcagaggaagaggcgaagactacagctaacctggcagtagatgtgattgcttcaagctttggtc

SEQ ID NO: 756 - DNA, 389 bp, Homo sapiens
ggaacgtggtgatgttcgtcacctatgagcagctgaaacgagccttctacaaagggttcatgccctcctttctctagccgggccatgctttccttttcttccttctttctcttccctccttcccttctctccttccctctttccccacctcttccttccgctcctttacctaccaccttccctctttctacattctcatctactcattgtctcagtgctggtggagttgacatttgacagtgtgggaggcctcgtaccagccaggatcccaagcgtcccgtcccttggaaagttcagccagaatcttcgtcctgcccccgacagcccagcctagcccacttgtcatccataaagcaagctcaaccttggaaaaaaaaaaaaaaaaaaaa

SEQ ID NO: 757 - DNA, 547 bp, Homo sapiens
  misc_feature 461: n = A,T,C or G
tttcttactgtacctcagggcttagtgaaagtaatgacactttgccccattgagacactgaggaaaaagagtttagctatgcttcagctgtatattaacaagttggattcacaaggcaaatatacattatttaggtgcttattgaatacaagtaatcactcaggtgtggaggcttttattattcaaaatatcaaaaatcaaattgacatgtcattaaagagaacacgtaacaacaaatggtttacaggaccacagttgatttcccttcttgatttggtactttttctcccagagggtgcagaaacagatttactgcaaaactcagataggattatggcttcattaaatttattgaggtatttggttatcaaagataatgaaaatgacaatcaaactggattatggacagaacttggaaatattgagaataatttcttaaagccacttcatataggacttantatgtcaaaagcacattatgaagcagaaattaaaatagccaagaggcccagaaatctaaagatctttgttctataactgtaagtgg

SEQ ID NO: 758 - DNA, 437 bp, Homo sapiens
cccctttgctatctagaatgtgtatgccatagaatactggatagaggtaggatcagcagctaatctatgagaaattttgtatgattagacacaaaaaattgaatgcttatcctaccgtccagtaaaaaatatttttcggtgtccccaaaaatagcaatttattaatggaaaaatataattttatcactaccactttttaatgctacaagtttctccaggagcaaaggataagaagaaaaagagaaattttaataagttattattattattatttttgagacagtctcgctctcttgcccaggctggagtgcagtggctccatctcagctcactgcaacctccgcctcccgggttcaaacagttctcctgcctcagcctcccaagtagctgggaatacaggtgcacactgccacaactggttaatttttttttttttt

SEQ ID NO: 759 - DNA, 237 bp, Homo sapiens
  misc_feature 12, 16, 17, 55, 61, 71, 85, 91, 103, 108, 109, 110, 153,174, 175, 177, 185, 196, 199, 214, 221: n = A,T,C or G
cacttccaccanccanntaccctcaactgccacttcacagtcctgccaccactantcatgnaaatgccacngttcatccaacaancaacancactgccaccancccannnattcaccagttctgcccacccacaaccacctccaccctctccnagtcctagcccaacctccaannanaccattgngagactacacnttnaccaatggttcccanccctgtntccacctccaaaccca

SEQ ID NO: 760 - DNA, 611 bp, Homo sapiens
gctcgggaattcgctcgagattacagtacccaggaaatgttgggaagatttctttagatcagattgatttgctttctaccaaatccttcccaccttgcatgcgtcagttacataaagccttgcgggaaaatcaccatcttcgtcatggaggccgaatgcagtatggcctatttctgaagggcattggtttaactttggaacaggcattgcagttctggaagcaagaatttatcaaaggaaagatggatccagacaagtttgataaaggttactcttacaacatccgtcacagctttggaaaggaaggcaagaggacagactatacacctttcagttgcctgaagattattctgtccaatccaccaagccaaggggattatcatgggtgcccattccgtcacagtgatccagagctgctgaagcaaaagttgcagtcatacaagatctctcctggagggataagccagattttggatttagtaaaggggacacattaccaggtagcctgtcaaaaatactttgagatgatacacaatgtggatgattgtggcttttctttgaatcatcctaatcagttcttttgtgagagccaacgtattctaaatggtggt

SEQ ID NO: 761 - DNA, 275 bp, Homo sapiens
  misc_feature 19, 21, 69, 77, 144, 156, 174, 176, 177, 248, 259: n = A,T,C or G
caacaccaaggtggacaananagttgagctcaaaaccccacttggtgacacaactcacacatgcccacngtgcccanagcccaaatcttgtgacacacctcccccgtggcccacggtgcccatagcccaaatcttgtgacacanctctcccatgcncacggtggcccagaggtnanntcttttgacacacctcccccgtgcccaatgtgcccagcactgaactcctgggaggaccgtcagtcttcctnttctccccaanacccaaggataccctt

SEQ ID NO: 762 - DNA, 565 bp, Homo sapiens
gctcggaattcggctcgagaaagattggcctgggtccctgaggcacaaaggaaacacacagccaagaaggcgcccgacggcactgtcatccccaacggctactgtgacttctgcctggggggctccaagaagacggggtgtcccgaggacctcatctcctgtgcggactgtgggcgatcaggacacccctcgtgtttacaattcacggtgaacatgacggcagccgtgcggacctaccgctggcagtgcatcgagtgcaaatcctgcagcctgtgcggaacctccgagaacgacgtgagtgccgcccgccccccgcgtgccctgctgcccgccccgcctggcacgtccacctctgccccttaagcctaaagcctgtgcctgagccttccctggtgaacaccagtcccctgtgttatcattatgctggtgtccataaatcgaacctggccctttttcctcttcatctctctggatcctcccaaccaccctctgaagcaggtggtcttgtttccacttcacagggaagaaactgagctcagagagggaaagagacctgcccagggtc

SEQ ID NO: 763 - DNA, 261 bp, Homo sapiens
atcactgccagctagccgccatggatgcagcagcctgaaacttgagagcgaaagtgagataaatgtcaaaggtgtttcaagccagacattttcacaattgtgaagaaatagatgttttgtttctgttttttactgtgttcccaaaattaaataaatgttaaccaagtcacagtgtttttggttttgtttttctgaaatcttggtttgatcaaatctttttttttttcttttgaaagggagttttactttgtcccccaggtt

SEQ ID NO: 764 - DNA, 164 bp, Homo sapiens
atttattcttccgttagagttgatacagttttaaatagcaacaaagtacacagtggtggaaaattggcacagaacctacaagcatttcaatcacaataaggctgtccatgatttatctgttcaaacttgatgtccattttctactgatcaagttgaaagaaaaa

SEQ ID NO: 765 - DNA, 530 bp, Homo sapiens
taggctgggtgtggagctgcagcgtatccacaggccccaggatgcaggccctggtgctactcctctgcattggagccctcctcgggcacagcagctgccagaaccctgccagccccccggaggagggctccccagaccccgacagcacaggggcgctggtggaggaggaggatcctttcttcaaagtccccgtgaacaagctggcagcggctgtctccaacttcggctatgacctgtaccgggtgcgatccagcatgagccccacgaccaacgtgctcctgtctcctctcagtgtggccacggccctctcggccctctcgctgggagcggagcagcgaacagaatccatcattcaccgggctctctactatgacttgatcagcagcccagacatccatggtacctataaggagctccttgacacggtcactgccccccagaagaacctcaagagtgcctcccggatcgtctttgagaagaagctgcgcataaaatccagctttgtggcacctctggaaaagtcatatggg

SEQ ID NO: 766 - DNA, 394 bp, Homo sapiens
aagtgcgcgccgggagtcgggctggtccgggacggctgcggctgctgtaaggtctgcgccaagcagctcaacgaggactgcagcaaaacgcagccctgcgaccacaccaaggggctggaatgcaacttcggcgccagctccaccgctctgaaggggatctgcagagctcagtcagagggcagaccctgtgaatataactccagaatctaccaaaacggggaaagtttccagcccaactgtaaacatcagtgcacatgtattgatggcgccgtgggctgcattcctctgtgtccccaagaactatctctccccaacttgggctgtcccaaccctcggctggtcaaagttaccgggcagtgctgcgaggagtgggtctgtgacgaggatagtatca

SEQ ID NO: 767 - DNA, 500 bp, Homo sapiens
cacattataataattcccagagcctatctttttctgaagctacagcctccaatttggtgaaagtcaatataataggagaagtggttgaccagggaagtaccaatttgaaaattgaccatacaggattcagtccccatgctgcaatctattcaacacgtcctgatgttaagtgtgtgatacacatccatacccttgcaacagcagctgtatcctccatgaaatgtgggatccttccaatttctcaagagtctcttcttctgggagatgttgcctattatgactaccaagggtcacttgaagaacaggaggagagaattcaactgcagaaggttctgggaccaagttgtaaggtgctggtactcaggaatcatggtgtggttgcacttggagaaacattagaggaggcttttcattatatttttaatgtgcaactagcctgtgagattcaggtgcaggccctagcaggtgcaggtggagtagacaatctccatgtactggac

SEQ ID NO: 768 - DNA, 391 bp, Homo sapiens
tccagccggccggtgagcgcctggggaccgcagaggtgagagtcgcgcccgggagtccgccgcctgcgccaggatggagttcgtgaaatgccttggccaccccgaagagttctacaacctggtgcgcttccggatcgggggcaagcggaaggtgatgcccaagatggaccaagactcgctcagcagcagcctgaaaacttgctacaagtatctcaatcagaccagtcgcagtttcgcagctgttatccaagcgctggatggggaaatgcgcaacgcagtgtgcatattttatctggttctccgagctctggacacactggaagatgacatgaccatcagtgtggaaaagagagtcccgctgttacacaactttcactctttcctttaccaa

SEQ ID NO: 769 - DNA, 430 bp, Homo sapiens
tttattgctgatcacaaggacagacagttttttcccgaccatactcatcaaagatttacgtttgtatattagtaactagtgcattactagagcaggtgcaggtgaggtctttaaagtttcaatgaaagtttcttctggatctacagaaaaaattttttttttcaatctaaaaactggaaattctagggtttttgtacattttggatgcactgggaatttattagcacaaaatcattctttgcaactcaaaattcaaaagggactctaccatatcttagctcagagcacagaggagtgccttatccccacacttgactgggctgtggaggtgggcatgtgggcccctgggcccaggctggggacagagcccttgttttgtgacttaggattttgatgtggttcccatgttctctaacagggccagctgagc

SEQ ID NO: 770 - DNA, 157 bp, Homo sapiens
cagtgaggtaggccagcttttatgacgcacctgaagataactttggttttaatcctaccctaaatgaagcatatgcctctatttttcctgtccccagtgctgggcttcttcacataccaacatttctgtgcttttaccaacagcattttagctcaga

SEQ ID NO: 771 - DNA, 257 bp, Homo sapiens
gcacggtgaccctgaggacggcctgtccactggtagatgacaacaaggcagaagaaatagctgacaagatctacaatctgtacaatgggtacacaagtggaaaggagcagcagatggcctacaacacactgatggaggtctcagcctcgatgctgttccgagtccagcaccactacaactctcactatgaaaagtttggcgacttcgtctggagaagtgaggatgagctggggcccaggaaggcccacctgattcta

SEQ ID NO: 772 - DNA, 545 bp, Homo sapiens
aaatatatccttgttttccacactatgtgtgttgttcccaaaagaatgactgttttggttcatcagtgaattcaccatccaggagagacggtggtatatattttaaacctgttgggccaatgagaaaagaaccacactggagatcatgatgaacttttggctgaacctcatcactcgaactccagcttcaagaatgtgttttcatgcccggcctttgttcctccataaatgtgtcctttagtttcaaacagatctttatagttcgtgcttcataagccaattcttattattatttttgggggactcttcttcaaagagcttgccaatgaagatttaaagacagagcaggagcttcttccaggagttctgagccttggttgtggacaaaacaatcttaagttgggcagctttcctcaacacaaaaaaaagttattaatggtcattgaaccataactaggactttatcagaaactcaaagcttgggggataaaaaggagcaagagaatactgtaacaaacttcgtacagagttcggtctattaattg

SEQ ID NO: 773 - DNA, 223 bp, Homo sapiens
gagcatgattttgggtctgcccaaaggaacatggtgtcacttttgttctttctgacccactaaataaaaagtagtgtaacagggtttcactggaatgtttattagaaagtttacactttttatatttttatgattttaaaaacaaacaataatagaaaaacagattttaaggaacttcagagcagtatatattctgtctaaactcactgaatattttaagttg

SEQ ID NO: 774 - DNA, 477 bp, Homo sapiens
ggctccgaggcgccccagaaggcttctccagaactgacttgcacctggccgtggttccagtgctgacagcattaatctcttaccataactacctggacaaaaccaaacagcgcgagatggtctactgcctggagcagggcctcatccaccgctgtgccagccagtgcgtcgtggccttgtccatctgcagcgtggagatgcctgacatcatcatcaaggcgctgcctgttctggtggtgaagctcacgcacatctcagccacagccagcatggccgtcccactgctggagttcctgtccagtgagtccccgccctgcctgcgcatgcacccgagaggttcgggctgtgtaacctgtgcgggcttctctggtgccctctctcaggactccttggggaacctgggtgtctcgccttctgctgcctcagggcctgggcgtctctgcccggctgccatgagtgctctccttcctggctttg

SEQ ID NO: 775 - DNA, 421 bp, Homo sapiens
ccgctgcgtgttttccttttgatcgggaactcctgcttctccttgcctcgaaatggaccccaactgctcctgctcgcctgttggctcctgtgcctgtgccggctcctgcaaatgcaaagagtgcaaatgcacctcctgcaagaagagctgctgctcctgctgccctgtgggctgtgccaagtgtgcccagggctgcatctgcaaagggacgtcagacaagtgcagctgctgtgcctgatgccaggacagctgtgctctcagatgtaaatagagcaacctatataaacctggatttttttttttttttttttggaaaaaccccaaccccgttggttaaattttttttttttaaaaatttggaaggggaaaaaattttttttaatctaaaaaaaaaaaaaaaaaaaaaaaaaggggggggggg

SEQ ID NO: 776 - DNA, 437 bp, Homo sapiens
agtttgaagaaaccacagctgatggcatgaaaaactcagactgtctgcaactttacagatggtgcattggttcagcatcaggagtgggatgggaaggaaagcacaataacaagaaaattgaaagatgggaaattagtggtggagtgtgtcatgaacaatgtcacctgtactcggatctatgaaaaagtagaataaaaattccatcatcactttggacaggagttaattaagagaatgaccaagctcagttcaatgagcaaatctccatactgtttctttcttttttttttcattactgggttcaattatctttatcataaacattttacatgcagctttttcaaagtgtgttggattaattaggatcatccctttggttaataaataaatgtgtttgagctaaaaaaaaaaaaaaaaaaaaaggggggccccccctt

SEQ ID NO: 777 - DNA, 542 bp, Homo sapiens
gagcacacagaatctgctactcctgctgactgataatgaggcctggaacggattcgtggctgctgctgaactgcccaggaatgaggcagatgagctccgtaaagctctggacaaccttgcaagacaaatgatcatgaaagacaaaaactggcacgataaaggccagcagtacagaaactggtttctgaaagagtttcctcggttgaaaagtgagcttgaggataacataagaaggctccgtgcccttgcagatggggttcagaaggtccacaaaggcaccaccatcgccaatgtggtgtctggctctctcagcatttcctctggcatcctgaccctcgtcggcatgggtctggcacccttcacagagggaggcagccttgtactcttggaacctgggatggagttgggaatcacagccgctttgaccgggattaccagcagtaccatggactacggaaagaagtggtggacacaagcccaagcccacgacctggtcatcaaaagccttgacaaattgaaggaggtgagggagtttttgggtg

SEQ ID NO: 778 - DNA, 558 bp, Homo sapiens
ttttaagaatgtggcagtgatccctcctggaactggaatggctcatcaaataaacttagaatatttgtcaagagtggtttttgaagaaaaagacctcctcttcccagacagtgtagtcggcacagattcacacataacgatggtgaatggtttagggattctggggtggggtaagtaaatgactaaatatatttcatttcttttggggtaaggatgtcaagaacattgtaaaagaacataaattattgagtttgtatagcctctttgaggctctgtgtttttcatctgtaataacagcagcaacaacaaaatcctaattgagagtttgtgatcagtgttgtaaaagaggatttatgagaagaaatttacacagtgtctagcacagcactactatttgtgaagtaattgaataattgaatgatgatgatgatacgtctacaaagtttgcttctttgtgtaaggtacttttgtggcttctcctggtcttctttataagtccagatttcttgccattttatacaaggcatgtccctttagccactcacccacacccatctt

SEQ ID NO: 779 - DNA, 198 bp, Homo sapiens
  misc_feature 27: n = A,T,C or G
agtgccaggagaattttgacgtgaatnagtatctccggaagatggtacgaaattgagaagatccccaacaacctttgagaatggacgctgcatccaggcccaactactcactaatggaaaacggaaagatccaaagtgttaaaccaggagttgagagctgatggaactgtgaatcaaatccgaaggtgaagccacccc

SEQ ID NO: 780 - DNA, 283 bp, Homo sapiens
  misc_feature 11, 35, 42, 49, 60, 61, 62, 64, 78, 84, 93, 94, 100, 125,137, 142, 143, 167, 207, 210, 217, 257, 265, 269: n = A,T,C or G
agatggagcancagaaccaggaatacggaatcctnctggatntgaagangcggctggagnnngnggttgtcacctatngccgcnggctggagnnagaggntgaccgcctgacctcagtacaaganagaaccggtgancatcnncaggtgcgtaccattgtggaagangtccaggatggcaaggtcatctcctcccgcgagcaggtcnacnagatcanccgtgaggactcagctaccccggccggccacccaggaggnagggaggnagcngccccatctgccca

SEQ ID NO: 781 - DNA, 563 bp, Homo sapiens
aattatgtcttggaaaaagctttgcggatccccggaggccttcgggcagcaactgttaccttgatgctggcgatgctgagcaccccagtggctgagggcagagactctcccgaggatttcgtgtaccagtttaaggccatgtgctacttcaccaacgggacggagcgcgtgcgttatgtgaccagatacatctataaccgagaggagtacgcacgcttcgacagcgacgtggaggtgtaccgggcggtgacgccgctggggccgcctgacgccgagtactggaacagccagaaggaagtcctggagaggacccgggcggagttggacacggtgtgcagacacaactaccagttggagctccgcacgaccttgcagcggcgagtggagcccacagtgaccatctccccatccaggacagaggccctcaaccaccacaacctgctggtctgctcagtgacagatttctatccagcccagatcaaagtccggtggtttcggaatgaccaggaggagacaaccggcgttgtgtccaccccccttattaggaacggtgactggacctt

SEQ ID NO: 782 - DNA, 197 bp, Homo sapiens
  misc_feature 16: n = A,T,C or G
agaagggaaaggtctnaaggaagagtcaactgggacaagcacaagcccaccggacatggccttggtaaaggttagcagactggtgtgtgtggatctgcagtgcttcactggaaataatttattcattgcagatactttttaggtggcattttattcatttcctgtgctttaaataaacaaatgtaccaaaaaacaag

SEQ ID NO: 783 - DNA, 240 bp, Homo sapiens
  misc_feature 191, 237: n = A,T,C or G
ctaccgcgtgctggtgcaccctatggccagccggaggcagcagcggcggaggcaggcccgggtcacctgcgtgctcatctgggttgtggggggcctcttgagcatccccacattcctgctgcgatccatccaagccgtcccagatctgaacatcaccgcctgcatcctgctcctcccccatgaggcctggnactttgcaaggattgtggagttaaatattctgggtttcctcctacnacg

SEQ ID NO: 784 - DNA, 301 bp, Homo sapiens
ggaggccaaggtgcaacttccttcggtcgtcccgaatccgggttcatccgacaccagccgcctccaccatgccgccgaagttcgaccccaacgagatcaaagtcgtatacctgaggtgcaccggaggtgaagtcggtgccacttctgccctggcccccaagatcggccccctgggtctgtctccaaaaaaagttggtgatgacattgccaaggcaacgggtgactggaagggcctgaggattacagtgaaatgaccattcagaacagacaggcccagattgaggtggtgccttctgcctct

SEQ ID NO: 785 - DNA, 263 bp, Homo sapiens
  misc_feature 56: n = A,T,C or G
tggtacgcctgcaggtaccggtccggaattcggctcgagaaacatgctaaaccaanaaacatccaatcacaaaactaggaagtttggcaagaagtggttagagaaatctctgggcttttccatgggcagggtcgacagactctcttttcagtgatttctggctctgagaaacctctttactcactagaaaagaactttatttaaatggccaattttgttcctcagaaaaagaaattaaaaaaaaaaaaaagggggggcccttt

SEQ ID NO: 786 - DNA, 424 bp, Homo sapiens
tggtacgcctgcaggtaccggtccggaattcccgggtcgacccacgcgtccgattctatttcagtgacgtaggttggggctgaatgtaaaatagacatcatattactaaatagaatcctataaaatgcaatcacaggtgcccgggagtactagttttaaacatttccttaacaaggagaacaatccagcaaaaagctttctttctctatacagtgtatatctctaaactttttttcctcagttttagagaacatctgttttatctggtggttctttgtttgaatgcaaactcataactttcaagtctccggtgcaagagcataatctacagatcatgggcaaaatctagccacagtcctgagagtccaggcttctgggatgcccagctgggtataaaagtccctactaaccctgtttcaaattc

SEQ ID NO: 787 - DNA, 245 bp, Homo sapiens
  misc_feature 89, 94: n = A,T,C or G
ggaagccaggagccgagcccatgcagtggagggccaggtggaagatgtggttgggaacctgcggcaggggacagtggcactgcaggaanctcangacaccatgcaaggcaccagccgctcccttcggcttatccaggacagggttgctgaggttcagcaggtactgggccagcagaaaagctggtgacaagcatgaccaagcagctgggtgacttctggacacggatggaggagctccgccacca

SEQ ID NO: 788 - DNA, 260 bp, Homo sapiens
cgactccctcaatgtcacactagcctacccagtatatgcacagcagaggcgatgaagcgcttactctttgatccttctcctgaagttcagccaccctgaggcctctggaaagcaaagggctcctctccagtctgatctgtgaattgagctgcagaaacgaagccatctttctttggatgggactagagctttctttcacaaaaaagaagtaggggaagacatgcagcctaaggctgtatgatgaccacacgttcctaagc

SEQ ID NO: 789 - DNA, 519 bp, Homo sapiens
gatgcagtatctggccgagatgaagctcgttcatcgggacttggcagccagaaacatcctggtagctgaggggcggaagatgaagatttcggatttcggcttgtcccgagatgtttatgaagaggattcctacgtgaagaggagccagggtcggattccagttaaatggatggcaattgaatccctttttgatcatatctacaccacgcaaagtgatgtatggtcttttggtgtcctgctgtgggagatcgtgaccctagggggaaacccctatcctgggattcctcctgagcggctcttcaaccttctgaagaccggccaccggatggagaggccagacaactgcagcgaggagatgtaccgcctgatgctgcaatgctggaagcaggagccggacaaaaggccggtgtttgcggacatcagcaaagacctggagaagatgatggttaagaggagagactacttggaccttgcggcgtccactccatctgactccctgatttatgacgacggcctctc

SEQ ID NO: 790 - DNA, 252 bp, Homo sapiens
  misc_feature 144: n = A,T,C or G
agcccaagccctcagtggaacctgtcaagagcatcagcagcatggagctgaagaccgagccctttgatgacttcctgttcccagtgacacttcagagagctggtagttagtagcatgttgagccaggcctgggtctgtgtctcntttctctttctccttagtcttctcatagcattaactaatctattgggttcattattggaattaacctggtgctggatattttcaaattgtatctagtgcagctgattt

SEQ ID NO: 791 - DNA, 266 bp, Homo sapiens
  misc_feature 119: n = A,T,C or G
ccggctcccgatggccagtttgctttcctcattcccaacggggccttcgcgcacagcggccctgtcatccccgtctacaccagcaacagcggcacctccgtgggccccaacgcagtgtncaccttccagcggcccctcgcttacggcggactccatgtggaggccgtggcggaactgagggggctcaggccacccctcctcctaaactccccaacccacctctcttccctccggactctaaacaggaacttgaatactgggagaga

SEQ ID NO: 792 - DNA, 907 bp, Homo sapiens
  misc_feature 164: n = A,T,C or G
tgactttttaaagaagtaagcctttatttccttgttttgcaaataaaactggctaagttggttgctttttggtgattagtcaaagagaccaaatcccatatcctcgtccgactcctccgactcttccttggcttcaaccttagctggggctgcagcagcagagngagcagctgtggtggcagcagcacaggggcagcagcacaaaggcagatggatcagccaagaaggccttgaccttttcagcaagtgggaaggtgtaatccgtctccacagacaaggccaggactcgtttgtacccgttgatgatagaatggggtactgatgcaacagttgggtagccaatctgcagacagacactggcaacattgcggacaccctccaggaagcgagaatgcagagtttcctctgtgatatcaagcacttcagggttgtagatgctgccattgtcgaacacctgctggatgaccagcccaaaggagaagggggagatgttgagcatgttcagcagcgtggcttcgctggctcccactttgtctccagtcttgatcagctgcacatcactcaggatttcaatggtgcccctggagattttagtggtgatacctaaagccctggaaaaggaggtcttctcgggcccgagaccagtgttctgggctggcacagtgacttcacatggggcaatggcaccagcacgggcagcagcttgcaccttatttggccgcaacctgtccctgatctcagtgagagtcctccttggtgaacacaaagcccaaatgcccccggttaatgaggaagcaattcttcagaggctgggttgttttccaggtggcctcggatgggcctggcccattcatggttttttgccccatcaaaacacaagcttccccccagggaacaattcggatct

SEQ ID NO: 793 - DNA, 366 bp, Homo sapiens; identical to SEQ ID NO: 350
  misc_feature 112, 139, 177, 193, 211, 261, 302: n = A,T,C or G

SEQ ID NO: 794 - DNA, 578 bp, Homo sapiens
gcgtaaatattacctatggtagtaaacgtttaattatcattcagtttaaatgttggccttctgtatgtagccaagaacagctcattttgtgaatttcagtttttaagtggctgctttttgatttggttgtattattttattataatgtatttgcaagtatattaaaaaattaacattgagccataaaaatccccaaatatgttcaaggacttcataattgaaaaatatatagaaaacaatccttacttctttttacaaaaacaaaatcatgggaattattcttttctatatatttagttataaatctttctctgggccgggcgtggtggctcacgccagtaatcccagcactttgggaggctgagacaggcgaatcacgaggtcaggagttcgagaccagcctggccaacatggtgaaaccccgtctctactgaaaatacaaaaaattagctggacacggtggcaggcgcctgtgtgtggcgggcgccagctactcaggaggctgaggcaggagaatcgcttgaacccaggaggcagaggttgcagtgagccaagattgcgccactgcactccagcct

SEQ ID NO: 795 - DNA, 232 bp, Homo sapiens
tttacctcagcgcctcagtcctggaggccctggccaccatcacgatgcaagacggcttcacctacaggcactaccatgaaaacattgctgccgtggtgttctcctacatagccactctgctctacgtggtccatgcggtgttctctttaatcagatggaagtcttcataaagccgcagtagaacttgagctgaaaacccagatggtgttaactggccgccccactttccggc

SEQ ID NO: 796 - DNA, 247 bp, Homo sapiens
gttcgaaactttggaactctagatagaaaatatctcttggcacttaatctgctactaatttttgctgttaaatcagatggatcaaactttgtgtttaatagctaaatgttgaatctgaaatggatgacagaccaaagttaaacaagcctccggaaactcttatcactactattgattctagttccagttggtggaccaactgggtgatccctgccatctctgcagtggccgtcgccttgatgtatcg

SEQ ID NO: 797 - DNA, 461 bp, Homo sapiens
gtagccatacctaatagacctcctgatgctgtacttacagataccacctctcttaatcaggctgctttgtaccgcctcagtggagactggaatcccttacacattgatcctaactttgctagtctagcaggttttgacaagcccatattacatggattatgtacatttggattttctgccaggcgtgtgttacagcagtttgcagataatgatgtgtcaagattcaaggcagttaaggctcgttttgcaaaaccagtatatccaggacaaactctacaaactgagatgtggaaggaaggaaacagaattcattttcaaaccaaggtccaagaaactggagacattgtcatttcaaatgcatatgtggatcttgcaccaacatctggtacttcagctaagacaccctctgagggcgggaagcttcagagtacctttgtatttgaggaaataggacgccgcct

SEQ ID NO: 798 - DNA, 465 bp, Homo sapiens
ccaagaattcggcacgagacaaggttttcaggctcccaggtcagtagaccaaaccaacttccttagatttttttttttaagctgtttgcaaaaaactgggtggtagcgtgtctgaaccaaacggaagaatagccagcggagcatggactgttccagcacgggccaaatggccagctgtcgaaagcagccctgcccagattgcggtgggggctgagccatcggctccgcagggcccttccaactctggagtgtctgtagttcttgtgaaaccaaaacgttgactacctgcctctttcctcgggcatcaacgtgctcatttccaaaaatgatggtgcaggtgaccttttccatcgtgagctaaaaaaaggttaggaggcctgaggggcggtccttgtgtcccctcctccccctccacagcccctgaggtggagcttccctcacagaccccatttggtcgagcctacg

SEQ ID NO: 799 - DNA, 660 bp, Homo sapiens; identical to SEQ ID NO: 286
  misc_feature 595, 605, 621: n = A,T,C or G

SEQ ID NO: 800 - DNA, 567 bp, Homo sapiens
gcaaggacaagaaacacgtctggctaggagaaactatcaatgctggcagccagtttgaatataatgtagaaggagtgacttccaaggaaatggctacccaacttgccttcatgcgcctgctggccaactatgcctctcagaacatcacctaccactgcaagaacagcattgcatacatggatgaggagactggcaacctgaaaaaggctgtcattctacagggctctaatgatgttgaacttgttgctgagggcaacagcaggttcacttacactgttcttgtagatggctgctctaaaaagacaaatgaatggggaaagacaatcattgaatacaaaacaaataagccatcacgcctgcccttccttgatattgcacctttggacatcggtggtgctgaccaggaattctttgtggacattggcccagtctgtttcaaataaatgaactcaatctaaattaaaaaagaaagaaatttgaaaaaactttctctttgccatttcttcttcttcttttttaactgaaagctgaatccttccatttcttctgcacatctacttgcttaaa

SEQ ID NO: 801 - DNA, 502 bp, Homo sapiens; identical to SEQ ID NO: 284

SEQ ID NO: 802 - DNA, 461 bp, Homo sapiens
tggatcccccgggctgcaggaattcggcacgagcttagagctcattttgttttatctcctcattgtatggataaagtgtagtgcaaaagagtgagttctaggccagaggtaggccaataatttaattttcccaactcacgggccaaggttctttccactgcaccataatactgatccccaattttaaggttccttgtctgtccttctaaaccatcaattcactcaacaactgcttaagtgtatatagtatgtgcacatctgtgccatttgttgggtatgcaaagtctaaaagacagggtgcctgccctgagatgctcatgacctaattcaaatgcatccttcctgtccctctccccacttctcctggatcttctcatctgtatccttttccacgtttgtaaatataaattcaatagaaataaacagttttatatatggcaaatcatgatgagctatgaaag

SEQ ID NO: 803 - DNA, 374 bp, Homo sapiens
tggtacgcctgcaggtaccggtccggaattcccgggtcgacccacgcgtccggaggggtcctggagaatgggttaccccagttgtcttatttaaatggttacccatcagattttaattttatcttctctttgagagcttggtaataagaagcacttaaatcactccaaagaagactttaaaaagggagcagtgaaaaggtcttaataatttattgattgaattaagaaatactagctaattaagaatctgagtctaaacagcacagattttttctttctgcttttaaattgtgttttaaaaaaagagacagggggctgggcgtggtggctcacgcctgtaatcctagcactttgggaggccgaggcgggtggat

SEQ ID NO: 804 - DNA, 267 bp, Homo sapiens
  misc_feature 109: n = A,T,C or G
gccagctttagcttgtggaaaagtccatctaggtatggttgcattcagattccaaagagaatcatttacaagttaatttctgtctccttggtccattccttctctctantaatcatttactgttcctcaaagaattgtctacattacccatctcctcttttgcctctgagaaagagtatataagcttctgtaccccactggggggttggggtaatattctgtggtcctcagccctgtaccttaataaatttgtatgccttttctctt

SEQ ID NO: 805 - DNA, 269 bp, Homo sapiens
  misc_feature 13, 47, 149, 150, 170, 192, 194, 224, 232, 234, 237, 241,245, 263: n = A,T,C or G
ggccgcagaagcnagatgacgaagggaacgtcatcgtttggaaagcntcgcaataagacgcacacgttgtgccgccgctgtggctctaaggcctaccaccttcagaagtcgacctgtggcaaatgtggctaccctgccaagcgcaagannaagtataactggagtgccanggctaaaagacgaaataccacngnaactggtcgaatgaggcacctaaaaattgnataccgcngnttnaggnatgnattccgtaaggggacaanacctaa

SEQ ID NO: 806 - DNA, 401 bp, Homo sapiens
ggaagatgggactatggatggcaatgatgaggggcactcctttgaactttgtccttctgaagcttctccttatgtaaggtcaagggagagaacctcctcttcaatagtatttgaagattctggctgtgataatgcttccagtaaagaagagccgaaaactaatcgattgcatattggcaaccattgtgctaataaactaactgctttcaagcccaccagtagcaaatcttcttctgaagctacattgtctatttctcctccaagaccaaccactttaagtttagatctcactaaaaacaccacagaaaaactccagcccagttcaccaaaggtgtatctttacattcaaatgcagctgtgcagaaaagaaaacctcaaagactgggatgaatggacgatgt

SEQ ID NO: 807 - DNA, 641 bp, Homo sapiens
  misc_feature 85, 350, 436, 457, 467, 500, 507, 557, 563, 581, 589, 608,641: n = A,T,C or G
gaacacagacagactcgcgagttgctggacctctttcggtattaagtgtttgaatccatggtgggccttttgcaagtagcgttantcatcttttaaatgttgaactgagctaaggatgcactttcttgtggacatagaaggggcccacgtaaggccctgagtaggctccttagttgctgctttacctgatgagggccaaagagattaactctgcctcgttgccatgtctcagaaaagttgccatatttcacccagaaggggcttgttttcctcttactcttactttaaccatgtgcctggaggaagccattctgggctcttgcacttgcccagcctttctttgccagggnaagagaagggaaaagggggtagattgagtgttgccaagggccgttgcaaagggcaggcttgctttccacccatctgctgagggaancctctcctctcgctcctttgnctctgttcanactgttgtcttggaagaagatggtcccttgtcntaaggcntttgtgataaagtcatctcagttaggatctgcacctgtttccctcgtaanagtgcnggcggccttttgaattanagtggttngaacccctcgcatgagaanactggtagattattttgcaagtgggtggttaan

SEQ ID NO: 808 - DNA, 393 bp, Homo sapiens
  misc_feature 203, 244, 303, 327, 352, 372: n = A,T,C or G
agacctactgccagcgcacgttccgggagatccagatcctgctgcgcttccgccatgagaatgtcatcggcatccgagacattctgcgggcgtccaccctggaagccatgagagatgtctacattgtgcaggacctgatggagactgacctgtacaagttgctgaaaagccagcagctgagcaatgaccatatctgctacttnctctaccagatcctgcggggcctcaagtacatccactccgncaacgtgctccaccgagatctaaagccctccaacctgctcatcaacaccacctgcggancttaaggatttgtgattttcggcntgggccggatttgccgatcctgagncatggaccacaccggctttnctgacggataatgttgggtta

SEQ ID NO: 809 - DNA, 431 bp, Homo sapiens
tgtaggtgccaagcgccatggcttagacccgagattggagtccggccgccccccgacagcagccgcctcctgccccccgtgcgccctaggcgccaccatgtcgggagacaaacttctgagcgaactcggttataagctgggccgcacaattggagagggcagctactccaaggtgaaggtggccacatccaagaagtacaagggtaccgtggccatcaaggtggtggaccggcggcgagcgcccccggacttcgtcaacaagttcctgccgcgagagctgtccatcctgcggggcgtgcgacacccgcacatcgtgcacgtcttcgagttatcgaggtgtgcaacgggaaactgtacatcgtgatggaagcggccgcaagcttattccctttagtgagggttaattttagcttggcactggccgtcgttta

SEQ ID NO: 810 - DNA, 553 bp, Homo sapiens
cccatgcgcatcggcaacaacggggggtgagagcccagtgacattatcatcccgctaaggactgcggacagcgtcttctgccctcactactagaaggtcagcggggactactggcacccggtgtacatcgtccaggagatgcccccgcatagcccggcgaacatttactacaaggtctgagagggaccctggtggtacctgtgctttcccagaggacacctaatgtcccgatgcctcccttgagggtttgagagcccgcgtgctggagaatagactgaagcacagcaccgggggagagggacactccttctcggaagagcccgtcacgctggacagcttacctagtcttgtagcattcggccttggtgaacacacactctccctgaaagctggaagactgtgcagaagacgcccattcggactgctgtgccgcgtcccacgtctcctactctaagccatgtgctgcggtcactcaggcctctgcagaagccaagggaagacagtggtttgtggactagagggctgtgagcatcctggcaggtgccccaggatg

SEQ ID NO: 811 - DNA, 272 bp, Homo sapiens
  misc_feature 257: n = A,T,C or G
cagattcctctccagcaccgactttaagaggcgagccggggggtcagggtcccagatgcacaggaggagaagcaggagctgtcgggaagatcagaagccagtcatggatgaccagcgcgaccttatctccaacaatgagcaactgcccatgctgggccggcgccctggggccccggagagcaagtgcagccgcggagccctgtacacaggcttttccatcctggtgactctgttctcgctggccagggcaacaacgnctatttctgtaccag

SEQ ID NO: 812 - DNA, 198 bp, Homo sapiens
cttgatgaactccaagttcacagtgtcatttcttcagaactccccttcattgaatagtgatcatttattaaatgataaattgcactcgctgaaagagcacgtcatgaagcaccatggaatcaaagagaaagatataaattcgtcccagagcttaggcggtgttaagtgaaaaaaaagaagttcggtaaaaggcctcgc

SEQ ID NO: 813 - DNA, 208 bp, Homo sapiens
  misc_feature 97: n = A,T,C or G
gactacatcttggacctgcagatcgccctggactcgcatcccactattgtcagcctgcatcaccagagacccgggcagaaccaggcgtccaggacgncgctgaccaccctcaacacggatatcagcatcctgtccttgcaggcttctgaattcccttctgagttaatgtcaaatgacagcaaagcactgtgtggctgaataagcggtg

SEQ ID NO: 814 - DNA, 251 bp, Homo sapiens
ccccatggaaccagcgggcgtttcccccatgccagggacccagaaggacaccgggaggactgaggagcagccaatggaagtttccgtgtgcaggagccctgtcccagcactcggcttctcccaggagccaggcccctctccagaaggcccgatgcccctgggtgggggcgaggacgaggatgcagaggaggcagtagagcttcctgaggcctcggcccccaaggccgctctggagcccaaggagtccagga

SEQ ID NO: 815 - DNA, 410 bp, Homo sapiens; identical to SEQ ID NO: 235
  misc_feature 302, 303, 309: n = A,T,C or G

SEQ ID NO: 816 - DNA, 501 bp, Homo sapiens; identical to SEQ ID NO: 234
  misc_feature 56, 431: n = A,T,C or G

SEQ ID NO: 817 - DNA, 418 bp, Homo sapiens
  misc_feature 242, 287, 290, 330, 335, 398, 409, 414: n = A,T,C or G
cttcgtaagagagcctccaattatggtgaccaaacagctggaagatacaactgcttattgtggggagagagtggaattagaatgtgaggtgtctgaagatgatgccaatgtaaaatggtttaagaatggtgaagagattatccctggtccaaaatcaagataccgaattagagttgagggtaaaaaacacatcttgatcatagagggagcaacaaaggctgatgctgcagaatattcagtantgacaacaggaggacaatcatctgctaaacttagtgttgacttgnaancctctgaagattttgacacctctgactgatcagactgtanatctnggaaaagaatctgctgagtgtgaaatctctgaaaacataccggaaatggactaaaatggccanccgttagagantgcgnctaa

SEQ ID NO: 818 - DNA, 237 bp, Homo sapiens
tgatggtgtttgtgctgtagctgttggaggctttgacaggaatggactggatcacctgactccagctagattgcctctcctggacatggcaatgatgagtttttaaaaaacagtgtggatgatgatatgcttttgtgagcaagcaaaagcagaaacgtgaagccgtgatacaaattggtgaacaaaaaatgcccaaggcttctcatgtctttattctgaagagctttaatatatact

SEQ ID NO: 819 - DNA, 154 bp, Homo sapiens
  misc_feature 45: n = A,T,C or G
gtgctcacagtcatcaattatagacccacaacatgcgccctgaanacagaatgttccatatcagagctgtgatcttgagagccctctccttggctttcctgctgagtctccgaggagctggggccatcaaggcggaccatgtgtcaacttatgc

SEQ ID NO: 820 - DNA, 426 bp, Homo sapiens; identical to SEQ ID NO: 342
  misc_feature 222, 263, 339: n = A,T,C or G

SEQ ID NO: 821 - DNA, 252 bp, Homo sapiens
  misc_feature 67, 68, 237, 250: n = A,T,C or G
aacccaaggacacgcatttggtggacccaaagactgatccgtcggacagccagacggggttagcggnnattgcgcaggaataaggaagcgacctgcaaccgacgattcttctactcaaaacaaaagagccaacagaacagaagaaaatgtttcagacggttccccaaatgccggttctgtgggagcagacgcccaagaagcctggccttcagaaggacgtcaaacgtaaacagctcnaattaaggaatangt

SEQ ID NO: 822 - DNA, 368 bp, Homo sapiens
acttatagttactattttatctacaacgaacatgaattatttgtaagtttaaaacaaaaaaaaaagtaagaaaaaattcaaatagcacaagacttcatatccaagaaatcggtactctttcactcaagataattcagttacctagaggagcagaatcgatttttttccaagggttgaggtatgtttttttttctttccagtcagaatactcctgacagctgtcactgggttggtcccatggcaattctccagcgagcattgcagtaagtactattccacaggaccaaacatcaactggttctgcatgaaattctcttctcttcagaagttctggagcaacatatggtaaagtaccacacatcttgttc

SEQ ID NO: 823 - DNA, 558 bp, Homo sapiens
tgctggatgagctgaccctgggcagagccgacctggagatgcagattgagaacctcaaggaggagctggcctacctgaagaagaaccacgaggaggagatgaacgccctgcgaggccaggtgggtggtgagatcaatgtggagatggacgctgccccaggcgtggacctgagccgcatcctcaacgagatgcgtgaccagtatgagaagatggcatagaagaaccgcaaggatgccgaggattggttcttcagcaagacagaggaactgaaccgcgaggtggccaccaacagtgagctggtgcagagtggcaagagtgagatctcggagctccggcgcaccatgcaggccttggagatagagctgcagtcccagctcagcatgaaagcatccctggagggcaacctggcggagacagagaaccgctactgcgtgcagctgtcccagatccaggggctgattggcagcgttgaggagcagctggcccagcttcgctgcgagatggagcagcagaaccaggaatacaaaatcctgctggatgtgaagacgcggctggagc

SEQ ID NO: 824 - DNA, 503 bp, Homo sapiens
tggtacgcctgcaggtaccggtccggaattcggctcgagtgctaatgaagacagtagaagagaaggacctagagattgagaggcttaagacgaagcaaaaagaactggaggccaagatgttggcccagaaggctgaggaaaaggagaaccattgtcccacaatgctccggcccctttcacatcgcacagtcacaggggcaaagcccctgaaaaaggctgtggtgatgcccctacagctaattcaggagcaggcagcatccccaaatgccgagatccacatcctgaagaataaaggccggaagagaaagctggagtccctggatgccctagagcctgaggagaaggctgaggactgctgggagctacagatcagcccggagctactggctcatgggcgccaaaaaatactggatctgctgaacgaaggctcagcccgagatctccgcagtcttcagcgcattggcccgaagaaggcccagctaatcgtgggctggcgggagctc

SEQ ID NO: 825 - DNA, 126 bp, Homo sapiens
aacaagatcgaacaggccatggatctggtgaagaatcatctgatgtatgctgtgagagaggaggtggagatcctgaaggagcagatccgagagctggtggagaagaactcccagctagagcgtgag

SEQ ID NO: 826 - DNA, 260 bp, Homo sapiens
cttgaaatttgctgagctggtgtataccggtttctggcacagccctgagtgtgaatttgtccgccactgcatcgccaagtcccaggagcgagtggaagggaaagtgcaggtgtccgtcctcaagggccaggtgtacatcctcggccgggagtccccactgtctctctacaatgaggagctggtgagcatgaacgtgcagggtgattatgagccaactgatgccaccgggttcatcaacatcaattccctcaggctgaagg

SEQ ID NO: 827 - DNA, 480 bp, Homo sapiens
  misc_feature 355, 393, 433: n = A,T,C or G
gagaagggagtagacaactgttcctgagggaaatctgggaagggttcatggagctgattccagaggggtgactaccatattgatgtctgtatcaatgactacctggatgttttctgccctcactatgaggactccgtcccagaagataagactgagcgctatgtcctctacatggtgaactttgatggctacagtgcctgcgaccacacttccaaagggttcaagagatgggaatgtaaccggcctcactctccaaatggaccgctgaagttctctgaaaaattccagctcttcactcccttttctctaggatttgaattcaggccagggcgaggaatatttcttacatctcctnttgcaattcccaggataaatgggaaggaaggtcctgtnttaaaggttcaaagtctttgtggaggaccaacaattaggntgttatggaaaactatagggtgtttcatgattcgtgtttttcgatgt

SEQ ID NO: 828 - DNA, 350 bp, Homo sapiens
  misc_feature 62, 73, 130, 306, 313, 322: n = A,T,C or G
gtggtggtggctgacttcgggctggcgcgtctcatggtggacgagaagactcagcctgaggnctgcggacctncaagaagccagaccgcaagaagcgctacaccgtggtgggcaacccctactggatggnacctgagatgatcaacggccgcagctatgatgagaaggtggatgtgttctcctttgggatcgtcctgtgcgagatcatcgggcgggtgaacgcagaccctgactacctgccccgcaccatggactttggcctcaacgtgcgaggattcctgggaccgctactgccccccaaacttnccccccnagcttcttnccccattcaccgtgcgttgttgcgattc

SEQ ID NO: 829 - DNA, 448 bp, Homo sapiens
  misc_feature 51, 324, 355: n = A,T,C or G
gacaagacgggcaccaggatcaagctcatcgactttggtctggccaggagntcggagaatgcggggtctctgaaggtcctctttggcaccccagaatttgtggctcctgaagtgatcaactatgagcccatcggctacgcacagacatgtggagcatcggggtcatctgctacatcctagtcagtggcctttcccccttcatgggagacaacgataacgaaaccttggccaacgttacctcagccacctgggacttcgaccacgaggcattcgatgagatctccgacgatgccaaggatttcatcagcaatctgctgaagaaanatatgaaaaacccgccttggactgcacgcantgcttttcaagcatccatggcttaatgaaagatacccaagaacatggagggccaagaaactctcccaaggaccggatgaagaagtacatggca

SEQ ID NO: 830 - DNA, 274 bp, Homo sapiens
tatttgatgttttacctgctcttctgagatactataatgtgttaaaagtcttacaagggaagatagtttttttcttttaattattaaaaaccaaaataaaacatcttttgagaaaggaatgtattgatgctggcaggtagaaaggaagctttgaaagaagcacagtaattttgctgaattctggccctgtatcatacaggcctaggactttcccccacttcctcaaatcaggataggagaagctattttttaactcctactgaaacaagaacct

SEQ ID NO: 831 - DNA, 294 bp, Homo sapiens
  misc_feature 90: n = A,T,C or G
tgcaacacactccagcctggctgcaacagcgtttgctatgaccaattcttccccatctcccatgtgcggctgtggtccctgcagctcatnctagtttccaccccagctctcctcgtggccatgcacgtggctcaccagcaacacatagagaagaaaatgctacggcttgagggccatggggaccccctacacctggaggagggagttagggagagagaagcaggcagataagttggagcaggggttggtcaaggccacctctgcctctagtccccaaggcctctctctgcctga

SEQ ID NO: 832 - DNA, 238 bp, Homo sapiens
  misc_feature 225: n = A,T,C or G
ccttccccgtcggcctgtactcgctcgagagcatcagcttggcggagaacacccaagatgtgcgggacgacgacatctttatcatcacctaccccaagtcaggcacgacctggatgatcgagatcatctgcttaatcctgaaggaaggggatccatcctggatccgctccgtgcccatctgggagcgggcaccctggtgtgagaccattgtgggtgccttcagcntcccggacaagta

SEQ ID NO: 833 - DNA, 289 bp, Homo sapiens
ggttttcgtgactgcaagaagggggatcccaagcacgggaagcggaaacgaggccggccccgaaagctgagcaaagagtactgggactgtctcgagggcaagaagagcaagcacgcgcccagaggcacccacctgtgggagttcatccgggacatcctcatccacccggagctcaacgagggcctcatgaagtgggagaatcggcatgaaggcgtcttcaagttcctgcgctccgaggctgtggcccaactatggggccaaaagaaaaagaacagcaacatgacctacg

SEQ ID NO: 834 - DNA, 204 bp, Homo sapiens
cagagtttcgccatggcccggggccccaagaagcacttaaagcgtgttgcagcgccgaagcattggatgcttgacaaactaacgggtgtatttgcacctcgtccatcgacaggtccccacaagctgagggaatgtcttcctctgatcgtcttcctcaggaatagactcaagtatgcgttgactggagatgaggtaaagaagata

SEQ ID NO: 835 - DNA, 258 bp, Homo sapiens
  misc_feature 174: n = A,T,C or G
tgtcaatgccacatgtgatgtcatccttgctctctggttgctgagcaaggagcctggagaccaaaggcccctgggcacctatccggatgagcacttcacagaggaggcccctcggcggagcatcgccaccttccagagccgcctggcccagatctcgaggggcatccaggagangaaccagggcctggtgctgccctacacctacctagaccctcccctcatcgagaacagcgtctccatctaaatcccaggggaaca

SEQ ID NO: 836 - DNA, 228 bp, Homo sapiens
cctgactgcttgttcgtctcactggtgtgagctccagcatcccctttgctcgaaatggaccccaactgctcttgcgccactggctgctgttcctgctgccccgtgggctgtgccaagtgtgcccagggctgcgtctgcaaaggggcatcggagaagtgcagctgctgtgcctgatgtgggaacagctcttctcccagatgtaaatagaacaacctgcacaacctggat

SEQ ID NO: 837 - DNA, 235 bp, Homo sapiens
agcagcttcaggaggttgcactatcttttgactgtgcccacacccttcacaccttgtaaatagtccctttcttaaactctccttaaattacccagtttgggggtgctatctgtttcctgctgggatcctgatggctgtgttgcccaaacctaaatgtcagtcatgcttgcagttacagctgtgttattttcctgtagtactgatttccctcttttattaaaagttctgtggtggc

SEQ ID NO: 838 - DNA, 73 bp, Homo sapiens
  misc_feature 67: n = A,T,C or G
atttatttaaaggctaaaatttgtttttttattctttgcacaattgtttcattgtttgacgacttanatgcca

SEQ ID NO: 839 - DNA, 260 bp, Homo sapiens; identical to SEQ ID NO: 302
  misc_feature 89, 91, 108, 183, 188, 246: n = A,T,C or G

SEQ ID NO: 840 - DNA, 409 bp, Homo sapiens
  misc_feature 11, 363, 386, 394: n = A,T,C or G
actgcaatganaattcagagtctttaatatgcaaatgttaagaaaaggatacagtatgccacatttcccaaacttatttgtccatagacacttctatttacagaactgtgttaatgtctcttgaaacaatggtcatagaacagtttgggttaaagctatttaaaaatgaacaggctgtcttctaaaggagtagggtcaggttcacatcaagatatctggaaaaactggttggtctggctgccgctcttatatttctgaaatgcttgtcattaaaactgaagtatataaagtttggggcacttaggagcaatttctcttacctgttaacagtaaccattatctgttaatattaacagggtgccngttaacctggaccattgttacgnatttaacnttaaccggtatgggg

SEQ ID NO: 841 - DNA, 548 bp, Homo sapiens
  misc_feature 231: n = A,T,C or G
ttttccagtccctatagaattgagagtccagagcttgactgtgaggaagggtggacacggttaaagtgtggaggaaaccaaaatgaaagagcgaaggtgtgctttgagaaggctctggaaaagaagccaaagaacccagaattcacctctggactggcaatagcaagctaccgtctggacaactggccaccatctcagaacgccattgaccctctgaggcaagccattcgnctgaatcctgacaaccagtaccttaaagtcctcctggctctgaagcttcataagatgcgtgaagaaggtgaagaggaaggtgaaggagagaagtttagttgaagaagccttggagaaagccccaggttgtaacagatgtacttcgcagtgcagccaagttttatcgaagaaaagatgagccagacaaagcgattgaactgcttaaaaaggctttagaatacataccaaacaatgcctacctgcattgccaattggggtgctgctataggcaaagtcttccaagtaatgaatcttagggagaatggaatgtatgggaa

SEQ ID NO: 842 - DNA, 601 bp, Homo sapiens
  misc_feature 518, 536, 566, 579, 582, 589: n = A,T,C or G
gcccaacctgaaaacatcccagccaagaactggtataggagctccaaggacaagaaacacgtctggctaggagaaactatcaatgctggcagccagtttgaatataatgtagaaggagtgacttccaaggaaatggctacccaacttgccttcatgcgcctgctggcaacgtatgcctctcagaacatcacctaccactgcaagaacagcattgcatacatggatgaggagactggcaacctgaaaaaggctgtcattctacagggctctaatgatgttgaacttgttgctgagggcaacagcaggttcacttacactgttcttgtagatggctgctctaaaaagacaaatgaatgggggaaagacaatcatttgaatacaaaaccaataagccatcacgcctgcccttccttgatattgcacctttggacatcggtggtgctgaccaggaattcttttgtggacattggcccagtctggtttccaattaatggactccatcttaatttaaaaagaangaatttgaaaaactttcnctttgccattcttctcctcctttttactgnagctgatcctccnttntctggantctcttgcttaa

SEQ ID NO: 843 - DNA, 443 bp, Homo sapiens
  misc_feature 215: n = A,T,C or G
atgatgccaatgtaaaatggtttaagaatggtgaagagattatccctggtccaaaatcaagataccgaattagagttgagggtaaaaaaacacatcttgatcatagagggagcaacaaaggctgatgctgcagaatattcagtaatgacaacaggaggacaatcatctgctaaacttagtgttgacttgaaacctctgaagattttgacacctcntgacctgatcagactgtaaatcttggaaaagaaatctgcctgaagtgtgaaatctctgaaaacataccaggaaaatggactaaaaatggcctacctgttcaggagagtgaccgtctaaaggtggttcacaagggaaggatccacaagttagtgatagccaatgccctcactgaagatgaaggtgattatgtattttgcacctgatgcctacaatgttactctgcctgc

SEQ ID NO: 844 - DNA, 518 bp, Homo sapiens
tagtggatcccccgggctgcaggaattcggcacgaggttgagccacggcaaaaaacccttcagtcagcacgtgagaaaactgcgagccagcattacccccgggaccattctgatcatcctcactggacgccacaggggcaagagggtggttttcctgaagcagctggctagtggcttattacttgtgactggacctctggtcctcaatcgagttcctctacgaagaacacaccagaaatttgtcattgccacttcaaccaaaatcgatatcagcaatgtaaaaatcccaaaacatcttactgatgcttacttcaagaagaagaagctgcggaagcccagacaccaggaaggtgagatcttcgacacagaaaaagagaaatatgagattacggagcagcgcaagattgatcagaaagctgtggactcacaaattttaccaaaaatcaaagctattcctcagctccagggctacctgcgatctgtgtttgctctgacgaatggaatttatcctcacaaat

SEQ ID NO: 845 - DNA, 517 bp, Homo sapiens
tggtacgcctgcaggtaccggtccggaattcccgggtcgacccacgcgtccggtgcctggttccaggaggccataggcttcattgactgggtgaagaacagcggaggccgggtgctggtgcactgccaggcgggtatctcgcgctctgccaccatctgtctggcatacctcatgcagagtcgccgtgtgcggctggacgaggcctttgacttcgttaagcagcgccggggggtcatctcccccaacttcagtttcatggggcagctgctgcagtttgagacccaggtgctgtgtcactgaggtggtgcccctctgcctgcctgccccactgtgctggcaggagctgactgtggactggtgggctcccctctgggccagcacagtcccctcacctctggcagggctgctacctcctcagagtttcagaagcccccacatgggggctctaggaatgccggcatgctggtctttccgacctggtgctcttctgctgggggactgaggctggccctcattc

SEQ ID NO: 846 - DNA, 280 bp, Homo sapiens
  misc_feature 120, 192, 255: n = A,T,C or G
gaaaataatgcacatatggtgttcaaatttgaacctttctcatggatttttgtggtgtgggccaatatggtgttcacattatataattcctgctgtggcaagtaaagcacactttttttntctcctaaaatgtttttccctgtgtatcctattatggatactggttttgttaattatgattctttattttcnctcctttttttaggatatagcagtaatgctattactgaaatgaatttcctttttctgaaatgnaatcattgatgcttgaatgatagaa

SEQ ID NO: 847 - DNA, 457 bp, Homo sapiens
  misc_feature 341, 368, 396, 432, 437: n = A,T,C or G
aaagagatgctgcagtccaggtctgaggtcccgctggcatccagctccctgctccatggccagtccctccccagcccagcagtccctccaggctacatccaggagtaagctatggggaacaggttgggaggtggccagtgctcctgccagctgtgcacacatctctgtatcccgctagagttctgtgtttttgtatcatgttgtcagggacgctagctgggtcagggttaccccatagcaggcagggacaaggaccactcataatatgcccattgggaccacagttaagatccagcctctcttcacctctttcagggctgagtgcatgagtcttgcacctncagggaaggctctgttgcagtacttancccctccgtcttgtttccttccaaggtnttggggggttggggcagtgtttaaggggcttccttnggagnccaaagggacaagcattggt

SEQ ID NO: 848 - DNA, 691 bp, Homo sapiens
ctcactatttggaatttggccctcgaggccaagaattcggcacgaggaaaattcgcaaacttgacaatggtggatactacattaccacccgggcccagtttgaaacacttcagcagcttgtacaacattactcagagaaagctgatggtttgtgttttaacttaactgtgattgcatcgagttgtaccccacaaacttctggattggctaaagatgcttgggaagttgcacgtcgttcgttgtgtctggagaagaagctgggtcaggggtgtttcgctgaagtgtggcttggtacctggaatggaaacacaaaagtagccataaagactcttaaaccaggcacaatgtcccccgaatcattccttgaggaagcgcagatcatgaagaagctgaagcacgacaagctggtccagctctatgcagtggtgtctgaggagcccatctacatcgtcaccgagtatatgaacaaaggaagtttactggatttcttaaaagatggagaaggaagagctctgaaattaccaaatcttgtggacatggcagcacaggtggctgcaggaatggcttacatcgagcgcatgaattatatccatagagatctgcgatcagcaaacattctagtggggaatggactcatatgcaagattgctgacttcggattggcccgattgatagaagacaatgagtacac

SEQ ID NO: 849 - DNA, 491 bp, Homo sapiens
tggtacgcctgcaggtaccggtccggaattcccgggtcgacccacgcgtccgtggtaattatggtcaatttaataatattttggggcatttccttacattgtcttgacaagattaaaatgtctgtgccaaaattttgtattttatttggagacttcttatcaaaagtaatgctgccaaaggaagtctaaggaattagtagtgttcccatcacttgtttggagtgtgctattctaaaagattttgatttcctggaatgacaattatattttaactttggtgggggaaagagttataggaccacagtcttcacttctgatacttgtaaattaatcttttattgcacttgttttgaccattaagctatatgtttagaaatggtcattttacggaaaaattagaaaaattctgataatagtgcagaataaatgaattaatgttttacttaatttatattgaactgtcaatgacaaataaaaattctttttgaaaa

SEQ ID NO: 850 - DNA, 483 bp, Homo sapiens
tggtacgcctgcaggtaccggtccggaattcccgggtcgacccacgcgtccggtttgttgacccatctctgacagttagagccgatatcactggaagatattcaaatcgtctctatgcttacgaacctgcagatacagctctgttgcttgacaacatgaagaaagctctcaagttgctgaagactgaattgtaaagaaaaaaaatctccaagcccttctgtctgtcaggccttgagacttgaaaccagaagaagtgtgagaagactggctagtgtggaagcatagtgaacacactgattaggttatggtttaatgttacaacaactattttttaagaaaaacaagttttagaaatttggtttcaagtgtacatgtgtgaaaacaatattgtatactaccatagtgagccatgattttctaaaaaaaaaaaataaatgtttggggggtgttctgttttctccaaaaaaaaaaaaaaaaaaaaaa

SEQ ID NO: 851 - DNA, 376 bp, Homo sapiens
tggatcccccgggctgcaggaattcggcacgagcagggccattccacagtgctcccctgcctcaccgcttcctcctcgctcttccagactcttcctgcagaggctcctttctgcctccatggctatccatccacccccacagaccccgttcctccagcctgcgtgcccctaacctggcttttcccatctccccagcataaccaaatcttactaaactcatgctaggctgggcatggtgactcacgcctgtaatcccccagcaatttgggaggcaaaggtgggagaatcgcgtgggcccgggagttccagaccaggctgggtcacatgacaaagccccatctctacaaaaaaaaaaaaaaaaacccggggggggggc

SEQ ID NO: 852 - DNA, 271 bp, Homo sapiens
  misc_feature 114: n = A,T,C or G
gacatcaccctacccaggcggtgggtctccaccacagccactttgagtctgtggtccctggagggtggcttctcctgactggcaggatgaccttagccaagatattcctctgtnccctctgctgagataaagaattcccttaacatgatataatccacccatgcaaatagctactggcccagctaccatttaccatttgcctacagaatttcattcagtctacactttggcattctctctggcgatggagtgtggctgggctgaccgcaaa

SEQ ID NO: 853 - DNA, 261 bp, Homo sapiens
  misc_feature 48, 55, 150, 169, 213, 222, 239, 257: n = A,T,C or G
cggacggtggggattaagttcaatgtatgggacaaagccggccagggngaaattnggtggacttaggagatggctattatattcaaggccagtgtgccatcataatgttgaagtaacatcgagagttacttacaagaatttgcctaactngcatagagatcttgtacgngtgtgtgaaaacatccccattgtgttgtgtggcaacaaagtggntattaaggncagggaagtgaaggcgnaatccttgtctttccccngaag

SEQ ID NO: 854 - DNA, 215 bp, Homo sapiens
  misc_feature 63, 75: n = A,T,C or G
ctttttcacaaggctagttcgaaaacatgataagttgaaaaaagaggcagttgagaggtttgntgagaaattgancctaatacttcaagaaaaatataaaaatcactggtatccagaaaaaccatcgaaaggacaggcctacagatgtattcgtgtcaataaatttcagagagttgatcctgatgtcctgaaagcctgtgaaaacagctgcatct

SEQ ID NO: 855 - DNA, 407 bp, Homo sapiens
tggtacgcctgcaggtaccggtccggaattcccgggtcgacccacgcgtccggaacttcgggatctggctgcgctatgactcccggagcggcacccacaacatgtaccgggaataccgggacctgaccaccgcaggcgctgtcacccagtgctaccgagacatgggtgcccggcaccgcgcccgagcccactccattcagatcatgaaggtggaggagatcgcggccagcaagtgccgccggccggctgtcaagcagttccacgactccaagatcaagttcccgctgccccaccgggtcctgcgccgtcagcacaagccacgcttcaccaccaagaggcccaacaccttcttctaggtgcagggccctcgtccgggtgtgccccaaataaactcaggaacgccccgg

SEQ ID NO: 856 - DNA, 286 bp, Homo sapiens
gaaacttactgccttacctaaaaggcagcgcagtcaggatattggtaggtcgggggcggctttggaaacccttaagtttacaagcatgcgcggacttgagtgctcattaggtcgccgggcgtccacgtgcagccctggaccctgaaccccggcgtgcgtgggccgtgggccctcggggaaaggttccgtgcactcggggatccgggtgaagcctgttcagccgtctgtgtcatgtggccatcttgagtctactctgtcgctcttgtgccctagcaccccgagaacc

SEQ ID NO: 857 - DNA, 321 bp, Homo sapiens
  misc_feature 28, 145, 156, 185, 251, 264, 287, 310: n = A,T,C or G
ctggctcaccccacatggccgccgcttnctgcgggcctgccaggtggcccatgaccatacagaccaggtcatcagggagcggaaggcagccctgcaggatgagaaggtgcggaagaagatccagaaccggaggcaactgggcttnctgggacaatnttctgggtgcccgggatgaagatgacaanaaacttttaagatgcagaccttcgggctgaagtggacacattcatgtttgaaggccatgacaacancaccagtggtatnttctggtttctctactgcatggncctgtaccctgagcaacagcatngttgtagagag

SEQ ID NO: 858 - DNA, 264 bp, Homo sapiens
  misc_feature 4, 45, 116, 151, 177, 184: n = A,T,C or G
ctgnacccataatggccgatacttgccggtaaactcctccctgcngacctcagactgcagcgagcgctgttcctgttcctcaagctctggcctgacatgccaggccgctggctgcncaccaggccgtgtatgtgaggtcaaggctgaagcncggaactgctgggccacccgtggtcnctgtgtnctgtctgtgggtgccaacctcaccacctttgatggggcccgtggtgccaccacctctcctggtgtctatgagctctcttc

SEQ ID NO: 859 - DNA, 199 bp, Homo sapiens
cagaggggtccatacggcgttgttctggattcccgtcgtaacttaaagggaaactttcacaatgtccggagcccttgatgtcctgcaaatgaaggaggaggatgtccttaagttccttgcagcaggaacccacttaggtggcaccaatcttgacttccagatggaacagtacatctataaaaggaaaagtgatggcatc

SEQ ID NO: 860 - DNA, 535 bp, Homo sapiens
gccagagtgatgtctggagctacgtggtgactgtttgggagttgatgacctttggatccaagccatatgacggaatccctgccagcgagatctcctccatcctggagaaaggagaacgcctccctcagccacccatatgtaccatcgatgtctacatgatcatggtcaagtgctggatgatagacgcagatagtcgcccaaagttccgtgagttgatcatcgaattctccaaaatggcccgagacccccagcgctaccttgtcattcagggggatgaaagaatgcatttgccaagtcctacagactccaacttctaccgtgccctgatggatgaagaagacatggacgacgtggtggatgccgacgagtacctcatcccacagcagggcttcttcagcagcccctccacgtcacggactcccctcctgagctctctgagtgcaaccagcaacaattccaccgtggcttgcattgatagaaatgggctgcaaagctgtcccatcaaggaagacagcttcttgcagcgatacagctc

SEQ ID NO: 861 - DNA, 683 bp, Homo sapiens
  misc_feature 8, 469, 576, 629, 639, 657, 668: n = A,T,C or G
caggtatnttttgtttagcccttcattataaatgggcaggaaattgtttatcaacctagccagtttattactagtgaccttgacttcagtatcttgagcattcttttatatttttcttttattatcctgagtctgtaactaaacaattttgtcttcaaatttttatccaatatccattgcaccacaccaaatcaagcttcttgattttcaaaaataaaaagggggaaatacttacaacttgtacatatatattcacagtttttatttataaaaaaaatttacagtacttatggagagccagcagaagacatcagagcactcacttcttcccatctttgttaaggttagcgaattacccatggacactgttaggtgaggctcattcggcagccctgaaaacaaacctggtcacactgtctttaccctctcccttcagataaagcacttcggattaatctattggatctgncccaggttttcaaggtcatgcggaatacttaaaaaggggtacaccatctgggatctggaccttgggctaatataagccatggtttcccccctattccaatggtttcntttttttggggtgaacattgggaaaccaggggggtgggctttattactgggtnaattaaaccnaatgggaatggccaggcnttaaaacaggngcctggtacccttcc

SEQ ID NO: 862 - DNA, 409 bp, Homo sapiens
tggtacgcctgcaggtaccggtccggaattcccgggtcgacccacgcgtccgaaaatgtgcaattttcatacagcatcccagtgttgatcatggaggttaatgattctttattgttagggacctatcttgtaattccagagttatttatgttttctacagttgaagaggaaaaataccgcttcttattgcctccttttcaggatttcttctggcttcttgagtagctggagtatttttgagagactcctacaggccctgcggggtggcacatgcctgtaatcctagctacttaggaggctgaggtgggagaattgcttaaacccgggaggcagaggttgcagtgagccgagatcgcatcactgcactccagcctgggcgacagagcaagactctgtctcgaaaaaaaaa

SEQ ID NO: 863 - DNA, 493 bp, Homo sapiens
tggtacgcctgcaggtaccggtccggaattcccgggtcgacccacgcgtccgattaacaccacccacaagcacaaaaaattaggatgaaaatgttcttcaagaatatggtggaataattgtagcctattgaaaattcataaatgaaaattggagtattgtagacagcattcttgaatcacatgtttgtttctgtgtgtaatactgatgactgtcttaaaatttctaacttccaaataaatcatactccactggattataagggcttcaagtgtgggggctgtctcactttcataaggccagtgtcttgcgcattgtctgaaacacagtagatgttttgataaacgtttgggccaggcttgggggcttacacctgtaatcccaacactttaggaggctgaggctggaggatggcttgtgcccaagagtttgagaccagcctgggtaacatagtgagaccctatctctacaaaaaaaaattaaaaattaaaaatt

SEQ ID NO: 864 - DNA, 264 bp, Homo sapiens
cttcttttggttttctttctctttggggcacctctggactcactccccagcatgaaggcgctgagcccggtgcgcggctgctacgaggcggtgtgctgcctgtcggaacgcagtctggccatcgcccggggccgagggaagggcccggcagctgaggagccgctgagcttgctggacgacatgaaccactgctactcccgcctgcgggaactggtacccggagtcccgagaggcactcagcttagccaggtggaaatcctacag

SEQ ID NO: 865 - DNA, 288 bp, Homo sapiens
  misc_feature 19: n = A,T,C or G
tgccggcggccctcacagnaaccagcaccagatgaaggagcattcctcttggaaatctcctgcaaagaagctgagccatgcaattagtaaatctttggggtgtgtacccacgagagaacccccgcatcctgtttttcctgagcaaccagagaaaccacttgaccttgcacatatagttcctcctcgccctctgactaatatgaatgacaccatggttagccacatgtcctctggagtgcccactcccaccaagaggttacagtatagccaggatatacccagtcactt

SEQ ID NO: 866 - DNA, 572 bp, Homo sapiens
  misc_feature 14, 15, 17, 24, 38, 341, 388, 462, 475, 481, 492, 549, 565: n = A,T,C or G
gaaagtcggctagnntntgcaaanttgtgggctgagantctcaggcaatcacactctcagaaactgcggcggctctggactgcagcctcccaaggctccatgccagacaaagcatgcgtgtcacacttgctacaatagcctggatggtttcttttgtctccaattattcacacacagcaaatattttgccagatatccgaaaatgaagatttcatcaaagactgcgttcgaatccataacaagttcccgatcagaggtgaaaccaacaagccaagtgatatgctatacatgacttgggacccagcactagcccaaattgcaaaagcatgggccagcaattnccagttttcacataatacacggctgaaagccacccccacaagctggnaccccaaactttcactttcactggggagagaacatcttgggacttgggtctgttgcccattttttctggggtcnttccggcattcanaaactnggtatgacganaatccaggactattgacttcaagactccggatatgcaaaaaatctgtggggcactanactcagggtgtttttnggcagat

SEQ ID NO: 867 - DNA, 350 bp, Homo sapiens
  misc_feature 50, 98, 125, 322: n = A,T,C or G
aaggatgaaattggaaagggctcctatggtgtcgtcaagttggcctacantgaaaatgacaatacctactatgcaatgaaggtgctgtccaaaaagangctgatccggcagccgctttccacgtngccctccaccccgaggcacccggccagctcctggaggctgcatccagcccaggggccccattggagcaggtgtaccaggaaattgccatcctcaagaagctggaccaccccaatgtggtgaagctggtggaggtcctggatgaccccaatgaggaccatctgtacatggtgttccgaactggtcaaccaagggcccntgatggaaagtgcccaccctcaaaccac

SEQ ID NO: 868 - DNA, 562 bp, Homo sapiens
acaataagaccttcctggtgtgggtcaacgaggaggaccacctgcgggtcatctccatgcagaaggggggcaacatgaaggaggtgttcacccgcttctgcaccggcctcacccagattgaaactctcttcaagtctaaggactatgagttcatgtggaaccctcacctgggctacatcctcacctgcccatccaacctgggcaccgggctgcgggcaggtgtgcatatcaagctgcccaacctgggcaagcatgagaagttctcggaggtgcttaagcggctgcgacttcagaagcgaggcacaggcggtgtggacacggctgcggtgggcggggtcttcgacgtctccaacgctgaccgcctgggcttctcagaggtggagctggtgcagatggtggtggacggagtgaagctgctcatcgagatggaacagcggctggagcagggccaggccatcgacgacctcatgcctgcccagaaatgaagcccggcccacacccgacaccagccctgctgcttcctaacttattgcctgggcagtgcccaccatgcacccctgat

SEQ ID NO: 869 - DNA, 671 bp, Homo sapiens
gaatttggccctcgaggccaagaattcggcacgaggaagaaaacaagttcctgtgtgtcttgatgtctgactggttcaacttccacggtcacatgtgcatcgcctttgagctcctgggcaagaacacctttgagttcctgaaggagaataacttccagccttaccccctaccacatgtccggcacatggcctaccagctctgccacgcccttagatttctgcatgagaatcagctgacccatacagacttgaaaccagagaacatcctgtttgtgaattctgagtttgaaaccctctacaatgagcacaagagctgtgaggagaagtcagtgaagaacaccagcatccgagtggctgactttggcagtgccacatttgaccatgagcaccacaccaccattgtggccacccgtcactatcgcccgcctgaggtgatccttgagctgggctgggcacagccctgtgacgtctggagcattggctgcattctctttgagtactaccggggcttcacactcttccagacccacgaaaaccgagagcacctggtgatgatggagaagatcctagggcccatcccatcacacatgatccaccgtaccaggaagcagaaatatttctacaaagggggcctagtttgggatgagaacagctctgacggccggtatgtg

SEQ ID NO: 870 - DNA, 573 bp, Homo sapiens
actgttgaccatgtagttttatttcatcagtactcccatttttaatggattcaggcagcaccccagagtacaggactgagttcctaggggtggcctgacccagcagctgtcttctgttccaggaggaaaaagctttttattaaaaaacagaaacgaaactttagaaaatatgaaaaatcagagggaggacagaggtcatttcataaaatcgttatttgaaaacagtgcagtgtgcaaataacactcagttgggaatcgggagaccggggactagtctaactggctcaaactagctgtgaccttaggcgtgtcattcaccacttggggatcatttcctcatctaaagcattcagcacagttaccctgtgaggcactttacaggtgcaaaatcttaaggtgcccccagtgtttgctatcaagtccattctgcggacatatttggtgtcatatcctttctgatgaacaccaggaaaagccaggaggaaatctcacgaatatatattaggctagtccagcatctcgtgccatcctgtagaagatgcctctagctgcaatgagggtggctggagaatc

SEQ ID NO: 871 - DNA, 563 bp, Homo sapiens
ccaagaattcggcacgaggtttgaggtcaagtctacagctggagacacccacttgggtggagaagattttgacaaccgaatggtcaaccattttattgctgagtttaagcgcaagcataagaaggacatcagtgagaacaagagagctgtaagacgcctccgtactgcttgtgaacgtgctaagcgtaccctctcttccagcacccaggccagtattgagatcgattctctctatgaaggaatcgacttctatacctccattacccgtgcccgatttgaagaactgaatgctgacctgttccgtggcaccctggacccagtagagaaagcccttcgagatgccaaactagacaagtcacagattcatgatattgtcctggttggtggttctactcgtatccccaagattcagaagcttctccaagacttcttcaatggaaaagaactgaataagagcatcaaccctgatgaagctgttgcttatggtgcagctgtccaggcagccatcttgtctggagacaagtctgagaatgttcaagatttgctgctcttggatgtcactc

SEQ ID NO: 872 - DNA, 503 bp, Homo sapiens; identical to SEQ ID NO: 338

SEQ ID NO: 873 - DNA, 586 bp, Homo sapiens
gatggggacgtgcagcgccacctctacctccaggacgtgatcatgcaggtggccgacgtgcctgagaagcccagggtgcccgcgtttgcctgccaggtggccggctgctgccaggtgttcgatgccctggacgactacgagcaccactaccacacgctgcacggaaatgtttgctccttttgcaagcgggccttcccttccggacacctgctggacgcccacatcctggagtggcacgattcgctcttccagatcctgtctgagaggcaggacatgtatcagtgcttggtagaaggctgcacagagaagttcaagaccagcagagaccggaaggatcacatggtgaggatgcacctgtaccccgcggacttccggtttgataagccaaagaaaagcagaagcccagcctcagcagaagccccaggggacagtggagagcggtcagaaggggaggccatggaaatctgctctgagcctgtggcagcctcccctgcaccggcaggtgagaggcggatctacagacatagaataccctctaccatctgctttggtcagggtgccgctcgaggatttaaaagcaacaaga

SEQ ID NO: 874 - DNA, 238 bp, Homo sapiens
  misc_feature 159, 227: n = A,T,C or G
agcagtgtacataatattccagtaggaaactgcttccaagtttaagcatgagctccccaaactggagaaaacatattttgctattctgagacaacaatcagaatacagactttggattccaggtcacagtttgctttttagacaaggtaaagcaaaganagccacattgtgccatcttcagctccagtggctttagcagtgactgtttgacataaaacatgtaaganttgcttgttgg

SEQ ID NO: 875 - DNA, 238 bp, Homo sapiens
  misc_feature 169, 183, 187, 188, 201, 212, 214, 215, 231, 233, 237: n = A,T,C or G
cagagactggctcccccaacagtggactgaccccggagtcaggggccgaggagcccttcctgtccaatgccagctccctgctgtccctgcacgtggacctggggccttccatcctggatgatgtcctgcagatcatggatcaggacctggacagcatgcagatccccanataggacacgaggntgcnnaggctggggtccnaggtggggccnannaaggaggtggggtgtngncccnc

SEQ ID NO: 876 - DNA, 225 bp, Homo sapiens
  misc_feature 8, 23, 28, 47, 50, 85, 108, 110, 112, 121, 122, 133, 152,157, 161, 172, 182, 190, 216: n = A,T,C or G
agcggttnctggggaggtacatntacanccgggaggagtacgcgcgnttngacagcgacgtgggggagttccgggcggtgacggngctgggcggcctgtgcggagtantngnacagccagnnggacatctggnggagaagcgggcagtgccngacanggtntgcaggcacanctaggagctngacgaggncgtgaccctgcagcggcgagttcagnctaaggtgg

SEQ ID NO: 877 - DNA, 283 bp, Homo sapiens
  misc_feature 96: n = A,T,C or G
cgacttcttttgaaatgtgaacgtccttccttgactgtctagccactccctcccagaaaaactggctctgattggaatttctggcctcctaaggcnccccaccccgaaatcagcccccagccttgtttctgatgacagtgttatcccaagaccctgccccctgccagccgaccctcctggccttcctcgttgggccgctctgatttcaggcagcaggggtgctgtgatgcggtcctgctggagtgatttatactgtgaaatgagttggcagattgtggggtgc

SEQ ID NO: 878 - DNA, 457 bp, Homo sapiens
  misc_feature 70, 358, 385, 399, 417, 423, 428, 433, 456: n = A,T,C or G
aatttgaagtagatagaaaccgacctggattactccggtctgaactcagatcacagtaggactttaatcngttgaacaaacgaacctttaatagcggctgcaccatcgggatgtcctgatccaacatcgaggtcgtaaaccctattgttgatatggactctagaataggattgcgctgttatccctagggtaacttgttccgttggtcaagttattcggatcaattgagtatagtagttcgctttgactggtgaagtctttagcatgtactgctcggaggttgggttctgctccgaggtcgccccaaccgaaatttttaatgcaggtttggtagttttagggacctgtggggttttgntagggtactgttttgcattaagtaaanttaaaggctcccanaggggtccttccccgtcnttggcnggtgntccangccccggccttctttcgcggggnt

SEQ ID NO: 879 - DNA, 567 bp, Homo sapiens
tggtacgcctgcaggtaccggtccggaattcccgggtcgacccacgcgtccggggagatgccctttgacccccaagatactcatcagtcaaggttctacttgagcaagaaaaagtgggtaatggtgcccatgatgagtttgcatcacctgactataccttacttccgggacgaggagctgtcctgcaccgtggtggagctgaagtacacaggcaatgccagcgcactcttcatcctccctgatcaagacaagatggaggaagtggaagccatgctgctcccagagaccctgaagcggtggagagactctctggagttcagagagataggtgagctctacctgccaaagttttccatctcgagggactataacctgaacgacatacttctccagctgggcattgaggaagccttcaccagcaaggctgacctgtcagggatcacaggggccaggaacctagcagtctcccaggtggtccataaagctgtgcttgatgtatttgaggagggcacagaagcatctgctgccacagcagtcaaaatcaccctcctttctgcattagtggag

SEQ ID NO: 880 - DNA, 343 bp, Homo sapiens
gaccagtatgagaagatggcagagaagaaccgcaaggatgccgaggaatggttcttcaccaagacagaggagctgaaccgcgaggtggccaccaacagcgagctggtgcagagcggcaagagcgagatctctgagctccggcgcaccatgcagaacctggagattgagctgcagtcccagctcagcatgaaagcatccctggagaacagcctggaggagaccaaaggtcgctactgcatgcagctggcccagatccaggagatgattggcagcgtggaggagcagctggcccagctccgctgcgagatggagcagcagaaccaggagtacaagatcctgctgg

SEQ ID NO: 881 - DNA, 196 bp, Homo sapiens
  misc_feature 86, 135: n = A,T,C or G
caaacttcttcgactcagattcagaaatgatctaaacacgaggaaacattattcattggaaaagtgcatggtgtgtattttagggnttatgagcttctttcaagggctaaggctgcagagatatttcctccaggnatcgtgtttcaattgtaaccaagaaatttccatttgtgcttcatgaaaaaaaacttctggt

SEQ ID NO: 882 - DNA, 148 bp, Homo sapiens
ggagatcaaaaaacatcatgccagcatcagtgagctgaaaaagaacttcatggagtctgtaccagaaccacggcctagtgaatgggataaacgcttatccactcactcacccttccgaactcttaacatcaatgggcaaatccccaca

SEQ ID NO: 883 - DNA, 507 bp, Homo sapiens
  misc_feature 28, 393, 431, 495: n = A,T,C or G
ttttttttttttttgaccagaaaaagtntttattcatcaagtctttaaagatacaaaaacacgtgtcttctgtggagctctgagaacaggactccagcaaagcacttttcagccttgtggtcttcaagcatttccaagatctttgctgcaaggagcattgtactcagcaattgcaaactcatccgtctcgtagtaatcatagactttcactatgggctggtttcagatctcttactgggacatcttgcagaaccgtgaagaacaagctcagtgtctgatttgacaccttatcaaggtaaatcaagacatgggttgctgctgacttctgtccggctcacatggttagatctttcaaggcattttcactgttgggctttcagggggaatggaagncaggaggaccatttttcacatccaaacggttcgccatnttgggagggcagaggggcttccccgttgtaaccgaacacttaggggagattttgggaagccggntttgggctttgg

SEQ ID NO: 884 - DNA, 549 bp, Homo sapiens
cggcacgaggcattaaaatagcagatttcggttttagcaatgaatttactgttggcggtaaactcgacacgttttgtggcagtcctccatacgcagcacctgagctcttccagggcaagaaatatgacgggccagaagtggatgtgtggagtctgggggtcattttatacacactagtcagtggctcacttccctttgatgggcaaaacctaaaggaactgagagagagagtattaagagggaaatacagaattcccttctacatgtctacagactgtgaaaaccttctcaaacgtttcctggtgctaaatccaattaaacgcggcactctagagcaaatcatgaaggacaggtggatcaatgcagggcatgaagaagatgaactcaaaccatttgttgaaccagagctagacatctcagaccaaaaaagaatagatattatggtgggaatgggatattcacaagaagagattcaagaatctcttagtaagatgagatacgatgagatcacagctacatatttgttattggggagaaatcttcagaggt

SEQ ID NO: 885 - DNA, 388 bp, Homo sapiens
gcaggaggtgctgtgggttggagccgtgggctgtggagggtttgtgtatgatgagaagccctgtacagtcttctcaagaaataccctgagccagtctctgagacgcttcggtaaaaaatgtccctggatggaatcaagattttaaattcaaataaagcctaatatcatgttgtgtccacattatttagtcttttttttttttttttgaaaagggattctaattttgccccccaggtggggggccaggggggtaatttaatttaatggaaacctccccctccggggttaacccctttttcttgcttaaccctccgaagtggtgggaactaagggtccccccccccttcccgggttaaattttggttttttttttaaaaaaaaagggggt

SEQ ID NO: 886 - DNA, 168 bp, Homo sapiens
  misc_feature 85, 128, 146: n = A,T,C or G
ggtaatgaaaccgtgaactttattgagaactttcaagcatcataacttgaagaagtatttctcaattcagtttatcgaaatactncagctttccagctggatctgggattatggtttcactaccaggnttccagccagcagggcanacttctccgtgtttgtcagtgt

SEQ ID NO: 887 - DNA, 580 bp, Homo sapiens
taccggtccggaattcccgggtcgacccacgcgtccggtgggagccgatgacctatgccaagagtgtgaggacatcgtccacatccttaacaagatggccaaggaggccattttccaggacacgatgaggaagttcctggagcaggagtgcaacgtcctccccttgaagctgctcatgccccagtgcaaccaagtgcttgacgactacttccccctggtcatcgactacttccagaaccagactgactcaaacggcatctgtatgcacctgggcctgtgcaaatcccggcagccagagccagagcaggagccagggatgtcagaccccctgcccaaacctctgcgggaccctctgccagaccctctgctggacaagctcgtcctccctgtgctgcccggggccctccaggcgaggcctgggcctcacacacaggatctctccgagcagcaattccccattcctctcccctattgctggctctgcagggctctgatcaagcggatccaagccatgattcccaagggtgcgctagctgtggcagtggcccaagtgtgccgcgtggtacctctggtggcgggc

SEQ ID NO: 888 - DNA, 270 bp, Homo sapiens
  misc_feature 136: n = A,T,C or G
ccctgaccatctgcttccctgagtacacaggggccaacaaatatgatgaggcagccagctacatccagagtaagtttgaggacctgaataagcgcaaagacaccaaggagatctacacgcacttcacgtgcgccanccgacaaccaagaacgtgcagttcgtgtttgacgccgtcaccgatgtcatcatcaagaacaacctgaaggactgcggcctcttctgaggggcagcggggcctggcgggatgggccaccgccgactttgtacccc

SEQ ID NO: 889 - DNA, 250 bp, Homo sapiens
  misc_feature 15, 35, 39, 50, 55, 73, 77, 89, 91, 111, 126, 162, 189, 195,210, 219, 225: n = A,T,C or G
cccattcagtggaangaagtcagctccggaagcgncganctgtccttctncaagntcaagtgtgggccgcggnccgntgtgccgcagantngcggctttgggttctgcaanggcatggtcgtccanccgcagaaccccttgaggagcgggcctgctgggggntatcagaccctcggggagaacagcaanccctanggtggcccagagcanttgatgctncacaanagccccggaagtggcaacagtggaa

SEQ ID NO: 890 - DNA, 207 bp, Homo sapiens
  misc_feature 201: n = A,T,C or G
caatctgcctcactgctgttctgggccatccccatagccatgtttacatgatttgatgtgcaatagggtggggtaggggcagggaaaggactgggccagggcaggctcgggagatagattgtctcccttgcctctggcccagcagagcctaagcactgtgctatcctggaggggctttggaccacctgaaagaccaagggnataggg

SEQ ID NO: 891 - DNA, 151 bp, Homo sapiens
  misc_feature 56, 65, 71, 87, 91, 107, 133: n = A,T,C or G
ccaccactgatgccacccaggacctcggaccttggagcctgcggggtgcctcggancctccagcnccgggncggacctcctgctggntctngcccaccaaccaagtnttacaagccccagaatgctgcccggnctgccctgctgggcggac

SEQ ID NO: 892 - DNA, 232 bp, Homo sapiens
gagatgttctcggggacccgggccatccagcactggctgaccgagagtgcccgcctcatctcccacatgggctctgtggtggagtgggtcacacccctgggcgtccccgtcatccagccgtatcgcctggactccaaggtcaagcaaataggaggtggaattcagagcatcacctacacccacaacggagacatcagccgaaagcccaacacacgtaagcagaagaacggct

SEQ ID NO: 893 - DNA, 461 bp, Homo sapiens
ccaactttctgtttcagaggcagcagcagtgagctgcaattgcagccagccctttccccagccccactcccttctatgaactcctagccttcttcgcagacagcctagcatctggctaaagggcaccttgttagcaaacacaatttctatgaacggattacccatggactgaagctgttgttgccagcggctggaggaggggactccagacatgagtgttccatgagtgatgcagatgtggagtggaggtctcaggtgaggtgctgcagagccctgggtaacagaacgagtgagacagtaaggactaaactctagagatctttgcacaccttaactagcccgaggtccgtgtgacaagtccggtatgcactgcgggggaaatgcaccccaggcagaagccggcccttccaggcgtggcatcctggggcacctgccaggatgctcacagccctctcgtccac

SEQ ID NO: 894 - DNA, 629 bp, Homo sapiens
tttttcacactacaatagttaattttatttgttcaagagctcagattgcaagcattaaaccaagcataggctttgattctgtgagcccaaattcacatattgaagaagatcaaagcaaactgtgatccatgtacatggatgaaaactaaaggctcgagttaatcacattgtagtttttaaatttctacagcctagagctcactagtcacaggtcttttaggtccttctggatgtcccacagggtatctgcacttttcttgagctgagcaacctcatcatcctttagcttctggttgataacgctggttaatccccgggcattgaggatacatggaaggctcaggaagacttcattctcaatgccatacatcccctttaccattgttgacacgggatgaatcctggatagatttttcaacatggattcaataagatcagccacacttaatccaatagcccagttggtatatccttttagcttgatgacttcataggcactttcaaccaccatcttatgcacttccttccaattttcactatcatttgcagttcccatttctggattcattcctggagagaacacctgcccattacaccatccacacagccacactgagtcgcatgtcccc

SEQ ID NO: 895 - DNA, 543 bp, Homo sapiens
tcagtgagaacaagagagctgtaagacgcctccgtactgcttgtgaacgtgctaagcgtaccctctcttccagcacccaggccagtattgagatcgattctctctatgaaggaatcgacttctatacctccattacccgtgcccgatttgaagaactgaatgctgacctgttccgtggcaccctggacccagtagagaaagcccttcgagatgccaaactagacaagtcacagattcatgatattgtcctggttggtggttctactcgtatccccaagattcagaagcttctccaagacttcttcaatggaaaagaactgaataagagcatcaaccctgatgaagctgttgcttatggtgcagctgtccaggcagccatcttgtctggagacaagtctgagaatgttcaagatttgctgctcttggatgtcactcctctttcccttggtattgaaactgctggtggagtcatgactgtcctcatcaagcgtaataccaccattcctaccaagcagacacagaccttcactacctattctgaca

SEQ ID NO: 896 - DNA, 214 bp, Homo sapiens
  misc_feature 137, 161: n = A,T,C or G
aaattttttaccatgttatattagtcttttaaccttatttatagtttttttgttataaaagttaagttttatgatgtaaacttaatctctttgattttataattcctggttttcccgacgtgcgtagaatgaccttncccacaaggtaataaaaatacctncatgattttgcttaaaacttttatgctttatattaaatctttgttacatcttg

SEQ ID NO: 897 - DNA, 273 bp, Homo sapiens
  misc_feature 25, 111, 162, 256: n = A,T,C or G
gggctccaggcagaagcacagcctncccgacctgccctacgactacggcgccctggaacctcacatcaacgcgcagatcatgcagctgcaccacagcaagcaccacgcggnctacgtgaacaacctgaacgtcaccgaggagaagtaccaggaggcgttggncaagggagatgttacagcccagatagctcttcagcctgcactgaagttcaatggtggtggtcatatcaatcatagcattttctggacaaacctnagccctaacggtggtgg

SEQ ID NO: 898 - DNA, 277 bp, Homo sapiens; identical to SEQ ID NO: 304
  misc_feature 66, 88, 99, 102, 103, 139, 144, 181, 196, 208, 255, 277: n = A,T,C or G

SEQ ID NO: 899 - DNA, 701 bp, Homo sapiens
gactcactatttggaatttggccctcgaggccaagaattcggcacgaggacgaaccccaggctccctctgctgaggtggagatgacatcctatgtgctcctcgcttatctcacggcccagccagccccaacctcggaggacctgacctctgcaaccaacatcgtgaagtggatcacgaagcagcagaatgcccagggcggtttctcctccacccaggacacagtggtggctctccatgctctgtccaaatatggagcagccacatttaccaggactgggaaggctgcacaggtgactatccagtcttcagggacattttccagcaaattccaagtggacaacaacaaccgcctgttactgcagcaggtctcattgccagagctgcctggggaatacagcatgaaagtgacaggagaaggatgtgtctacctccagacatccttgaaatacaatattctcccagaaaaggaagagttcccctttgctttaggagtgcagactctgcctcaaacttgtgatgaacccaaagcccacaccagcttccaaatctccctaagtgtcagttacacagggagccgctctgcctccaacatggcgatcgttgatgtgaagatggtctctggcttcattcccctgaagccaacagtgaaaatgcttgaaagatctaaccatgtgagccggacagaagtcagcagcaacca

SEQ ID NO: 900 - DNA, 235 bp, Homo sapiens
ttcggtacgaggaaggagaaggacaaagaaaacaagttcctgtgtgtcttgatgtctgactggttcaacttccacggtcacatgtgcatcgcctttgagctcctgggcaagaacacctttgagttcctgaaggagaataacttccagccttaccccctaccacatgtccggcacatggcctaccagctctgccacgcccttagatttctgcatgagaatcagctgacccatacag

SEQ ID NO: 901 - DNA, 459 bp, Homo sapiens
tggtacgcctgcaggtaccggtccggaattcccgggtcgacccacgcgtccgatgaaatataatgtttcagattgcaaggtaatatgtaatagtagtgtttgtaagatactcttgtctaatattaactagtagtattttgatttgtacagtcataatttgttaaaatgacttcatttaacattcactgatgtagattaataatgtaagttctgatttaaagaatggtgggaaaatggtgcatgtaatacttttgcaagtgttggggagatcggtatgttttgaaaagagtaatttaacttttgggtgccaggaaatgggttttctcaaagtccattgccggcaatgggcaggcctgcaaatactggcacagagcattaatcatacaccttattaacggtgaggtgaataactttgaaataaagttttagagaaatgtttcagataaaaaaaaaaaaaag

SEQ ID NO: 902 - DNA, 617 bp, Homo sapiens
aagctcggaattcggctcgagagccagtacaagctatttccaaccagatttgctagaggaaggcgaattacttgtgttgtaaaacatccagccttggaaaaggacatccgatactctttcatattagacatacagtatgctcctgaagtttcggtaacaggatatgatggaaattggtttgtaggaagaaaaggtgttaatctcaaatgtaatgctgatgcaaatccaccacccttcaaatctgtgtggagcaggttggatggacaatggcctgatggtttattggcttcagacaatactcttcattttgtccatccattgactttcaattattctggtgtttatatctgtaaagtgaccaattcccttggtcaaagaagtgaccaaaaagtcatctacatttcagatcctcctactactaccacccttcagcctacaattcagtggcatccctcaactgctgacatcgaggatctagcaacagaacctaaaaaattgcccttcccattgtcaactttggcaacaattaaggatgacacaattgccacgatcattgctagtgtagtgggtggggctcttcatagtacttgtaaagtgttttggctggaatattctgc

SEQ ID NO: 903 - DNA, 203 bp, Homo sapiens
aatgaaggctaaatcacgttctaggtctgcatctcacaccaaaactagaggcacctctaaaacagattccaaaacacattataagtctggctcaagatatgaaaaggaatcaaggaaaaaagaaccacctagatccaaatctcagtcaagatcacagtctaggtctaggtcaaaatctagatcaaggtcttggactagtccta

SEQ ID NO: 904 - DNA, 253 bp, Homo sapiens
  misc_feature 15, 63, 88, 89, 90, 91, 92, 93, 94, 95, 96, 97, 98, 99, 100,101, 102, 103, 104, 105: n = A,T,C or G
tgcaaattgtgactnttaccatgaggcccactgacagacaccctgtagggattgtgtcaggtnctcactaagtgacacagggttggcnnnnnnnnnnnnnnnnnngtcagttcacattttgagagcagttggtgtaggtgcacttgattttagaacgatgagtttaaaacatttgtgaaaacctctttccattcagaaaggtggaaaaagtttcctaaaataaaccattttgataaagcagcaaaatgctgca

SEQ ID NO: 905 - DNA, 272 bp, Homo sapiens
aaatgtttctgtttgaagaaaatagagggagaaacagaagtcttaagtctgtggcacactgtgtcttcagacagtttgaaggaatgaaaacctagagattttaaatcatgaattgaacatgtaaaattccagtaaaatgtaaaaacggaatatgcatcgctcttaaccttgagcatagtgacttagagacactgtgtatcagttttgccaataagactgtggacttcatgattgttgttgaacttctgggtcaaaactcaaatgaggtgaat

SEQ ID NO: 906 - DNA, 286 bp, Homo sapiens
  misc_feature 247: n = A,T,C or G
aggtaatgttgcctggggcttaacccacctgccctttgggcaaggttgggacaaagccatctgggcagtcaggggcaaggactgttggaggagagttagcccaagtataggctctgcccagatgccatcacatccctgatactgtgtatgctttgaagcaccttccctgagaagggaagaggggatctttggactaggttcttggctccagacctggaatccacaaaagccaaaccagcttcatttnaaccaaaggagctccgatgtaaggggcaaggctgcccct

SEQ ID NO: 907 - DNA, 243 bp, Homo sapiens
  misc_feature 15, 26, 55, 68, 97, 102, 132, 136, 156, 169, 192, 205, 226: n = A,T,C or G
gcagtttcgtggctncctgggacagnctgagcttagctcagcgccggggctttancaaggacctacantgttggctgtgaggaatgcacagtgtttncctgnttattcattccctgcaaactgcagagtggnactnaatgcttgtggacggaccanttcttcaaggctntgaaaagggctttcagttccgtnaacttgctgcctnccttgggaggcaaggctttgnaactgggaaatcctgaa

SEQ ID NO: 908 - DNA, 256 bp, Homo sapiens; identical to SEQ ID NO: 58

SEQ ID NO: 909 - DNA, 386 bp, Homo sapiens
tagtggatcccccgggctgcaggaattcggcacgagttatggtgcagacatggccaagtccaagaaccacaccacacacaaccagtcccgaaaatggcacagaaatggtatcaagaaaccccgatcacaaagatacgaatctcttaagggggtggaccccaagttcctgaggaacatgcgctttgccaagaagcacaacaaaaagggcctaaagaagatgcaggccaacaatgccaaggccatgagtgcacgtgccgaggctatcaaggccctcgtaaagcccaaggaggttaagcccaagatcccaaagggtgtcagccgcaagctcgatcgacttgcctacattgcccaccccaagcttgggaagcgtgctcgtgcccgtattg

SEQ ID NO: 910 - DNA, 232 bp, Homo sapiens
gaagctgctggggtctctggccctgcaggaagaggaagaggaggcgagcacgggccccaggtgcccctgagccagcctccagaggatgagctggataggctgacgaagaagctggttcacaacatgaaccacccgcccagcggggagtactttggccagtgtggtggctgcggagaagatgtggttggggatggggctggggttgtggcccttgatcgcgtctttcacgtgg

SEQ ID NO: 911 - DNA, 155 bp, Homo sapiens
gcccagccaagcactgtcaggaatcctgtgaagcactccagctatgtgtgaagaagaggacagcactgccttggtgtgtgacaatggctctgggctctgtaagccggctttgctggggacgatgctcccagggctgttttcccatccattgtggg

SEQ ID NO: 912 - DNA, 435 bp, Homo sapiens
  misc_feature 65, 73, 382, 430: n = A,T,C or G
tttttttttttttttttttactgcaggatatctcagagtctttaatatgcaaatgttaagaaaanggatacangtatgccacatttcccaaatttatttgtccatagacacttctatttacagaactgtgttaatgtctcttgaaacaatggtcatagaacagtttgggttaaagctatttaaaaatgaacaggctgtcttctaaaggagtagggtcaggttcacatcaagatatctggaaaaactggttggtctggctgccgctcttatatttctgagatgcttgtcattaaaactgaagtatataaagtttggggcacttaggagcaatttctcttaccctgttaacaggtaaccattatctgttaatatttaacagggngccctggttaaccatggaaccattgttacggggatttaaccattaacnggtat

SEQ ID NO: 913 - DNA, 491 bp, Homo sapiens; identical to SEQ ID NO: 498
  misc_feature 24, 162, 165, 189, 192, 364, 423, 467: n = A,T,C or G

SEQ ID NO: 914 - DNA, 657 bp, Homo sapiens
ttttttttttagtgtcctctaattttattgatgcttcagttttcataaagtgcaataaacaacataaatagatgaaaaaagctttgaagatttatatacagttttgaggttaagataaattactgactatattcctttcagccttttaactctgtgaaagctgtaacgtacattaaaagcacattgaactaggttaaataatgatctttcccccttagatcaatctagtattaaggagtatataattatgcaagttcattctataacacgaggctagactaaaaggacaatttttgtgctacagactaaatccagatacggtcaggtgctgagcagtattcctggcttcaaaataggaggtatctgtttcatcatctggctgcgcgggatgaaaggcatagtctgatgctgcagattttcccagtccacatcactgaagagaggatgacgttttagctctttcattccagctctctttgtatcatcaatggttaaaagtatttctactgcactttgaggcattatcagataacttttcttcaccttctggccagggatatctcttttcagaatattctggaatacttgttgtggtgtttcatcattgaaagggggaattcctgttagaaattccaaccagcaaacttccagtggcca

SEQ ID NO: 915 - DNA, 532 bp, Homo sapiens
atttctctttagttctttgcaagaaggtagagataaagacactttttcaaaaatggcaatggtatcagaattcctcaagcaggcctggtttattgaaaatgaagagcaggaatatgttcaaactgtgaagtcatccaaaggtggtcccggatcagcggtgagcccctatcctaccttcaatccatcctcggatgtcgctgccttgcataaggccataatggttaaaggtgtggatgaagcaaccatcattgacattctaactaagcgaaacaatgcacagcgtcaacagatcaaagcagcatatctccaggaaacaggaaagcccctggatgaaacactgaagaaagcccttacaggtcaccttgaggaggttgttttagctctgctaaaaactccagcgcaatttgatgctgatgaacttcgtgctgccatgaagggccttggaactgatgaagatactctaattgagattttggcatcaagaactaacaaagaaatcagagacattaacagggtctacagagaggaactg

SEQ ID NO: 916 - DNA, 236 bp, Homo sapiens
  misc_feature 96: n = A,T,C or G
gtggctcaggtccccctgggcccggagtgctcgagagctgtcatgaagctggtctactgtgctcactgcctgggagtccccggcgccaggccctgncctgactattgccgaaatgtgctcaagggctgccttgccaaccagtccgacctggacgccgagtggaggaacctcctggactccatggtgctcatcaccgacaagttctggggtacatcgggtgtggagagtgtcatcgg

SEQ ID NO: 917 - DNA, 210 bp, Homo sapiens
  misc_feature 110, 178: n = A,T,C or G
attccggccctgatggtcacggcggagaaggacttcgtgctcgttcctcagatgtcccagcacatggaggactggattccccacctgaaaaggggacacattgaggactntgggcactggacacagatggacaagccaaccgaggtgaatcagatcctcattaagtggctggattctnatgcccggaacccaccggtggtctcaaagatc

SEQ ID NO: 918 - DNA, 84 bp, Homo sapiens
  misc_feature 4, 8, 21, 23, 25, 36, 48, 51, 75, 81: n = A,T,C or G
ctgnaggntacggcaagatanangnagtaaagcagntagatatgcggnccntccgctagttcacctaccgaggcntagacntcg

SEQ ID NO: 919 - DNA, 209 bp, Homo sapiens
catgagtatgctcaggcttcagaagaggctcgcctctagtgtcctccgctgtggcaagaagaaggtctggttagaccccaatgagaccaatgaaatcgccaatgccaactcccgtcagcagatccggaagctcatcaaagatgggctgatcatccgcaagcctgtgacggtccattcccgggctcgatgccggaaaaacaccttggccc

SEQ ID NO: 920 - DNA, 533 bp, Homo sapiens
gcaatgtatgggacacagccggccaggagaaattcggtggactgagagatggctattatatccaagcccagtgtgccatcataatgtttgatgtaacatcgagagttacttacaagaatgtgcctaactggcatagagatctggtacgagtgtgtgaaaacatccccattgtgttgtgtggcaacaaagtggatattaaggacaggaaagtgaaggcgaaatccattgtcttccaccgaaagaagaatcttcagtactacgacatttctgccaaaagtaactacaactttgaaaagcccttcctctggcttgctaggaagctcattggagaccctaacttggaatttgttgccatgcctgctctcgccccaccagaagttgtcatggacccagctttggcagcacagtatgagcacgacttagaggttgctcagacaactgctctcccggatgaggatgatgacctgtgagaatgaagctggagcccagcgtcagaagtctagttttataggcagctgtcctgtgatgtcagc

SEQ ID NO: 921 - DNA, 491 bp, Homo sapiens
ggcggaggcggcggcggcccggcagccaacatggcggcggcggcggcggcgggcgcgggcccggagatggtccgcgggcaggtgttcgacgtggggccgtgctacaccaacctctcgtacatcggcgagggcgcctacggcatggtgtgctctgcttatgataatgtcaacaaagttcgagtagctatcaagaaaatcagcccctttgagcaccagacctactgccagagaaccctgagggagataaaaatcttactgcgcttcagacatgagaacatcattggaatcaatgacattattcgagcaccaaccatcgagcaaatgaaagatgtatatatagtacaggacctcatggaaacagatctttacaagctcttgaagacacaacacctcagcaatgaccatatctgctattttctctaccagatcctcagagggttaaaatatatccattcagctaacgttctgcaccgtgacctcagccttccaac

SEQ ID NO: 922 - DNA, 277 bp, Homo sapiens
  misc_feature 166, 276: n = A,T,C or G
gctgcttcctcctcctcggcctcaccattccagaccaaaattgaaaaaatggttgacctcacccaggtaatggatgatgaagtattcatggcttttgcatcctatgcaacaattattctttcaaaaatgatgcttatgagtactgcaactgcattctatagattgncaagaaaggtttttgccaatccagaagactgtgtagcatttggcaaaggagaaaatgccaagaagtatcttcgaacagatgacagagtagaacgtgtacgcagagccccnc

SEQ ID NO: 923 - DNA, 368 bp, Homo sapiens
  misc_feature 107: n = A,T,C or G
aatgaaggtgctgtccaaaaagaagctgatccggcagccgcttttccacgtcgccctccaccccgaggcacccggccagctcctggaggctgcatccagcccagggncccattgagcaggtgtaccaggaaattgccatcctcaagaagctggaccaccccaatgtggtgaagctggtggaggtcctggatgaccccaatgaggaccatctgtacatggtgttcgaactggtcaaccaagggcccgtgatggaagtgcccaccctcaaaccactctctgaagaccaggcccgtttctacttccaggatctgatcaaaggcatcgagtacttacactaccagaagatcatccaccgtgacatcaaacct

SEQ ID NO: 924 - DNA, 497 bp, Homo sapiens
ttggccctcgaggccaagaattcggcacgagggaaaggagccaatttatgaaattaaataaagtccacatagggagtgagaaattgtggctcacgcaccccaccctggctgggcccagcactgctggagcacagcgcaccaggcacccccactgtctcacccgtctcaagagggggcttaaataggccatgccccatcctggaggccgggggtcccggggcctagggcggacagaagtcggagaagtaggggtgctgcagggcctcttctgctgagatacgctggacagggttacacttcagaaggttctgcagcagatccctccctgtggcattgagtttgggcacgacgttcaccagggatgttgtggccgggtacatcggatagggcttatagtctggcagcttggtcatagagggccactgctcctcggtgggcgtccccagcagtcggaagatcctcttcaactggtcatcgacatcattgccgggaaaaag

SEQ ID NO: 925 - DNA, 236 bp, Homo sapiens
tattactaaaggtttatttacatagtgtttaaagcataataaaaaataaattacaatacaaaagtgctctttaggaaggagacactaaacaacaggcccatattaccccttgactatttagccaagacataagctacaaattttgccggaaaaactgtccatacatttttaactacttcttcattattcttatggaccatcatccaggacatctgtttgaagaaatatccagttat

SEQ ID NO: 926 - DNA, 232 bp, Homo sapiens
gaaggaacagatttaatatctaggggctgggtatccccacatcactcatttggggggtcaagggacccgggcaatatagtattctgctcagtgtctggagatcatctacccaggctggggcttctgggacaggcgaggacccacggaccctggaagagctggtccaggggactgaactcccggcatctttacagagcagagcatgatcacattcctgccgctgctgctgggg

SEQ ID NO: 927 - DNA, 177 bp, Homo sapiens
  misc_feature 111, 112: n = A,T,C or G
ggagcgagtgggggccggcgcgcccgtctacatggctgcggtcctcgagtatctgaccgccgagatcctggagctggcgggcaacgcggctcgggacaacaagaagacgcnnatcatccctcgtcacctccagctggccatccgcaacgacgaggaactgaacaagctgctgggcaa

SEQ ID NO: 928 - DNA, 255 bp, Homo sapiens
  misc_feature 6: n = A,T,C or G
cttggnaactgttttgaaagataacacagagggaaagggagagccacctggtacttgtccaccctgcctcctctgttctgaaattccatccccctcagcttaggggaatgcacctttttccctttccttctcacttttgcatgtttttactgatcattcgatatgctaaccgttctcagccctgagccttggagaggagggctgtaacgccttcagtcagtctctggggatgaaactcttaaatgctttgtatat

SEQ ID NO: 929 - DNA, 360 bp, Homo sapiens
  misc_feature 4, 33, 149, 150, 189, 191, 194, 237, 281, 289, 303, 319,321, 330, 343: n = A,T,C or G
gcantgctgaacaccaagaagggccctccaggncagtggtacagccatgatgagctggccagatgacgtccctcctgaaggctggaaccgcacccgccatgtcatcatcctcatgactgatgggattgcacaacatggcggggacccanntactgtcattttttgatccgggacttgctatacattggnanggntcgcaaaaacccaagggaggattatctggatgtctatgtgttnggggtcgggcctttggtgaaccaagtgaacatcaatgctttggnttccaagnaagacagtgagcancatgtgttcaaaagtnangggtatggnaaacctgggaagntgttttaccaaatgatc

SEQ ID NO: 930 - DNA, 577 bp, Homo sapiens
ctgaagcctgtgattggtggagtttgggtgctgtcctctttgaacttctcactggcaagactctggttgaatgccatccagcaggaataaatactcacactactttgaacatgccagaatgtgtctctgaagaggctcgctcactcattcaacagctcttgcagttcaatcctctggaacgacttggtgctggagttgctggtgttgaagatatcaaatctcatccattttttacccctgtggattgggcagaactgatgagatgaacgtaatgcagggttatcttcacacattctgatcttctctgtgacaggcatctccagcactgaggcacctctgactcacagttacttatggagcaccaaagcatttggataaagaccgttataggaaatgggggggaaatggctaaaagagaacaattcgtttacaattacaagatattagctaattgtgccaggggctgttatatacatatatacacaaccaaggtgtgatctgaatttaatccacatttggtgttgcagatgagttgtaaagccaactgaaagagttccttcaagaagttcctctgata

SEQ ID NO: 931 - DNA, 491 bp, Homo sapiens
  misc_feature 5, 116, 140, 147, 157, 158, 184, 187, 190, 206, 423, 446,463, 486: n = A,T,C or G
ccagntgggtggtgagatcaatgtggagatggacgctgccccaggcgtggacctgagccgcatcctcaacgagatgcgtgaccagtatgagaagatggcagagaagaaccgcaagnttgcccgaggattggtttcttcancaagacnagaggaactnnaccgcgagttggccaccaacagttanctngtncagagtggcaagagtnagatctcggagctccggcgcaccatgcaggccttggagatagagctgcagtcccagctcagcatgaaagcatccctggagggcaacctggcggagacagagaaccgctactgcttgcagcttgtcccagatccaggggctgatttggcagcgtggaggagcagcttggcccagcttcgctgcgagattggagcagcagaaccagggattacaaaatncctgctggaatgttgaagacgcngctggagcaggagattnccacctaccgccgcctgcttganggaga

SEQ ID NO: 932 - DNA, 88 bp, Homo sapiens
  misc_feature 61: n = A,T,C or G
cctgtcagccatccgagaacttgcccgggaagtcgatcctgcttatatcaagattgaggangtcattgggacaggctcttttggagaa

SEQ ID NO: 933 - DNA, 346 bp, Homo sapiens
  misc_feature 38, 41, 48, 333: n = A,T,C or G
gaagatgatgaagatgatgatgatgaagatgatgaggnggnggaagangaggaggaggaagagcctgtcaaagaagcacctggaaaacgaaagaaggaaatggccaaacagaaagcagctcctgaagccaagaaacagaaagtggaaggcacagaacccgactacggctttcaatctctttgttggaaaccctaaactttaacaaatctgctcctgaattaaaaactggtatcagccgatgtttttgctaaaaatgatcttgcctgttgtggatgtcagaattggtatgactaggaaatttgggtttatgtggatttttggaatcctgcctgnaagaccctggaag

SEQ ID NO: 934 - DNA, 466 bp, Homo sapiens
  misc_feature 466: n = A,T,C or G
tcctgcgcggttgttctctggagcagcgttcttttatctccgtccgccttctctcctacctaagtgcgtgccgcacccgatggaagattcgatggacatggacatgagccccctgaggccccagaactatcttttcggttgtgaactaaaggccgacaaagattatcactttaaggtggataatgatgaaaatgagcaccagttatctttaagaacggtcagtttaggggctggtgcaaaggatgagttgcacattgttgaagcagaggcaatgaattacgaaggcagtccaattaaagtaacactggcaactttgaaaatgtctgtacagccaacggtttcccttgggggctttgaaataacaccaccagtggtcttaaggttgaagtgtggttcagggccagtgcatattagtggacagcacttagtagctgtggaggaagatgcagagtcagaagattgaagn

SEQ ID NO: 935 - DNA, 518 bp, Homo sapiens
tggtacgcctgcaggtaccggtccggaattcccgggtcgacccacgcgtccggaggtattttaccagctggagggagacatggttctccgagtcctggagcaagggaaacaccgggatgtggtcattcggcagggagagatattcctcctgcctgccagggtgccccactcaccacagaggtttgccaacaccgtggggctggtggttgagcgaaggcggctggagaccgagctagatgggctcaggtactatgtgggcgacaccatggacgttctgtttgagaagtggttctactgcaaggacctcggcacgcagttggcccccatcatccaggagttcttcagctctgagcagtacagaacaggaaagcccatccctgaccagctgctcaaggagccaccattccctctgagcacacgatccatcatggagcccatgtccctggatgcctggctggacagccaccacagggagctgcaggcaggcacaccactcagcctgtttggggacacctatg

SEQ ID NO: 936 - DNA, 316 bp, Homo sapiens
  misc_feature 17, 33, 53, 60, 160, 195, 232, 237, 263, 285, 312, 313: n = A,T,C or G
gtggcctttgaccatgnagacccatccattttnacagtattgactgctaagtntgtccgncctggagtggccattgctgattttgtcatcttcccacctcgatggggggttgctgataagaccttcagggctccttattaccataggaactgcatgagtngggttaatggggcttatccgaggtcactatgaggnaaagcaaggtgggttctgccagggggagggagtctanacagnacaatgaccccccatggacctgatgntgactgctttgagaagggcagnaaggtcaagctggcaactgagaggttnncgt

SEQ ID NO: 937 - DNA, 275 bp, Homo sapiens
  misc_feature 52, 80: n = A,T,C or G
gacccagctgctcaactcgctctgcacagcagtcaaagccatctcttcggcngtgcgcaaggcgggcatcgcgcacctcnatggcattgctggttctaccaacgtgacaggtgatcaagttaagaagctggacgtcctctccaacgacctggttatgaacatgttaaagtcatcctttgccacgtgtgttctcgtgtcagaagaagataaacacgccatcatagtggaaccggagaaaaggggtaaatatgtggtctgttttgatccccttgatg

SEQ ID NO: 938 - DNA, 496 bp, Homo sapiens
ccattcaaaggacttttcattttgattaacaggactagcttatcatgagagccctcaggggaaagggtttaagaaaaacaactcctctttcccatagtcagagttgaatttgtcaggcacgcctgaaatgtgctcatagccaaaacattttactctctcctcctagaatgctgcccttgacatttcccattgctgtatgttatttcttgctctgttatcttttgccctcttagaatgtccctctcttgggacttgcttagatgatgggatatgaatattattagacagtaattttgctttccatccagtatgctagttcttattcgagaactatggtcagaggcgtatttggatatgagtatcctttgcttatctttgtagtactgaaaatttgccgaagtaactggctgtgcagaatgtaatagaagcttttcttattcttttattcttaagatcagtatctttttacagtattctttctacatgatcctttttt

SEQ ID NO: 939 - DNA, 622 bp, Homo sapiens
tgaaatatcatgtttatttggtggggatggtacagccagagtctaatgctattcctgaaggttacttctcagattagggaacctgggaatttgaagcgctacgaggccagccctggggcaagaactggaagggtttataggccccctgaataaaggcaatggcacttgatcctcaacaccagacatctaaggtacaactggaaatgactcattttggacagaaagggtttagagtaaagagctggactaaccaggagagaagtctagttggttccctacaggtgcactggaaacactgccatcagggaccttctgggatctggggagcactgctgccaattattaacagcattcagtgccagtagagacctatcctgcctagacaccactgcatcgctggtaatctatctatgacccactgtcagttggtactgatgtcctgccagaaagctcatcaacagtagactagattctcagaaacgagaggattctgaaggtatgcacccgatgccagttgctgcctgagtctcgcgttttagtgaatcatgcagatgcagttaattatgggtagccatcgctctgatccttgtggtgtgttgagtgttaaaacaccagattatct

SEQ ID NO: 940 - DNA, 254 bp, Homo sapiens
tggatcccccgggctgcaggaattcggcacgagccggaacagagtcctcagggaaggccagtggggacaagacagaaaaagtcaccatctatcaacaccatcgacgtttgagtgaagaaaccacccataagagagatgcactaacaactggggatagggatggggtcagggggagcccaagatggtgatctgcccgagactcccagagggtattgccactcccacaatctcaggcctggtacccatcctctttc

SEQ ID NO: 941 - DNA, 254 bp, Homo sapiens
  misc_feature 10, 15, 250: n = A,T,C or G
cttctgtctnacctngttagaaaattcctcccagtcaggggtcgtccagtgcaggacgggggacccaagggtctcaagcctgcaagtccagaaggtgacaaacccaggagcactgggagttaagctttccttggggagggaagagccttgatgtccagcacacagcctggctataaagacacgaagcgacctacccactgtacagtccacttcacaggatcagctgaatcatgacctttaaaagttccgngttg

SEQ ID NO: 942 - DNA, 106 bp, Homo sapiens
cctccaccccctcgtctctagtggacatttgagatcagagagcaccacagggctggctttgtgccctaacccctgggatgcagcctgcctttccataaagtcacct

SEQ ID NO: 943 - DNA, 297 bp, Homo sapiens; identical to SEQ ID NO: 122
  misc_feature 261: n = A,T,C or G

SEQ ID NO: 944 - DNA, 266 bp, Homo sapiens
  misc_feature 25, 37, 169, 186, 225, 244, 252, 264: n = A,T,C or G
tcacttcatgactgttgctacaaangtctggagaaangtgggatgtggcaacaaatttctgagctacaagtttagcaactcggggagcagagtcacctgtgcaaaacagggcttctgcagaagtcaactgtgtgagtgtgataaggctgctgccacctgttttgctagnaacaagacggcctacantaaaaattccttggccatgcagaaagcatccctcacccntcctagaggccaggcaggngccttctntacccacccagngt

SEQ ID NO: 945 - DNA, 402 bp, Homo sapiens
tggatcccccgggctgcaggaattcggcacgaggtttcaccacattggtcaggctggtcttgaaatgctggcgtcaagtgatctgcctgcctccgcctcacaaagcactgggattacaggcatgaatctggccttacgtaatatattttcttaatggctgcataatatcacatcaaataggcatttttcaaacctctttccttattaaacatgtagactatatccattttttactaaaataaataacatttcagataatatctttgcactgataatgttgccaagccatttctaaagtgaccttatcaatttaattaccattggatgagggtgttgctttcatcgcaccattgtagattgtcttttttatttcaatttgcgtttatttataactggttgcaa

SEQ ID NO: 946 - DNA, 465 bp, Homo sapiens
tggtacgcctgcaggtaccggtccggaattcccgggtcgacccacgcgtccgccacaatacacaagatataatccatttttatatatcccaaagttgtggcaacagcttctttcttttctgctcaatgccactttgtttcctagtaattcatgaccactattaattctatcattgtcactgctcctgcttaagatcacttctcaaggatacctcagtaagcaatggataaatcaactttttgttatatgtgccaagtactaagtttcagggttctcttcagcaatcattaattaatacttcagccattaattcagatgcaaataattttcttttttcttttttttgagatggagtttcactcttgttgcccaggctggagtgcaatggcgtgatctcagctcaccgcaacctccgcctcccaggatcacttgcacctgggaagtggaggttatagtgagctgtga

SEQ ID NO: 947 - DNA, 263 bp, Homo sapiens
  misc_feature 129, 182, 220, 234: n = A,T,C or G
gcttatcagaaggcacctactaaggagttttatgcgtaaaactccaacttagtgtctctatttatgagatcactgaacttttcaaaataaagcttttgcatagaataatgaagatctttgttttttggnttcattaaagagccattctggcactttaatgataaaatcccattgtatttaanacatttcatgtatttctttagaacaacataaaattaanatttaacatctgcngtgttctgtgaatagcagtggcaaaatat

SEQ ID NO: 948 - DNA, 277 bp, Homo sapiens
  misc_feature 79: n = A,T,C or G
ggatcgtttgacgggacttcaggttctttctgaaatcgccgtgttactgttgcactgatgtccggagagacagtgacancctccgtcagactcccgcgtgaagatgtcacaagggattggcaattgtccccagggacaaaacactgtgtcccccccagtgcagggaaccgtgataagcctttctggtttcggagcacgtaaatgcgtccctgtacagatagtggggattttttgttatgtttgcactttgtatattggttgaaactgttatcactta

SEQ ID NO: 949 - DNA, 243 bp, Homo sapiens
cctcttccacccctgccaggcccagcagccaccacagcgcctgcttcctcggccctgaaatcatgcccctaggtctcctgtggctgggcctagccctgttgggggctctgcatgcccaggcccaggactccacctcagacctgatcccagccccacctctgagcaaggtccctctgcagcagaacttccaggacaaccaattccaggggaagtggtatgtggtaggcctggcagggaatgcaa

SEQ ID NO: 950 - DNA, 650 bp, Homo sapiens
  misc_feature 637: n = A,T,C or G
aagataacattaaacagctgaaagagatgaaatttacttatcttattaattatatccaagatgagatcaacacaatcttcaatgattatatcccatatgtttttaaattgttgaaagaaaacctatgccttaatcttcataagttcaatgaatttattcaaaacgagcttcaggaagcttctcaagagttacagcagatccatcaatacattatggcccttcgtgaagaatattttgatccaagtatagttggctggacagtgaaatattatgaacttgaagaaaagatagtcagtctgatcaagaacctgttagttgctcttaaggacttccattctgaatatattgtcagtgcctctaactttacttcccaactctcaagtcaagttgagcaatttctgcacagaaatattcaggaatatcttagcatccttaccgatccagatggaaaagggaaagagaagattgcagagctttctgccactgctcaggaaataattaaaagccaggccattgcgacgaagaaaataatttctgattaccaccagcaggttagatataactgcaggattttcagaccactctctgatactatggaaaatttattgctgatcccaaagatggatgacctgtccgntcaactaccacac

SEQ ID NO: 951 - DNA, 499 bp, Homo sapiens
tttttttttaatctttcaatcttttatttaaatgccatgatccaggatggattttagatcttgttgaaagcagccacatccatggactgcacatagtcctcaaaagcagtgatctgctcctccagcatatctgttccaactttatcatcttcaactacacactgtatttgaagtttcttaattccgtatcccactggaactagtttagatgagccccagactaagccgtctgcttgaatgcttctgacgcactcctctaatttcgccatatctgtctcatcatcccaaggtttcacatctagtaagatgggagacttgggaacaagtgcagggtttttggctttccttgattcaaattgtggcagacgttcttcccttagcctccttggctcttcaatttccaccgcatcatcaggtccaagagggcaatgtactcatcatctttactatctggagctccaattccgtaatggtctttccaatcggaaggaccatattt

SEQ ID NO: 952 - DNA, 546 bp, Homo sapiens
ctttatcttcactgaaccactcactctgtgtaaaggccaacagatttttaatgtggttttcatatcaaaagatcatgttgggattaacttgcctttttccccaaaaaataaactctcaggcaagcatttctttaaagctattaagggagtatatacttgagtacttattgaaatggacagtaataagcaaatgttcttataatgctacctgatttctatgaaatgtgtttgacaagccaaaattctaggatgtagaaatctggaaagttcatttcctgggattcacttctccagggattttttaaagttaatttgggaaattaacagcagttcactttattgtgagtctttgccacatttgactgaattgagctgtcatttgtacatttaaagcagctgttttggggtctgtgagagtacatgtattatatacaagcacaacagggcttgcactaaagaattgtcattgtaataacactacttggtagcctaacttcatatatgtattcttaattgcacaaaaagtcaataatttgtcaccttggg

SEQ ID NO: 953 - DNA, 423 bp, Homo sapiens
gcggccgccaacttggacgctgcagaatggctcccgcaaagaagggtggcgagaagaaaaaggccgttctgccatcaacgaagtggtaacccgagaatacaccatcaacattcacaagcgcatccatggagtgggcttcaagaagcgtgcacctcgggcactcaaagagattcggaaatttgccatgaaggagatgggaactccagatgtgcgcattgacaccaggctcaacaaagctgtctgggccaaaggaataaggaatgtgccataccgaatccgtgtgcggctgtccagaaaacgtaatgaggatgaagattcaccaaataagctatatactttggttacctatgtacctgttaccactttcaaaaatctacagacagtcaatgtggatgagaactaatcgctgatcgtcagatcaaa

SEQ ID NO: 954 - DNA, 664 bp, Homo sapiens
ctcactatttggaatttggccctcgaggccaagaattcggcacgaggcacactgcagcagagcttgtagctggacagagtcaaaaagaagaaaatacggtttcaggctttcttgcagatatgaagtattcttggaatgcaataagtatgtattgaactgtactgtaaagtagctccaaaacttaattactctcctgttttaggggttatacatttggactgtgcattctccaagagatgaagcggtgaagttgggatttacattggaagtgctgtagacttctttatgtggctcagtggagagagggaaagaatgttgcacctgctctagtaccataggtcaagaggcttctggatcacaaagtcataactagacaggtttgttcttgtagttttctatccccagtctttgctccccagatggcagtagtttttagtaggaaagtgccattcctgtccttaaggcacagtctcatcagaagtctaatacctgggcaggtttataacatcctgagagccagcctgacattagacagaataccctttgtaatacattggaaatttttactcatgcctttttgtttaggataaataggtaagcacaaagagctcttcaaaatcagaaaaaacaataggagtccttccttgtcttttctgtgatctct

SEQ ID NO: 955 - DNA, 346 bp, Homo sapiens
ggacggggccgtgtccgaggccgcggagctcgcggaggcaaggccgaggataaggagtggatgcccgtcaccaagttgggccgcttggtcaaggacatgaagatcaagtccctggaggagatctatctcttctccctgcccattaaggaatcagagatcattgatttcttcctgggggcctctctcaaggatgaggttttgaagattatgccagtgcagaagcagacccgtgccgggcagcgcaccaggttcaaggcatttgttgctatcggggactacaatggccacggcggtctgggggtaagggctccaaggagggggggcgccgccatccgggggccatgag

SEQ ID NO: 956 - DNA, 450 bp, Homo sapiens
tacggctgcgagaagacgacagaagggtacggctgcgagaagacgacagaagggtacggctgcgagaagacgacagaagggtacggctgcgagaagacgacagaagggcaggtgatttaataataatttaaaactactatagaaactgcagagcaaaggaagtggcttaatgatcctgaagggatttcttctgatggtagcttttgtattatcaagtaagattctattttcagttgtgtgtaagcaagtttttttttagtgtaggagaaatacttttccattgtttaactgcaaaacaagatgttaaggtatgcttcaaaaattttgtaaattgtttattttaaacttatctgtttgtaaattgtaactgattaagaattgtgatagttcagcttgaatgtctcttagagggtgggcttttgttgatgagggaggggaaacttttttttt

SEQ ID NO: 957 - DNA, 465 bp, Homo sapiens
tacggctgcgagaagacgacagaagggtacggctgcgagaagacgacagaagggtacggctgcgagaagacgacagaagggtacggctgcgagaagacgacagaagggtgatttctgtggatcccagcttggttccaggaattttgtgtgattggcttaaatccagttttcaatcttcgacagctgggctggaacgtgaactcagtagctgaacctgtctgacccggtcacgttcttggatcctcagaactctttgctcttgtcggggtgggggtgggaactcacgtggggagcggtggctgagaaaatgtaaggattctggaatacatattccatgggactttccttccctctcctgcttcctcttttcctgctccctaacctttcgccgaatggggcagcaccactgacgtttctgggcggccagtgcggctgccaggttcctgtactactgccttgtacttt

SEQ ID NO: 958 - DNA, 522 bp, Homo sapiens
cggctgcgagaagacgacagaagggtcatcgacaaagaatctgaagtttacaagatgcttcaggagaaacaggagttgaatgagcccccgaaacagtccacgtctttcttggttttgcaggaaatcctggagtctgaagaaaaaggggatcccaacaagccctcaggattcagaagtgttaaagctcctgtcactaaagtggctgcgtcgattggaaatgctcagaagttgcctatgtgtgacaaatgtggcactgggattgttggtgtgtttgtgaagctgcgggaccgtcaccgccatcctgagtgttatgtgtgcactgactgtggcaccaacctgaaacagaagggccatttctttgtggaggatcaaatctactgtgagaagcatgcccgggagcgagtcacaccacctgagggttatgaagtggtcactgtgttccccaagtgagccagcagatctgaccactgttctccagcaggcctctgctgcagctttttctctcagtgttctggccctctc

SEQ ID NO: 959 - DNA, 523 bp, Homo sapiens
tcaaaaggacaagaatccttcaagaaacaggaaaaaaactcctaaaacaccaaaaggacctagttctgtagaagacattaaagcaaaaatgcaagcaagtataggaagaaggtggttctcttcccaaagtggaagccaaattcatcaattatgtgaagaattgcttccggatgactgaccaagaggctattcaagatctctggcagtggaggaagtctctttaagaaaatagtttaaacaatttgttaaaaaattttccgtcttatttcatttctgtaacagttgatatctggctgtcctttttataatgcagagtgagaactttccctaccgtgtttgataaatgttgtccaggttctattgccaagaatgtgttgtccaaaatgccgtttagtttttaaagatggaactccaccctttgcttggttttaagtatgtatggaatgttatgataggacatagtagtagcggtggtcagacatggaaatggtggggagacaaaaatatacatgtgaaataaaac

SEQ ID NO: 960 - DNA, 381 bp, Homo sapiens
  misc_feature 347: n = A,T,C or G
gagtcagtctcagtcaggacacagcatggacatgggggtccccgctcagctcctggggctcctgctactctggctccgaggttccagatgtgacatccagatgacccagtctccctcctccctgtctgcatctgtgggagacagagtcatcatgacttgccggacaagtcactatataagcagttatttaaattgggatcagcagataccagggacagcccctaagctctgatctatgctgcaccaagttgcaaatgggggcccatcaaggtcaaggccgtgatcttggacaaattcactctcacaatagcagctgcaaccgagatttgcacctatactgcaccggntatagacataataatccgccaggcacgatgaaga

SEQ ID NO: 961 - DNA, 336 bp, Homo sapiens
ggagtcagtctcagtcaggacacagcatggacatgagggtccccgctcagctcctggggctcctgctactctggctccgaggtgccagatgtgacatccagatgacccagtctccatcgtccctgtctacatctgcaggagacagagtcaccatcacttgccgggcaagtcagagcattagcacctttgtaaactggtatcagcagaaaccagggaaagcccctaacctcctgatctatggtgcatccagtttgcaaagtggggtcccagcaaggttcagtggcagtggatctgggacagatttcactctcaccatcagcagtctgcaacctgaag

SEQ ID NO: 962 - DNA, 332 bp, Homo sapiens
ggctggcctggggggcaccgaccgctataaggccagtcggactgcgacagcccatcccctcgaccgctcgcgtcgcatttggccgcctccctaccgctccaagcccagccctcagccatggcatgccccctggatcaggccattggcctcctcgtggccatcttccacaagtactccggcagggagggtgacaagcacaccctgagcaagaatgagctgaaggagctgatccagaaggagctcaccattggctcgaagctgcaggatgctgaaattgctaggctgatggaagacttggaccggagcaaggaccaagaggtgaactttcatgg

SEQ ID NO: 963 - DNA, 347 bp, Homo sapiens
  misc_feature 85: n = A,T,C or G
cgcatcttcatccagcacaacggactcatcaagattggctctgtggctcctgacactatcaacaatcatgtgaagacttgtcgangaagagcagaagaatctacacttctttgcaccagagtatggagaagtcactaatgtgacaacagcagtggacatctactcctttggcatgtgtgcactggagatggcagtgctggagattcagggcaatggagagtcctcatatgtgccacaggaagccatcagcagtgccatccagcttctagaagacccattacagagggagttcattcaaaagtgcctgcagtctgagcctgctcgcagaccaacagccagagaacttc

SEQ ID NO: 964 - DNA, 534 bp, Homo sapiens
ttcggcacgaggctccttctttggaaactggtgttcaagataaagaaatgctgaaaaaatatggaaaatcatttagaaaaatgatttcattgtgccttcaaaaagatccagaagaaagaccaacagcagcagaactattaaggcacagatttttccagaaagcaaagaataaagaatttcttcaagaaaaaacattgcagagagcaccaaccatttgtgaaagagcaaaaaaggttcggagagtaccaggttccagtgggcgtcttcataagacagaggatggaggctgggagtggagtgatgatgaatttgatgaagaaagtgaggaagggaaagcagcaatttcacaactcaggtgtccccgagtgaaagaatcaatatcaaattctgagctctttccaacaactgatcctgtgggtactttgctccaagttccagaacagatctctgctcatctacctcagccagctgggcagattgctacacagccaaactcaagtctctctcccacccaccgcagagccagcaaaaaca

SEQ ID NO: 965 - DNA, 344 bp, Homo sapiens
gctctttcccatcttgcaagatggcgggtgaaaaagttgagaagccagatactaaagagaagaaacccgaagccaagaaggttgatgctggtggcaaggtgaaaaagggtaacctcaaagctaaaaagcccaagaaggggaagccccattgcagccgcaaccctgtccttgtcagaggaattggcaggtattcccgatctgccatgtattccagaaaggccatgtacaagaggaagtactcagccgctaaatccaaggttgaaaagaaaaagaaggagaaggttctcgcaactgttacaaaaccagttggtggtgacaagaacggcggtacccgggtggttaaa

SEQ ID NO: 966 - DNA, 241 bp, Homo sapiens
gacgacagaagggtacggctgcgagaagacgacagaaggggctcttcctttctccgccatcgtggtgtgttcttgactccgctgctcgccatgtcttctcacaagactttcaggattaagcgattcctggccaagaaacaaaagcaaaatcgtcccattccccagtggattcggatgaaaactggaaataaaatcaggtacaactcccaaaggggacattggagaagaaccaagctgggtc

SEQ ID NO: 967 - DNA, 402 bp, Homo sapiens
accatcaagctatggaataccctgggtgtgtgcaaatacactgtccaggatgagagccactcagagtgggtgtcttgtgtccgcttctcgcccaacagcagcaaccctatcatcgtctcctgtggctgggacaagctggtcaaggtatggaacctggctaactgcaagctgaagaccaaccacattggccacacaggctatctgaacacggtgactgtctctccagatggatacctctgtgcttctggaggcaaggatggccaggccatgttatgggatctcaacgaaggcaaacacctttacacgctagatggtggggacatcatcaacgccctgtgcttcagccctaaccgctactggctgtgtgctgccacaggccccagcatcaagatctgggattta

SEQ ID NO: 968 - DNA, 442 bp, Homo sapiens
ctctctgctctcgcggctgactcgcaagatggcgccgcagaaagacaggaagcccaagaggtcaacctggaggtttaatttggaccttactcatccagtagaagatggaatttttgattctggaaattttgagcaatttctacgggagaaggttaaagtcaatggcaaaactggaaatctcgggaatgttgttcacattgagcgcttcaagaataaaatcacagttgtttctgagaaacagttctctaaaaggtatttgaaataccttaccaagaaataccttaagaagaacaatcttcgtgattggcttcgagtggttgcatctgacaaggagacctacgaacttcgttacttccagattagtcaagatgaagattaatcagagtcggaggactaggcaaaggctccccttacagggctttgcttattaataaaataaatg

SEQ ID NO: 969 - DNA, 443 bp, Homo sapiens
acgacagaagggtacggctgcgagaagacgacagaagggtacggctgcgagaagacgacagaagggtacggctgcgagaagacgacagaaggggcttttacctcgttgcactgctgagagcaagatgggtcaccagcagctgtactggagccacccgcgaaaattcggccagggttctcgctcttgtcgtgtctgttcaaaccggcacggtctgatccggaaatatggcctcaatatgtgccgccagtgtttccgtcagtacgcgaaggatatcggtttcattaagttggactaaatgctcttccttcagaggattatccggggcatctactcaatgaaaaaccgtgataattctttgtatataaaataaacattcgaaaaaaaaaaaaaaaaaaaaattgggggcctttttttccgtaaacccaaacttaaaaaaaaccttg

SEQ ID NO: 970 - DNA, 405 bp, Homo sapiens
gggggtctcaggaggcagcactctcgggacgtctccaccatggcctgggctctgctcctcctcagcctcctcactcagggcacaggatcctgggctcagtctgccctgactcagcctcgctcagtgtccgggtctcctggacaggcagtcaccatctcctgcactggaaccagcagtgatgttggtggttatcactatgtctcctggtaccaacaacacccaggcaaagcccccaaattcatgatttatgatgtcagtaagcggccctcaggggtccctgatcgcttctctggctccaagtctggcaacacggcctccctgaccatctctgggctccaggctgaggatgaggctgattattactgctgctcatatgcaggcagctacacccatgtggtattcggc

SEQ ID NO: 971 - DNA, 519 bp, Homo sapiens
cggctgcgagaagacgacagaagggaccgtaagcctttggtcataatcgctgaagatgttgatggagaagctctaagtacactcgtcttgaataggctaaaggttggtcttcaggttgtggcagtcaaggctccagggtttggtgacaatagaaagaaccagcttaaagatatggctattgctactggtggtgcagtgtttggagaagagggattgaccctgaatcttgaagacgttcagcctcatgacttaggaaaagttggagaggtcattgtgaccaaagacgatgccatgctcttaaaaggaaaaggtgacaaggctcaaattgaaaaacgtattcaagaaatcattgagcagttagatgtcacaactagtgaatatgaaaaggaaaaactgaatgaacggcttgcaaaactttcagatggagtggctgtgctgaaggttggtgggacaagtgatgttgaagtgaatgaaaagaaagacagagttacagatgcccttaatgctacaagagctgct

SEQ ID NO: 972 - DNA, 555 bp, Homo sapiens
cggctgcgagaagacgacagaagggatcaggaaagaggttaaaggagacctggaaaatgctttcctgaacctggttcagtgcattcagaacaagcccctgtattttgctgatcggctgtatgactccatgaagggcaaggggacgcgagataaggtcctgatcagaatcatggtcccccgcagtgaagtggacatgttgaaaattaggtctgaattcaagagaaagtacggcaagtccctgtactattatatccagcaagacactaagggcgactaccagaaagcgctgctgtacctgtgtggtgggatgactgaagcccgacacggcctgagcgtccagaaatggtgctcaccatgcttccagctaacaggtctagaaaaccagcttgcgaataacagtccccgtggccatccctgtgagggtgacgttagcattacccccaacctcattttagttgcctaagcattgcctggccttcctgtctagtctctcctgtaagccaaagaaatgaacattccaaggagttggaagtgaagtctatgatgtgaaacact

SEQ ID NO: 973 - DNA, 342 bp, Homo sapiens
aaggcgatcttttaagaagagattaaaccgaaggtgattaaaagaccttgaaatccatgacgcagggagaattgcgtcatttaaagcctagttaacgcatttactaaacgcagacgaaaatggaaagattaattgggagtggtaggatgaaacaatttggagaagatagaagtttgaagtggaaaactggaagacagaagtacgggaaggcgaagaaaagaatagagaagatagggaaattagaagataaaaacatacttttagaagaaaaaagataaatttaaacctgaaaagtaggaagcagaagaaaaaagacaagctaggaaacaaaaagctaagggg

SEQ ID NO: 974 - DNA, 337 bp, Homo sapiens
gagctgtgggctcagaagcagagttctggggtgtctccaccatggcctggacccctctctggctcactctcctcactctttgcataggttctgtggtttcttctgacctgactcaggaccctgctgtgtctgtggccttgggacagacagtcacgatcacatgccaaggagacagcctcaaaacctattatgcaagttggttccagcaggggccaggacaggcccctctacctgtcatctatgccaacaataagcggccctcagggatcccagaccgattctctggctccaggtcaggaaacacagcttccttgaccatcactggggctcaggcgga

SEQ ID NO: 975 - DNA, 345 bp, Homo sapiens
gctctcttcctcggcgctgcctacggagggggcagccatctccttctcggcatcatggccgccctcagaccccttgtgaagcccaagatcgtcaaaaagagaaccaagaagttcatccggcaccagtcagaccgatatgtcaaaattaagcgtaactggcggaaacccagaggcattgacaacagggttcgtagaagattcaagggccagatcttgatgcccaacattggttatggaagcaacaaaaaaacaaagcacatgctgcccagcggcttccggaaggtcctggtccacaacgtcaaggagctggaagtgctgctgatgtgcaacaaatcttactgtgcc

SEQ ID NO: 976 - DNA, 345 bp, Homo sapiens; identical to SEQ ID NO: 975

SEQ ID NO: 977 - DNA, 297 bp, Homo sapiens
acaggaagatgtacggagacatggcatgaagccagagagtgagagacattaactcattagactggaacttgaactgattcacatctcatttttccgtaaaaatgatttcagtagcacaagttatttaaatctgtttttctaactgggggaaaagattcccacccaattcaaaacattgtgccatgtcaaacaaatagtctatcaaccccagacactggtttgaagaatgttaagacttgacagtggaactacattagtacacagcaccagaatgtatattaaggtgtggctttagga

SEQ ID NO: 978 - DNA, 434 bp, Homo sapiens
aatggtgcgcatgaatgtcctggcagatgctctcaagagtatcaacaatgccgaaaagagaggcaaacgccaggtgcttattaggccgtgctccaaagtcatcgtccggtttctcactgtgatgatgaagcatggttacattggcgaatttgaaatcattgatgaccacagagctgggaaaattgctgtgaacctcacaggcaggctaaacaagtgtggggtgatcagccccagatttgacgtgcaactcaaagacctggaaaaatggcagaataatctgcttccatcccgccagtttggcttcattgtactgacaacctcacctggcatcatggaccatgaataagcacgacgaccacacacaggagggaaaatcctgggattctttttctagggatgtaatacatatatttacaaataaaatgcctcatggc

SEQ ID NO: 979 - DNA, 140 bp, Homo sapiens
gagaagacgacagaagggacggaggagggtgaggagacagagggcgaggaagaggaggattaggggagtccccgggggactgctcaatacagatacggtggacgcaaaaaaaaaaaaaaaaaaaaaaaaagtcgtatcga

SEQ ID NO: 980 - DNA, 634 bp, Homo sapiens
tttttaaagaagtaagcctttatttccttgttttgcaaataaaactggctaagttggttgctttttggtgattagtcaaagagaccaaatcccatatcctcgtccgactcctccgactcttccttggcttcaaccttagctggggctgcagcagcaccaggagcagctgtggtggcagcagccacaggggcagcagccacaaaggcagatggatcagccaagaaggccttgaccttttcagcaagtgggaaggtgtaatccgtctccacagacaaggccaggactcgtttgtacccgttgatgatagaatggggtactgatgcaacagttgggtagccaatctgcagacagacactggcaacattgcggacaccctccaggaagcgagaatgcagagtttcctctgtgatatcaagcacttcagggttgtagatgctgccattgtcgaacacctgctggatgaccagcccaaaggagaagggggagatgttgagcatgttcagcagcgtggcttcgctggctcccactttgtcttcagtcttgatcagctgcacatcactcatgatttcaatggtgcccctggagattgtagtggtgatacctaaagcctggaaaaagaggtcttctcgggccc

SEQ ID NO: 981 - DNA, 611 bp, Homo sapiens; identical to SEQ ID NO: 271

SEQ ID NO: 982 - DNA, 503 bp, Homo sapiens
aagggggctcagcatttggggacgctctcagctctcggcgcacggcccagcttccttcaaaatgtctactgttcacgaaatcctgtgcaagctcggcttggagggtgatcactctacacccccaagtgcatatgggtctgtcaaagcctatactaactttgatgctgagcgggatgctttgaacattgaaacagccatcaagaccaaaggtgtggatgaggtcaccattgtcaacattttgaccaaccgcagcaatgcacagagacaggatattgccttcgcctaccagagaaggaccaaaaaggaacttgcatcagcactgaagtcagccttatctggccacctggagacggtgattttgggcctattgaagacacctgctcagtatgacgcttctgagctaaaagcttccatgaaggggctgggaactgacgaggactctctcattgagatcatctgctccagaaccaaccaggagctgcaggaaattaacagagtctaca

SEQ ID NO: 983 - DNA, 207 bp, Homo sapiens
gctcttaccgccatcttggctcctgtggaggtctgctgggaacgggacttctaaaaggaactatgtctggaaggctgtggtccaaggccatttttgctggctataagcggggtctccggaaccaaagggagcacacagctcttcttaaaattgaaggtgtttacgcccgagatgaaacagaattctatttgggcaagagatgcgctt

SEQ ID NO: 984 - DNA, 359 bp, Homo sapiens
gagaagcttggaccgcatcctagccgccgactcacacaaggcaggtgggtgaggaaatccagagttgccatggagaaaattccagtgtcagcattcttgctccttgtggccctctcctacactctggccagagataccacagtcaaacctggagccaaaaaggacacaaaggactctcgacccaaactgccccagaccctctccagaggttggggtgaccaactcatctggactcagacatatgaagaagctctatataaatccaagacaagcaacaaacccttgatgattattcatcacttggatgagtgcccacacagtcaagctttaaagaaagtgtttgctgaaaataaagaaac

SEQ ID NO: 985 - DNA, 281 bp, Homo sapiens
gcctttcgttgcctgatcgccgccatcatgggtcgcatgcatgctcccgggaagggcctgtcccagtcggctttaccctatcgacgcagcgtccccacttggttgaagttgacatctgacgacgtgaaggagcagatttacaaactggccaagaagggccttactccttcacagatcggtgtaatcctgagagattcacatggtgttgcacaagtacgttttgtggcaggcaataaaattttaagaattcttaagtctaagggacttgctcctgatcttcc

SEQ ID NO: 986 - DNA, 411 bp, Homo sapiens
ggggcttttccgtgctacctgcagaggggtccatacggcgttgttctggattcccgtcgtaacttaaagggaaactttcacaatgtccggagcccttgatgtcctgcaaatgaaggaggaggatgtccttaagttccttgcagcaggaacccacttaggtggcaccaatcttgacttccagatggaacagtacatctataaaaggaaaagtgatggcatctatatcataaatctcaagaggacctgggagaagcttctgctggcagctcgtgcaattgttgccattgaaaaccctgctgatgtcagtgttatatcctccaggaatactggccagagggctgtgctgaagtttgctgctgccactggagccactccaattgctggccgcttcactcctggaaccttcactaa

SEQ ID NO: 987 - DNA, 318 bp, Homo sapiens
gctttccgcgccgatagcgctcacgcaagcatggttaacgtccctaaaacccgccggactttctgtaagaagtgtggcaagcaccaaccccataaagtgacacagtacaagaagggcaaggattctctgtacgcccagggaaagcggcgttatgacaggaagcagagtggctatggtgggcaaactaagccgattttccggaaaaaggctaaaactacaaagaagattgtgctaaagcttgagtgcgttgagcccaactgcagatctaagagaatgctggctattaaaagatgcaagcattttgaactgggaggagat

SEQ ID NO: 988 - DNA, 232 bp, Homo sapiens
gcggttccgggcgttaccatcgtccgtgcgcaccgcccggcgtccaggtgagtctcccatctgcagagacacggacgcgccggcccgcaattggcctgcggagcgcggtggacggtttggcgcccaccaagcgaacaatactttggatttttaatttctagatttggcaattcttcgctgaagtcatcatgagctttttccaactcctgatgaaaaggaaggaactcattcc

SEQ ID NO: 989 - DNA, 337 bp, Homo sapiens
  misc_feature 337: n = A,T,C or G
tacgggaaggcgaagaaaagaatagagaagatagggaaattagaagataaaaacatacttttagaagaaaaaagataaatttaaacctgaaaagtaggaagcagaagaaaaaagacaagctaggaaacaaaaagctaagggcaaaatgtacaaacttagaagaaaattggaagatagaaacaagatagaaaatgaaaatattgtcaagagtttcagatagaaaatgaaaaacaagctaagacaagtattggagaagtatagaagatagaaaaatataaagccaaaaattggataaaatagcactgaaaaaatgaggaaattattggtaaccaatttn

SEQ ID NO: 990 - DNA, 355 bp, Homo sapiens
aaaacctttgtatagcaactattgaagtttctaaagaagtattaaacctttgaggggaaaaggctaaggggagtgaaactttgaaaggcaacacaggctggataactcaacattaaagttaaaagcctggagctgaaagtaaagacagcagattaattattcgtgaaaaggccattaagttgttttaatcaaaaggataagtatcatgtggattatgagggtctgaaaagtcagagtgatgggtgataaatggtctaaaaagcaaggatgtgacaagcagaagaaagacgatgataaactctatgcacagcggaaggaatcattttctatatgttttataatcctggtacaagtc

SEQ ID NO: 991 - DNA, 618 bp, Homo sapiens
  misc_feature 100, 301, 422, 448, 466, 510, 576, 598, 613: n = A,T,C or G
cagagctttaggtatcaccactaaaatctccaggggcaccattgaaatcctgagtgatgtgcagctgatcaagactggagacaaagtgggagccagcgancacagctgctgaacatgctcaacatctcccccttctcctttgggctggtcatccagcaggtgttcgacaatggcagcatctacaaccctgaagtgcttgatatcacagaggaaactctgcattctcgcttcctggagggtgtccgcaatgttgccagtgtctgtctagattggctacccaactgttgcatcagtaccccanttctatcatcaacgggtacaaacgagtcctggccttgtctgtgggagacggattacaccttcccacttgctgaaaaggtcaaggccttcttggcttgatccatctgcctttgtggctgctncccctgtggctgctgcaccacagctnctcctgctgctgctgcancccagctaaggttgaagccaaggaagagtcggaggagtcggacnaggatatggggatttggtctctttgactaatcaccaaaaagcaaccaacttagccagttttatttncaaaacaaggaataaagggttnattctttaaaaaaanaaaaa

SEQ ID NO: 992 - DNA, 557 bp, Homo sapiens
gaatttggccctcgaggccaagaattcggcacgagggtgaagatgtgtgactttggcgtcaggggctacttggtggactctgtggccaagacgatggatgccggctgcaagccctacatggcccctgagaggatcaacccagagctgaaccagaagggctacaatgtcaagtccgacgtctggagcctgggcatcaccatgattgagatggccatcctgcggttcccttacgagtcctgggggaccccgttccagcagctgaagcaggtggtggaggagccgtccccccagctcccagccgaccgtttctcccccgagtttgtggacttcactgctcagtgcctgaggaagaaccccgcagagcgtatgagctacctggagctgatggagcaccccttcttcaccttgcacaaaaccaagaagacggacattgctgccttcgtgaaggagatcctgggagaagactcataggggctgggcctcggaccccactccggccctccagagccccacagccccatctgcgggggcagtgctcacccacaccataagctact

SEQ ID NO: 993 - DNA, 330 bp, Homo sapiens
gctctcgccaggcgtcctcgtggaagtgacatcggctttaaaccctgcgtggcaatccctgacgcaccgccgtgatgcccagggaagacagggcgacctggaagtccaactacttccttaagatcatccaactattggatgattatccgaaatgtttcattgtgggagcagacaatgtgggctccaagcagatgcagcagatccgcatgtcccttcgcgggaaggctgtggtgctgatgggcaagaacaccatgatgcgcaaggccatccgagggcacctggaaaacaacccagctctggagaaactgctgcctcatatccgggggaatg

SEQ ID NO: 994 - DNA, 154 bp, Homo sapiens
gagaagacgacagaagggacaaagagatctggacagaatcgccggacaggtggcaactgccaacaagaagcattagaacaaaccatgctgggttaataaattgcctcattccaaaaaaaaaaaaaaaaaaaaaaaaaaaaagtcgtatcgatgt

SEQ ID NO: 995 - DNA, 512 bp, Homo sapiens
gcttcctgtctgtaccagggcggcgcgtggtctacgccgagtgacagagacgctcaggctgtgttctcaggatgaccgagtgggagacagcagcaccagcggtggcagagaccccagacatcaagctctttgggaagtggagcaccgatgatgtgtagatcaatgacatttccctgcaggattacattgcagtgaaggagaagtatgccaagtacctgcctcacagtgcagggcggtatgccgccaaacgcttccgcaaagctcagtgtcccattgtggagcgcctcactaactccatgatgatgcacggccgcaacaacggcaagaagctcatgactgtgcgcatcgtcaagcatgccttcgagatcatacacctgctcacaggcgagaaccctctgcaggtcctggtgaacgccatcatcaacagtggtccccgggaggactccacacgcattgggcgcgccgggactgtgagacgacaggctgtggatgtgtcccccctgcgccgtgtg

SEQ ID NO: 996 - DNA, 402 bp, Homo sapiens
cggctgcgagaagacgacagaagggaagatggaggaagtggaagccatgctgctcccagagaccctgaagcggtggagagactctctggagttcagagagataggtgagctctacctgccaaagttttccatctcgagggactataacctgaacgacgacttctccagctgggcattgaggaagccttcaccagcaaggctgacctgtcagggatcacaggggccaggaacctagcagtctcccaggtggtccataaggctgtgcttgatgtatttgaggagggcacagaagcatctgctgccacagcagtcaaaatcaccctcctttctgcattagtggagacaaggaccattgtgcgtttcaacaggcccttcctgatgatcattgtgcctacagacacc

SEQ ID NO: 997 - DNA, 510 bp, Homo sapiens
acagaaggggcttttttttcgaggtaggagtcgactcctgtgaggtatggtgctgggtgcagatgcagtgtggctctggatagcaccttatggacagttgtgtccccaaggaaggatgagaatagctactgaagtcctaaagagcaagcctaactcaagccattggcacacaggcattagacagaaagctggaagttgaaatggtggagtccaacttgcctggaccagcttaatggttctgctcctggtaacgtttttatccatggatgacttgcttgggtatggagagtcggcttgactacactgtgtggagcaagttttaaagaagcaaaggactcagaattcatgattgaagaaatgcaggcagacctgttatcctaaactagggtttttaatgaccacaacaagcaagcatgcagcttactgcttgaaagggtcttgcctcacccaagctagagtgcagtggcctttgaagcttactacagcctcaaacttctgggctcaagtgat

SEQ ID NO: 998 - DNA, 350 bp, Homo sapiens
ggcctctccgccccgcgtgcagctcgcccagctcgcccagcgtccgccgcgcctcggccaaggcttcaacggaccacaccaaaatgccatctcaaatggaacacgccatggaaaccatgatgtttacatttcacaaattcgctggggataaaggctacttaacaaaggaggacctgagagtactcatggaaaaggagttccctggatttttggaaaatcaaaaagaccctctggctgtggacaaaataatgaaggacctggaccagtgtagagatggcaaagtgggcttccagagcttcttttccctaattgcgggcctcaccattgcatgcaatgactattttgtagta

SEQ ID NO: 999 - DNA, 580 bp, Homo sapiens
tttctcactgcctgtataatcaggtctttattcaaaagaagctgtccaaaatgatttgacctttatggaataatcaaatttaagagtttatgcagcaggcttcttctcctctgtagtaggtttcttctctgcaggcttcttttcaggggctggtttcttggtagctgctgccttttttcccaccagaggcttcttctgcttcttaacaccaacagcagccttctttcctttcttacctaccacaggcttcttgcctgcaaccgccgccttctcatctgatttggcttgtagtgccgctgctgcagcacgtgccttatccacccggagcttgtgattcctggcctggcgaagaatggtgttccggcgcatggtctttgcatatgggtttagcttcaacatgattctcaagtttttcagtgggttcttctttaggactctgcgatggatcttcttgcgtggtgctcgaagggctctttggatctctgggcttttcaagattctgctaagatctgtattaatcatctggtgcatgggaagattgtagttactcttgagggaagccgctttaacgcaagtgccg

SEQ ID NO: 1000 - DNA, 830 bp, Homo sapiens
  misc_feature 586, 595, 620, 664, 666, 678, 699, 704: n = A,T,C or G
ggagtgcggcggcggcgggacccggagcaggagcggcgggagcagcgactgggggcggcggcggcgcgttggaggcggccatggcaaagcagtacgactcggtggagtgccctttttgtgatgaagtttccaaatacgagaagctcgccaagatcggccaaggcaccttcggggaggtgttcaaggccaggcaccgcaagaccggccagaaggtggctctgaagaaggtgctgatggaaaacgagaaggaggggttccccattacagccttgcgggagatcaagatccttcagcttctaaaacacgagaatgtggtcaacttgattgagatttgtcgaaccaaagcttccccctataaccgctgcaagggtagtatatacctggtgttcgacttctgcgagcatgaccttgctgggctgttgagcaatgttttggtcaagttcacgctgtctgagatcaagagggtgatgcagatgctgcttaacggcctctactacatccacagaaacaagatcctgcatagggacatgaaggctgctaatgtgcttatcactcgtgatggggtcctgaagctggcagactttgngcttgcccnggccttcagcctggccaagaacagncagcccaaccgctacaccaaccgtgtggtgacactctggtaccngncccccgagctgntgcttcgggagcgggactacngcccncccattgacctgtggggtgcttggtgcatcatggcagagatgtggacccgcagccccatcatgcagggcaacaccgagcagcaccaacttcgcctcattaagtcagttttgggcttcatcacccct

SEQ ID NO: 1001 - DNA, 342 bp, Homo sapiens
ggagctgtcctgcaccgtggtggagctgaagtacacaggcaatgccagcgcactcttcatcctccctgatcaagacaagatggaggaagtggaagccatgctgctcccagagaccctgaagcggtggagagactctctggagttcagagagataggtgagctctacctgccaaagttttccatctcgagggactataacctgaacgacatacttctccagctgggcattgaggaagccttcaccagcaaggctgacctgtcagggatcacaggggccaggaaccctacagtctcccaggtggtccataaggctgtgcttgatgtatttgaggagggcacaga

SEQ ID NO: 1002 - DNA, 384 bp, Homo sapiens
tacggctgccagatgacaacagaaggggagctgtgggctcagaaacagagttctggggtgtgtccaccatggactggacccctctctggctcactctcctcactctttgcatagggtctggggattcttctgacctgactcaagaccctgctgtgtcagcggccttgggacagacagtcacgatcacatgccaaggagacagcctcaaaacctattatgcaagttgggtccagcaggggccaggacaggcccctctacttggcatctatgccaacaataagcggacctcagggatcccagaccgattctctggctccagggcaggaaacacagctatcttgaccatcactggggctcaggcggaagatgaagctgtctattact

SEQ ID NO: 1003 - DNA, 453 bp, Homo sapiens
ggaaccacgtgggtcccgggcgcgtttcgggtgctggcggctgcagccggagttcaaacctaagcagctggaaggaaccatggccaactgtgagcgtaccttcattgcgatcaaaccagatggggtccagcggggtcttgtgggagagattatcaagcgttttgagcagaaagtttccgccttgttggtctgaaattcatgcaagcttccgaagatcttctcaaggaacactacgttgacctgaaggaccgtccattctttgccggcctggtgaaatacatgcactcagggccggtagttgccatggtctgggaggggctgaatgtggtgaagacgggccgagtcatgctcggggagaccaaccctgcagactccaagcctgggaccatccgtggagacttccatacaagttggcaggaacattatacatggcagtgattctgtggagagtgc

SEQ ID NO: 1004 - DNA, 459 bp, Homo sapiens
ggagcttcagctgtgggtagagaagacaggactcaggacaatctccagcatggccagcttccctctcctcctcaccctcctcactcactgtgcagggtcctgggcccagtctgtgctgactcagccaccctcagcgtctgggacccccgggcagagggtcaccatctcttgttctggaagcagctccaacatcggaagtaatactgtaaactggtaccagcagctcccaggaacggcccccaaactcctcatctttagtaataatcagcggccctcaggggtccctgaccgattctctggctccaagtctggcacctcagcctccctggccatcagtgggctccagtctgaggatgcggctgattattactgtgcagcatgggatgacagcctgaatggtgtggtattcggcggagggaccaagctgaccgtcctaggtcagcccaaggctgccccctc

SEQ ID NO: 1005 - DNA, 336 bp, Homo sapiens
attctcgcttcctggagggtgtccgcaatgttgccagtgtctgtctgcagattggctacccaactgttgcatcagtaccccattctatcatcaacgggtacaaacgagtcctggccttgtctgtggagacggattacaccttcccacttgctgaaaaggtcaaggccttcttggctgatccatctgcctttgtggctgctgcccctgtggctgctgccaccacagctgctcctgctgctgctgcagccccagctaaggttgaagccaaggaagagtcggaggagtcggacgaggatatgggatttggtctctttgactaatcaccaaaaagcaacg

SEQ ID NO: 1006 - DNA, 311 bp, Homo sapiens
gtacggctgcgagaagacgacagaaggggatgtataaagggttccaagccttaggggatgccgctgacatccgggtcgtctacacccccgccatggagagtgtctgcggatacttccacaggtcccacaaccgcagcgaggagtttctcattgctggaaaactgcaggatggactcttgcacatcactacctgcagttttgtggctccctggaacagcctgagcttaactcaacgccggggcttcaccaagacctacactgttggctgtgaggaatgcacaatgtttccctgtttatacatcccctgcaaa

SEQ ID NO: 1007 - DNA, 181 bp, Homo sapiens
ctgcaaaacaagatgttaaggtatgcttcaaaaattttgtaaattgtttattttaaacttatctgtttgtaaattgtaactgattaagaattgtgatagttcagcttgaatgtctcttaaagggtgggcttttgttgatgagggaggggaaactttttttttttttataaacttttttcaa

SEQ ID NO: 1008 - DNA, 369 bp, Homo sapiens; identical to SEQ ID NO: 208

SEQ ID NO: 1009 - DNA, 219 bp, Homo sapiens
acgacagaaggggctcttttcctccttggctgtctgaagatagatcgccatcatgaacgacaccgtaactatccgcactagaaagttcatgaccaaccgactacttcagaggaaacaaatggtcattgatgtccttcaccccgggaaggcgacagtgcctaagacagaaattcgggaaaaactagccaaaatgtacaagaccacaccggatgtcatctt

SEQ ID NO: 1010 - DNA, 210 bp, Homo sapiens
gcacctctcgccccgcaggaccatggccaacctggagcgcaccttcatcgccatcaagccggacggcgtgcggcgcggcctggtgggcgagatcatcaagcgcttcgagcagaagggattccgcctcgtggccatgaagttcctccgggcctctgaagaacacctgaagcagcactacattgacctgaaagaccgaccattctttcctgg

SEQ ID NO: 1011 - DNA, 318 bp, Homo sapiens
  misc_feature 318: n = A,T,C or G
gcttttccgtgctacctgcagaggggtccatacggcgttgttctggattcccgtcgtaacttaaagggaaactttcacaatgtccggagcccttgatgtcctgcaaatgaaggaggaggatgtccttaagttccttgcagcaggaacccacttaggtggcaccaatcttgacttccagatggaacagtacatctataaaaggaaaagtgatggcatctatatcataaatctcaagaggacctgggagaagcttctgctggcagctcgtgcaattgttgccattgaaaaccctgctgatgtcagtgttatatcctccan

SEQ ID NO: 1012 - DNA, 369 bp, Homo sapiens
gctctcgccaggcgtcctcgtggaagtgacatcgactttaaaccctgcgtggcaatccctgacgcaccgccgtgatgcccagggaagacagggcgacctggaagtccaactacttccttaagatcatccaactattgcatgattatccgaaatgtttcattgtgggagcagacaatgtgggctccaagcagatgcagcagatccgcatgtcccttcgcgggaaggctgtggtgctgatgggcaagaacaccatgatgcgcaaggccatccgagggcacctggaaaacaacccagctctggagaaactgctgcctcatatccgggggaatgtgggctttgtgttcaccaaggaggacctcactgagatca

SEQ ID NO: 1013 - DNA, 324 bp, Homo sapiens
ggcaccggaaaagaacagattctcttccgtcgcagagtttcgccatggcccggggccccaagaagcacttaaagcgtgttgcagcgccgaagcattggatgcttgacaaactaacgggtgtatttgcacctcgtccatcgacaggtccccacaagctgagggaatgtcttcctctgatcgtcttcctcaggaatagactcaagtatgcgttgactggagatgaggtaaagaagatatgtatgcaacgtttcatcaaaattgatggcaaggttcgagtggatgtcacataccctgctggattcatggatgtcatcagcatcgagg

SEQ ID NO: 1014 - DNA, 217 bp, Homo sapiens
acgacagaagggtacggctgcgagaagacgacagaagggtacggctgcgagaagacgacagaaggggcttttcctccttggctgtctgaagatagatcgccatcatgaacgacaccgtaactatccgcactagaaagttcgcgaccaaccgactacttcagaggaaacaaatggtcattgatgtccttcaccccgggaaggcgacagtgcctaagaa

SEQ ID NO: 1015 - DNA, 348 bp, Homo sapiens
gcttttccggttgcggcgccgcgcggagaggttgtctagtccacgctcggagccatgccgtccaagggcccgctgcagtctgtgcaggtcttcgtacgcaagaagacagcgacagctgtggcgcactgcaaacgcggcaatggtctcatcaaggtgaacgggcggcccctggagatgattgagccgcgcacgctacagtacaagctgctggagccagatctgcttctcggcaaggagcgatttgctggtgtagacatccgtgtccgtgtaaagggtggtgtgcacgtggcccagatttatgctatccggcagtccatctccaaagccctgggggcctattaccataga

SEQ ID NO: 1016 - DNA, 324 bp, Homo sapiens
  misc_feature 307: n = A,T,C or G
gagtctgggcctaaggaagcagcactggtggtgcctcagccatggcctggaccgttctcctcctcggcctcctctctcactgcacagggtctgtgacctcctatgcgctggctcaggcgccctcggtgtccgtggccccaggacagacggccacgattacgtgtgggacaaacaacattggagctaagaaagtgcactggtaccaacagaggccaggccaggcccctgtggaggtcggctatgataatgaccaccggccctcatggatccctgagcgattctctggctccaactttgggaacacggncaccctgaccattagca

SEQ ID NO: 1017 - DNA, 381 bp, Homo sapiens
cactcaagtctgttaatggacaaatagaaagcctcattagtcctgatggttctcgtaaaaaccccgctagaaactgcagagacctgaaattctgccatcctgaactcaagagtggagaatactgggttgaccctaaccaaggattcaaattggatgctatcaaggtattctgtaatatggaaactggggaaacatgcataagtgccaatcctttgaatgttccacggaaacactggtggacagattctagtgctgagaagaaacacgtttggtttggagagtccatggatggtggttttcagtttagctacggcaatcctgaacttcctgaagatgtccttgatgtgcagctggcattccttcgacttctctccagccgag

SEQ ID NO: 1018 - DNA, 689 bp, Homo sapiens
gaatttggccctcgaggccaagaattcggcacgaggaaattagggagactggactgaggactgaaagcttcttccctcatctgatactgaggaatctccgatttgtcaaacagctatttaaaggctttaggtttcaaatcctgcctgacgctgatatatagttaagaaaacaaaggaaagggacccccacgtcgtctttcccagacgtggaggcattccctgtgtgtctctttttctccctccctccccactcctcttctctcccctactcctgccattagcatcactctgtgatccctgacacagcatccccagccctgtcctagagccagggccagtaactcaattagcaacccccagccccagctccctcccctcccctgtgagggacatcgaggagaggagaagaatcggtctgcctcccgaccagttgctgggaggggcaggggttcaccgagccttgtggcccctctgtcaggctgctctggcctgctctgagccaaggcgagaaaggaaaacaagaagatgaatcgccacgtcttcttggtggaggttccgatgagactttagaacaacagtgactggaaagaaaaacagcatctgctggaggagagggggaagaatgggctctgctgggagttgcatttattattatttttctttctaacaacgtgaaatcataatagatg

SEQ ID NO: 1019 - DNA, 341 bp, Homo sapiens
attggctagatgatttttaaaattcatttggaaacacaaatgtcaaaaaaataaacaaaataatcttgaaaagaggccgggtgcggtggctgatgcctgtaatcccagcacttcgggaggctgaggcaggtgaatcacctgaggtcaggagttcaagaccagcctggccaacatggtgaaaccccatctctactaaaaacacaaaaattagccgggcgtggtggcgggcacctgtaatccagctacttgggaggctgaggcaggagaattgcttgaaccctggaggcagaggttgcagtgagccaagatcgcaccattgcactccagcctgggcgacaaga

SEQ ID NO: 1020 - DNA, 382 bp, Homo sapiens
ggagcttcagctgtgggtagagaagacaggactcaggacaatctccagcatggccagcttccctctcctcctcaccctcctcactcactgtgcagggtcctgggcccagactgtgctgactcagccaccctcagcgtctgggacccccgggcagagggtcaccatctcttgttctggaagcagctccaacatcggaagtaatactgtaaactggtaccagcagctcccaggaacggcccccaaactcctcatctttagtaataatcagcggccctcaggggtccctgaccgattctctggctccaagtctggcacctcagcctccctggccatcagtgggctccagtctgaggatgcggctgattattactgtgcagcatgg

SEQ ID NO: 1021 - DNA, 289 bp, Homo sapiens
acagaagggtctcttcttcagatttgcagtctggggaagacacagcctctactgtactttagaacctgagatatggtggtggagggagccctgggtcgagtggtaagattcacccttaggttagtattgacgtaaggtgacgaggagctgtagacaaaagattgtaaccataagaacttcatagtttttgcattttcaccgagcttatatttggtgtgttttttgtcttttctttatgattatcaataaaatgcaaaaaaaaaaaaaaaaaaaaaaatttttttttttt

SEQ ID NO: 1022 - DNA, 174 bp, Homo sapiens
ggcttccgccacggccgtctctggagagcagcagccatggccctacgctaccctatggccgtgggcctcaacaagggccacaaagtgaccaagaacgtgagcaagcccaggcacagccgacgccgcgggcgtctgaccaaacacaccaagttcgtgcgggacatgattcgggag

SEQ ID NO: 1023 - DNA, 352 bp, Homo sapiens
aaggatgaggttttgaagattatgccagtgcagaagcagacccgtgccggccagcgcaccaggttcaaggcatttgttgctatcggggactacaatggccacgtcggtctgggtgttaagtgctccaaggaggtggccaccgccatccgtggggccatcatcctggccaagctctccatcgtccccgtgcgcagaggctactgggggaacaagatcggcaagccccacactgtcccttgcaaggtgacaggccgctgcggctctgtgctggtacgcctcatccctgcacccaggggcactggcatcgtctccgcacctgtgcctaagaagctgctcatgatggctggtatcg

SEQ ID NO: 1024 - DNA, 345 bp, Homo sapiens
agtctgggcctaaggaagcagcactggtggtgcctcagccatggcctggacctttctcctcctcggcctcctctctcactgcacaggctctgtgacctccgatgtgctgactcagccaccctcagtgtcagtggccccaggacagacggccaggattacctgtgggggagacaacattggaagtaaaagtgtgcactggtaccagcagaagccaggccaggcccctgtgctggtcatctattatgatagcgaccggccctcagggatccctgagcgattctctggctccaactctgggaacacggccaccctgaccctcagcagggtcgaagccgaggatgaagg

SEQ ID NO: 1025 - DNA, 470 bp, Homo sapiens
tacggctgcgagaagacgacagaagggtacggctgcgagaagacgacagaagggtacggctgcgagaagacgacagaagggtacggctgcgagaagacgacagaagggtacggctgcgagaagacgacagaagggtacggctacgagaagacgacagaagggagagatacacatgccatgtacagcatgaggggctgccgaagcccctcaccctgagatgggagccgtcttcccagtccaccgtccccatcgtgggcattgttgctggcctggctgttctatcatttgtggtcatcggagctgtggtcgctgctgtgatgtgtaggaggaagagctcagttggaaaaggagggagctactctcaagctgcgtgcatcgacagtgcccagggctctgatgtgtctctcacagcttgaaaagcctgagacagctgtcttgtgagggactgagatgcatgatttcttcacgcc

SEQ ID NO: 1026 - DNA, 503 bp, Homo sapiens
caatgaattacaaaaacttggcagttacagccttttgtcaaatttatctcggcatcctgtacttttatttgctagatttggtggccaaactaatgagccactcaacccctacaatcttccatgtttcagccttctctgtagtatctctcttctaaggtgagtggccacccagcctaatgggcacttcttacctcaggagtttcccaacactgaacgaaaatctgtctccctgaaatttttacctgctgcccctagcatccctctttaagatcatactgaataaatctaatccttttctttacagaagttcaaatattgaactcactgtattagaggccacctcatgtcacagactcttaacaaactttctatgagcccaaaccagtggtgtggtggtaggatttgtagcatttaatttctttggtgaaaatactcctgccacattggagctgcccaggtgaagtggttgaactgagagttgggaactgatggacacattccac

SEQ ID NO: 1027 - DNA, 928 bp, Homo sapiens
ttagaaactgatgtttattttccatcaaccatttttccatgctgcttaagagcctatgcaagaacagcttaagaccagtcagtggttgctcctacccattcagtggcctgagcagtgggagctgcagaccagtcttccgtggcaggctgagcgctccagtcttcagtagggaattgctgaataggcacagagggcacctgtacaccttcagaccagtctgcaacctcaggctgagtagcagtgaactcaggagcgggacgagtccattcaccctgaaattcctccttggtcactgccttctcagcagcagcctgctcttctttttcaatctcttcaggatctctgtagaagtacagatcaggcatgacctcccatgggtgttcacgggaaatggtgccacgcatgcgcagaacttcccgagccagcatccaccacatcaaacccactgagtgagctcccttgttgttgcatgggatggcaatgtccacatagcgcagaggagaatctgtgttacacagcgcaatggtaggtaggttaacataagatgcctccgtgagacgctggtggtcagccctggggtcagtaaccacaagaagccgtggctcccggaaggctgcctggatctggttagtgaaggtttcaggagtgaagcggccagacattggagtgggtcaagtggcagcagcaaacttcagcacagccctctggccagtaatgctggaggattatacactgacatcagcaggggtttcaatggcaacaattgcacgagcttgcagcagaagcttctccaaggtcctcctgagatttatgatatagatgccatcaatttgcctttatagatgtacctgtcatccggcagtcaagatgggtgcagctaagtggtttctgctgcaagaacttaaggcatcccctccttaatttgagg

SEQ ID NO: 1028 - DNA, 478 bp, Homo sapiens
ttttttctacaccaacctgcttccactttattcttgtttacacattctcctgctcccagatttggagggaagaaagcagaagaaaagatgcaggactgagatgattcatggaacccaagtccattaaaactggctgcccctcatctccaagcaatatattggtgggcttcaagtctctgtgggcataacccttggcatgaatggcctcaaggctcctgcagatccccagcagcagccaaaggatttgatcctcggtcaggaagttgcctttgtccttcagcctttctatctcattccacagcgtacctctcttgaagaatggtagcagcagccaggcctcatgcttagcaccccgttccctcagacagtaagccacgagggaaaggatgttggggtgattgaagaggcgatgcatgtcggcttctcgctgggcctcctcccggtcctgctgctcgtgaacaaggattcgcttcagggc

SEQ ID NO: 1029 - DNA, 294 bp, Homo sapiens
gcctgaggtcaggagtttgagaccagcctggccaacataatgaaaccctgtctctactaaaatacaaaaaattagctgggcgtggtggtgggcgcctgtaatctcagctactcagggggctgaggcaggagaatcgcttgaacctgggaggcggaggttgcagtgagccaagatcgcgccattgcactccagcctgggcaacaagagcaaaactccgtctcaaaaaaaaaaaaacagggggggaaaaaaaagggcttgaaattttttaaaaactgcaaatactccagggatata

SEQ ID NO: 1030 - DNA, 309 bp, Homo sapiens
atcaatgctgacttcctcgtcttagaaattgtactattgtgcaggcgcagtggctcacacctgtaatcctagcactttgggaggccgaggtgggcagatcacctgaggttgggagttcaagaccagcctgaccaacatggagaaaccctgtctctactaaaaatacaaaattagctgggcatggtggcgcatgcctgtaatcccagctactcaagaggctgaggcaggagaatcgcttgaacccgggaggcagaggttgcagtgagctgagatcgtgccactgcgttccagcctgggcataaagagtga

SEQ ID NO: 1031 - DNA, 250 bp, Homo sapiens
gtacggctgcgagaagagacagaagggcaagattaagcaaaaagaacaaatctggaggcatcacattacctgacttcaaactatactataaggccacagtcaccaaaacagcatggtattggtataaaaatagacacatagaccaatggaacagaatagagaatccagaaataaagccaaatacttatagccaactgatcttcaacaaagcaaacaaaaacataaaggggtgaaaggacaccctttttca

SEQ ID NO: 1032 - DNA, 452 bp, Homo sapiens
gaagaaggtctggttagaccccaatgagaccaatgaaatcgccaatgccaactcccgtcagcagatccggaagctcatcaaagatgggctgatcatccgcaagcctgtgacggtccattcccgggctcgatgccggaaaaacaccttggcccgccggaagggcatgcacatgggcataggtcagcggaagggtacagccaatgcccgaatgccaaagaaggtcacatggatgaggagaatgaggattttgcgccggctgctcaaaagataccgtgaatctaagaagatcgatcgccacatgtatcacagcctgtacctgaaggtgaaggggaatgtgttcaaaaacaagcggattctcatggaacacatccacaagctgaaggcagacaaggcccgcaagaagctactggctgaccaggctgatgcccgcaggtctaagaccaaggaagcac

SEQ ID NO: 1033 - DNA, 353 bp, Homo sapiens
tggaagaaaatatctaaatagctaccagaaagagatgctgctgaggttttgaaagacatttggctataatcttatctttgctccctgcaagaaatcagccataagaaagcactattaatactctgcagtggttagaaggggtggggtggcgggaatcctatttatcagactctgtaattgaatataaatgttttactcagaggagctgcaaattgcctgcaaaaatgaaatccagtgagcactagaatatttaaaacatcattactgccatctttatcatgaagcacatcaattacaagctgtagaccacctaatatcaatttgtaggtaatgttcctgaaaattgcaataca

SEQ ID NO: 1034 - DNA, 295 bp, Homo sapiens
  misc_feature 170: n = A,T,C or G
ggaaatgtctttaccatcttcctcctggaggccaagacatcctgtttctaagggctgctttgtttggcgtgtggttgttatcacgcgaattagacgcttgaaagatgggcgtcagacttgcatacgcagcagatcagcatccttcgctgccccttagcaacttatgtggntgatttgaaactgtgaaggtgtgattttttcaagagctggaagtcttaaaaaagccttgtaaatgcctatattgtgggcttttaacgtatttaatggaccacttaagacgagattagatgggctg

SEQ ID NO: 1035 - DNA, 284 bp, Homo sapiens
cagaagggttctttgcacaattgtttcattgtttgacacttaatgcactcgtcatttgcatacgacagtagcattctgaccacacttgtacgctgtaacctcatctacttctgatgtttttaaaaaatgacttttaacaaggagagggaaaagaaacccactaaattttgctttgtttccttgaagaatgtggcaacactgttttgtgattttatttgtgcaggtcatgcacacagttttgataaagggcagtaacaagtattggggcctattttttttttttt

SEQ ID NO: 1036 - DNA, 326 bp, Homo sapiens
agggttctttgcacaattgtttcattgtttgacacttaatgcactcgtcatttgcatacgacagtagcattctgaccacacttgtacgctgtaacctcatctacttctgatgtttttaaaaaatgacttttaacaaggagagggaaaagaaacccactaaattttgctttgtttccttgaagaatgtggcaacactgttttgtgattttatttgtgcaggtcatgcacacagttttgataaagggcagtaacaagtattggggcctattttttttttttttccacagggctttttttaaagttttggaaaattttttttgcccctt

SEQ ID NO: 1037 - DNA, 329 bp, Homo sapiens
tgccgagcttcgggtaactcttacggtggaggattcccagccatatgaagacaccctagctggacgatcagtccttgtcaaaagtctgacccctcaaactctacagcctcaatggaccagaccctacccggtcatttatagcacaccaactgccgtccatctgcaggaccctctccattgggttcaccattccagaataaagccatgcccatcagacagccagcttgatctctcctcttcctcctggaagccacaagattaggccgagagccgatcagacaaacaacctacaacccttaagctcctggcagcgcccagccaaggccatg

SEQ ID NO: 1038 - DNA, 305 bp, Homo sapiens
  misc_feature 151, 305: n = A,T,C or G
ctcctgtggattctcccatcagccatctggttctcctcttaaggccagttgaagatggtcccttacagcttcccaagttaggttagtgatgtgaaatgctcctgtccctggccctacctccttccctgtccccacccctgcataaggcagntgttggttttcttccccaattcttttccaagtaggttttgtttaccctactccccaaatccctgagccagaagtggggtgcttatactcccaaaccttgagtgtccagccttcccctgttgtttttagtctcttgtgctgtgcctagtggcacn

SEQ ID NO: 1039 - DNA, 347 bp, Homo sapiens
ggaaacgacaggggaaaggaggtctcactgagcaccgtcccagcatccggacaccacagcggcccttcgctccacgcagaaaaccacacttctcaaaccttcactcaacacttccttccccaaagccagaagatgcacaaggaggaacatgaggcggctgtgctgggggcaccccccagcaccatccttccaaggtccaccgtgatcaacatccacagcgagacctccgtgcccgaccatgtcgtctggtccctgttcaacaccctcttcttgaactggtgctgtctgggcttcatagcattcgcctactccgtgaagggacaggaagatggttggcgacgtgaccg

SEQ ID NO: 1040 - DNA, 178 bp, Homo sapiens
gcggcccctactactactactatacggctgcgagaagacgacagaagggatgagatgatgttgacaatatagcctgacgtgccggaccttccacctcaaattataaagacaaactttgttttgtttgtgctctgactgattaggactgacaattaacagcaaaaaaaaaaaaagtcgt

SEQ ID NO: 1041 - DNA, 437 bp, Homo sapiens
gggtctctcctcccgccgcccaagatgccgaaagggaagaaggccaagggaaagaaggtggctccggccccagctgtcgtgaagaagcaggaggctaagaaagtggtgaatcccctgtttgagaaaaggcctaagaattttggcattggacaggacatccagcccaaaagagacctcacccgctttgtgaaatggccccgctatatcaggttgcagcggcagagagccatcctctataagcggctgaaagtgcctcctgcgattaaccagttcacccaggccctggaccgccaaacagctactcagctgcttaagctggcccacaagtacagaccagagacaaagcaagagaagaagcagagactgttggcccgggccgagaagaaggctgctggcaaaggggacgtcccaacgaagagaccacctgtccttcgagc

SEQ ID NO: 1042 - DNA, 530 bp, Homo sapiens
gacagaaggggcctctccgccccgcgtccagctcgcccagctcgcccagcgtccgccgcgcctcggccaaggcttcaacggaccacaccaaaatgccatctcaaatggaacacgccatggaaaccatgatgtttacatttcacaaattcgctggggataaaggctacttaacaaaggaggacctgagagtactcatggaaaaggagttccctggatttttggaaaatcaaaaagaccctctggctgtggacaaaataatgaaggacctggaccagtgtagagatggcaaagtgggcttccagagcttcttttccctaattgcgggcctcaccattgcatgtaatgactattttgtagtacacatgaagcagaagggaaagaagtaggcagaaatgagcagttcgctcctccttgataagagttgtcccaaagggtcgcttaaggaatctgccccacagcttcccccatagaaggatttcatgagcagatcaggacacttagcaaatgtaaaaataaaatctaactctcat

SEQ ID NO: 1043 - DNA, 536 bp, Homo sapiens
actcccactttgttagtgatgtggttatctcctcagatggccagtttgccctctcaggctcctgggatggaaccctgcgcctctgggatctcacaacgggcaccaccacgaggcgatttgtgggccataccaaggatgtgctgagtgtggccttctcctctgacaaccggcagattgtctctggatctcgagataaaaccatcaagctatggaataccctgggtgtgtgcaaatacactgtccaggatgagagccactcagagtgggtgtcttgtgtccgcttctcgcccaacagcagcaaccctatcatcgtctcctgtggctgggacaagctggtcaaggtatggaacctggctaactgcaagctgaagaccaaccacattggccacacaggctatctgaacacggtgactgtctctccagatggatccctctgtgcttctggaggcaaggatggccaggccatgttatgggatctcaacgaaggcaaacacctttacacgctagatggtggggacatcatcaacgccctgtgc

SEQ ID NO: 1044 - DNA, 309 bp, Homo sapiens
aaactattccaaacaatagaaaaagagggactcctcccaaactcattttatgaggccagcatcatcctgataccaaagcctggcagagacacaacaaaaaaagaaaatttcaggccaatattcctgatgaacattgatgcaaaaaatcctcaataaaatactggcaaaccaaatccagcagcacatcaaaaagcttatctaccatgatcaagtcggcttcacctctgggatgcaaggctagttcaacatattcaaatcaataaatgtaatccatcacataaacagaaccaatgacaaataccacatgag

SEQ ID NO: 1045 - DNA, 352 bp, Homo sapiens
ggaaacgacaggggaaaggaggtctcactgagcaccgtcccagcatccggacaccacagcggcccttcgctccacgcagaaaaccacacttctcaaaccttcactcaacacttccttccccaaagccagaagatgcacaaggaggaacatgaggtggctgtgctgggggcaccccccagcaccatccttccaaggtccaccgtgatcaacatccacagcgagacctccgtgcccgaccatgtcgtctggtccctgttcaacaccctcttcttgaactggtgctgtctgggcttcatagcattcgcctactccgtgaagtctagggacaggaagatggttggcgacgtgaccg

SEQ ID NO: 1046 - DNA, 334 bp, Homo sapiens
gacgcacgccgggcgtgccagtttataaagggagagagcaagcagcgagtcttgaagctctgtttggtgctttggatccatttccatcggtccttacagccgctcgtcagactccagcagccaagatggtgaagcagatcgagagcaagactgcttttcaggaagccttggacgctgcaggtgataaacttgtagtagttgacttctcagccacgtggtgtgggccttgcaaaatgatcaagcctttctttcattccctctctgaaaagtattccaacgtgatattccttgaagtagatgtggatgactgtcaggatgttgcttcagagtgtga

SEQ ID NO: 1047 - DNA, 331 bp, Homo sapiens
gctttctttccgcgccgatagcgctcacgcaagcatggttaacgtccctaaaacccgccggactttctgtaagaagtgtggcaagcaccaaccccataaagtgacacagtacaagaagggcaaggattctctgtacgcccagggaaagcggcgttatgacaggaagcagagtggctatggtgggcaaactaagccgattttccggaaaaaggctaaaactacaaagaagattgtgctaaggcttgagtgcgttgagcccaactgcagatctaagagaatgctggctattaaaagatgcaagcattttgaactgggaggagataagaagaga

SEQ ID NO: 1048 - DNA, 339 bp, Homo sapiens
gcttttccgtgctacctgcagaggggtccatacggcgttgttctggattcccgtcgtaacttaaagggaaattttcacaatgtccggagcccttgatgtcctgcaaatgaaggaggaggatgtccttaagttccttgcagcaggaacccacttaggtggcaccaatcttgacttccagatggaacagtacatctataaaaggaaaagtgatggcatctatatcataaatctcaagaggacctgggagaagcttctgctggcagctcgtgcaattgttgccattgaaaaccctgctgatgtcagtgttatatcctccaggaatactggccagagggctgg

SEQ ID NO: 1049 - DNA, 348 bp, Homo sapiens
atggccacagagctggagcccctgtgcactccggtggtcacctgtactcccagctgcactgcttacacgtcttccttcgtcttcacctaccccgaggctgactccttccccagctgtgcagctgcccaccgcaagggcagcagcagcaatgagccttcctctgactcgctcagctcacccacgctgctggccctgtgagggggcagggaaggggaggcagccggcacccacaagtgccactgcccgagctggtgcattacagagaggagaaacacatcttccctagagggttcctgtagacctagggaggaccttatctgtgcgtgaaacacaccaggctgtgggccc

SEQ ID NO: 1050 - DNA, 348 bp, Homo sapiens
  misc_feature 348: n = A,T,C or G
gggattttgacgtgctctcgcgagatttgggtctcttcctaagccggcgctcggcaagttctcccaggagaaagccatgttcagttcgagcgccaagatcgtgaagcccaatggcgagaagccggacgagttcgagtccggcatctcccaggctcttctggagctggagatgaactcggacctcaaggctcagctcagggagctgaatattacggcagctaaggaaattgaagttggtggtggtcggaaagctatcataatctttgttcccgttcctcaactgaaatctttccagaaaatccaagtccggctagtacgcgaattggagataaagttcagtgggaagcn

SEQ ID NO: 1051 - DNA, 125 bp, Homo sapiens
tatacggctgcgagaagacgacagaagggacaaaacgaactgcacagaaccgcaccacaggcgtctgcttgcgtcaataagcattaaaacataccatgctgcgttaataaattgcctcattccaa

SEQ ID NO: 1052 - DNA, 143 bp, Homo sapiens; identical to SEQ ID NO: 277

SEQ ID NO: 1053 - DNA, 736 bp, Homo sapiens; identical to SEQ ID NO: 264
  misc_feature 608: n = A,T,C or G

SEQ ID NO: 1054 - DNA, 330 bp, Homo sapiens
tttttaaaaagaaaggccttacatatttattactgaatccagccaaccaacgtgttcataacagattcagagaggaaaacacgtcgaaatctccagatagtggtgacattttcagcttgatatggtaacatgatcgtgaccttcagacagcataaatatgtgtgccatctcatgtgcaattccttatagacccagcttggttcttctccaatgtctccttttggagttgtacctgattttatttccagttttcatcccattccccagtggattcggatgaaaactggaaataaaatcatgtgcaattccttatagacccagcttggttct

SEQ ID NO: 1055 - DNA, 786 bp, Homo sapiens
  misc_feature 522, 575, 669: n = A,T,C or G
ttttttgaaatgcagaaatatttattttggtttccttcattgtttttggaaattttgttttggtttataaaacatagaaatagccaacacttaaagcaaacattcaaaaccccaaggtgacaaattattgactttttgtgcaattaagaatacatatatgaagttaggctaccaagtagtgttattacaatgacaattctttagtgcaagccctgttgtgcttgtatataatacatgtactctcacagaccccaaaacagctgctttaaatgtacaaatgacagctcaattcagtcaaatgtggcaaagactcacaataaagtgaactgctgttaatttcccaaattaactttaaaaaatccctggagaagtgaatcccaggaaatgaactttccagatttctacatcctagaattttggcttgtcaaacacatttcatagaaatcaggtagcattataagaacatttgcttattactgtccatttcaataagtactcaagtatatactcccttaatagctntaaagaaatgcttgcctgagagtttattttttggggaaaaagggcagttaatnccaacatgatcttttgatatgaaaaccacattaaaaatctgtttggctttacacagagtgagtggttcagtgaagataagtagacagttatcangcgtcacagctgagcatggctgatccaggtactctttcttgaaatgcttggctcactatagaatctacgcagattttaaaataaccctgaaaaaggatgagtcggggatcaggcctg

SEQ ID NO: 1056 - DNA, 445 bp, Homo sapiens
cggctgcgagaagacgacagaaggggcttttccggctgcggcgccgcgcggtgaggttgtctagtccacgctcggagccatgccgtccaagggtccgctgcagtcggtgcaggtcttcggacgcaagaagacagcgacagctgtggcgcactgcaaacgcggcaatggtctcatcaaggtgaacgggcggcccctggagatgattgagccgcgcacgctacagtacaagctgctggagccagttctgcttctcggcaaggagcgatttgctggtgtagacatccgtgtccgtgtaaagggtggtggtcacgtggcccagatttatgctatccgtcagtccatctccaaagccctggtggcctattaccagaaatatgtggatgaggcttccaagaaggagatcaaagacatcctcatccagtatgaccggaccctgctggtagct

SEQ ID NO: 1057 - DNA, 446 bp, Homo sapiens
cgacagaagggtacggctgcgagaagacgacagaagggtacggctgcgagaagacgacagaagggtacggctgcgagaagacgacagaagggtacggctgcgagaagacgacagaaggggaccacgcttttcatctgtcccgctgcgtgttttcctcttgatcgggaactcctgcttctccttgcctcgaaatggaccccaactgctcctgctcgcctgttggctcctgtgcctgtgccggctcctgcaaatgcaaagagtgcaaatgcacctcctgcaagaagagctgctgctcctgctgccctgtgggctgtgccaagtgtgcccagggctgcatctgcaaagggacgtcagacaagtgcagctgctgtgcctgatgccaggacagctgtgctctcagatgtaaatagagcaacctatataaacctggattttttttttttttt

SEQ ID NO: 1058 - DNA, 363 bp, Homo sapiens
gaggatttttgcatcaatgttcatcaaggatattggtctaaaattctcttttggttgtgtctctgccaggctttggtatcaggatgatgctggcctcataaaatgagttagggaggattccctctttttctattgattggaaaagtttcagaaggaatggtaccagttcctccttgtacctctggtagaattcggctgtgaatccatctggtcctggactctttttggttggtaagctattgattattgccacaatttcagagcctgttattggtctattcagaaattcaacttcttcctggtttagtcttgggaggggggtcgccgcacatggattattcaattggtgtgctcacccccccc

SEQ ID NO: 1059 - DNA, 310 bp, Homo sapiens
tgaaagtacgtagttgtctttcgtaggttaaaatgataattgggccgaaacttactgccttacctaaaaggcagcgcagtcaggatattggtaggtcgggggcggctttggaaacccttaagtttacaagcatgcgcggacttgagtgctcattaggtcgccgggcgtccacgtgcagccctggaccctgaaccccggcgtgcgtgggccgtgggccctcggggaaaggttccgtgcactcggagactccggtgaagcctgttcagccgtctgtgtcatgtggacatcttgagtctactctgtcgctctt

SEQ ID NO: 1060 - DNA, 521 bp, Homo sapiens
gctctcggctttcggctcggaggaggccaaggtgcaacttccttcggtcgtcccgaatccgggttcatccgacaccagccgcctccaccatgccgccgaagttcgaccccaacgagatcaaagtcgtatacctgaggtgcaccggaggtgaagtcggtgccacttctgccctggcccccaagatcggccccctgggtctgtctccaaaaaaagttggtgatgacattgccaaggcaacgggtgactggaagggcctgaggattacagtgaaactgaccattcacaacagacaggcccagattgaggtggtgccttctgcctctgccctgatcatcaaagccctcaaggaaccaccaagagacagaaagaaacagaaaaacattaaacacagtgggaatatcacttttgatgagattgtcaacattgctcgacagatgcggcaccgatccttagccagagaactctctggaaccattaaagagatcctggggactgcccagtcagtgggctgtaatgttgat

SEQ ID NO: 1061 - DNA, 283 bp, Homo sapiens
cggctgcgagaagacgacagaaggggcttttccaagcggctgccgaagatggcggaggtgcaggtcctggtgcttgatggtcgaggccatctcctgggccgcctggcggccatcgtggctaaacaggtactgctgggccggaaggtggtggtcgtacgctgtgaaggcatcaacatttctggcaatttctacagaaacaagttgaagtacctggctttcctccgcaagcggatgaacaccaacccttcccgaggcccctaccactttcgggcccccagccgca

SEQ ID NO: 1062 - DNA, 510 bp, Homo sapiens
tacggctgcgagaagcgacagaagggtacggctgcgagaagacgacagaagggtacggctgcgagaagacgacagaagggggagtcctgagctgcgtcccggagcccacggtggtcatggctgccagagcgctctgcatgctggggctggtcctggccttgctgtcctccagctctgctgaggagtacgtgggcctgtctgcaaaccagtgtgccgtgccagccaaggacagggtggactgcggctacccccatgtcacccccaaggagtgcaacaaccggggctgctgctttgactccaggatccctggagtgccttggtgtttcaagcccctgcaggaagcagaatgcaccttctgaggcacctccagctgcccccggccgggggatgcgaggctcggagcacccttgcccggctgtgattgctgccaggcactgttcatctcagcttttctgtccctttgctcccggcaagcgcttctgctgaaagttcatatctggagcctgatgt

SEQ ID NO: 1063 - DNA, 258 bp, Homo sapiens
cggctgcgagaagacgacagaagggggcaaaatgtggagtgtatgttcttttcacagtaatatatgccttttgtaacttcacttggttattttattgtaaatgagtacaaaattcttaatttaagagattgtatgtaatatttatttcattaatttctttccttgtttacgtaaattttgaaagattgcatgatttcttgacagaaatcgatcttgatgctgtggaagtagtttgaggaacatcctatgagttttctt

SEQ ID NO: 1064 - DNA, 199 bp, Homo sapiens
gagaagactacagatggggcggcgcatgatgatgcagtccgggcgcaaaggagctgacatcatgtacacgggcaccgtcgactgttggaggaagatcttcagagatgaggggggcaaggccttcttcaagggtgcgtggtccaacgtcctgcggggcatggggggcgccttcgtgctggtcctgtacgacgagctcaag

SEQ ID NO: 1065 - DNA, 290 bp, Homo sapiens
tcattgatttcttcctgggggcctctctcaaggatgaggttttgaagattatgccagtgcagaagcagacccgtgccggccagcgcaccaggttcaaggcatttgttgctatcggggactacaatggccacgtcggtctgggtgttaagtgctccaaggaggaggccaccgccatccgtggggccatcatcctggccaagctctccatcgtccccgtgcgcagaggctactgggggaacaagatcggcaagccccacactgtcccttgcaaggtgacaggccgctgcggt

SEQ ID NO: 1066 - DNA, 318 bp, Homo sapiens
gctcttctgaggatccggcaagatggcagaagtagagcagaagaagaagcggaccttccgcaagttcacctaccgcggcgtggacctcgaccagctgctggacatgtcctacgagcagctgatgcagctgtacagtgcgcgccagcggcggcggctgaaccggggcctgcggcggaagcagcactccctgctgaagcgcctgcgcaaggccaagaaggaggcgccgcccatggagaagccggaagtggtgaagacgcacctgcgggacatgatcatcctacccgagatggtgggcagcatggtgggcgtctacaacgg

SEQ ID NO: 1067 - DNA, 321 bp, Homo sapiens
gttgtgttgagatccagtgcagttgtgatttctgtggatcccagcttggttccaggaattttgtgtgattggtttaaatccagttttcaatcttcgacagctgggctggaacgtgaactcagtagctgaacctgtctgacccggtcacgttcttggatcctcagaactctttgctcttgtcggggtgggggtgggaactctcgtgaggagcgccagctgtgtaaatgccacgactccgtaattcttattcggtgggaccttgcttccctctgggagctggctcgttttgttggtgtctaacctttcgccgaatcgttaaag

SEQ ID NO: 1068 - DNA, 351 bp, Homo sapiens
ggccaggcgtcctcgtggaagggacatcgtctttaaaccctgcgtggcaatccctgacgcaccgccgtgatgcccagggaagacagggcgacctggaagtccaactacttccttaagatcatccaactattggatgattatccgaaatgtttcattgtgggagcagacaatgtgggctccaagcagatgcagcagatccgcatgccccttcgcgggaaggctgtggtgctgatgggcaagaacaccatgatgcgcaaggccatccgagggcacctggaaaacaacccagctctggagaaactgctgcctcatatccgggggaatgtgggctttgtgttcaccaaggaggac

SEQ ID NO: 1069 - DNA, 317 bp, Homo sapiens
  misc_feature 317: n = A,T,C or G
gttattttattgtaaatgagtacaaaattcttaatttaagagattgtatgtaatatttatttcattaatttctttccttgtttacgtaaattttgaaagattgcatgatttcttgacagaaatcgatcttgatgctgtggaagtagtttgaggagcatcctatgagttttcttagaatgtataaaggttgtagcccatccaacttcaaagaaaaaaatgaccacatactttgcaatcaggctgaaatgtggcatgcttttctaattccaactttataaactagtaaaaaagtgtttgcttattccaccagttctacn

SEQ ID NO: 1070 - DNA, 383 bp, Homo sapiens
atggagatgaaccaggggatttcaaaatcaacaccgatgagattatgacttcactcaagtctgttaatggacaaatagaaagcctcattagtcctgatggttctcgtaaaaaccccgctagaaactgcagagacctgaaattctgccatcctgaactcaagagtggagaatactgggttgaccctaaccaaggatgcaaattggatgctatcaaggtattctgtaatatggaaactggggaaacatgcataagtgccaatcctttgaatgttccacggaaacactggtggacagattctagtgctgaaaagaaacacgtttggtttggagagtccatggatggtggttttcagtttagctacgggatatctggaacttcctga

SEQ ID NO: 1071 - DNA, 354 bp, Homo sapiens
gacgacagaagggtacggctgcgagaagacgacagaagggtacggctgcgagaagacgacagaagggtaccagcgttatgagatcaagatgaccaagatgtataaagggttccaagccttatgggatgccgctgacatccggttcgtctacacccctgccatggagagtgtctgcggatacttacacaggtcccacaaccgcagcgaggagtttctcattgctggaaaactgcatgatggactcttgcacatcactacctgcagttttgtggctccctggaacagcctgagcttagctcagcgccggggcttcaccaagacctacactgttggctgtgaggaatgcacagtgtt

SEQ ID NO: 1072 - DNA, 411 bp, Homo sapiens
gcttccttttgcgggtggcggcgaactcggagagcacgccatgaaggcctcgggcacgctacgagagtacaaggtagtgggtcgctgcctgcccacccccaaatgccacacgccgcccctctaccgcatgcgaatctttgcgcctaatcatgtcgtcgccaagtcccgcttctggtactttgtatctcagttaaagaagatgaagaagtcttcaggggagattgtctactgtgggcaggtgtttgagaagtcccccctgcgggtgaagaacttcgggatctggctgcgctatgactcccggagcggcacccacaacatgtaccgggaataccgggacctgaccaccgcaggcgctgtcacccagtgctaccgagacatgggtgcccggcaccgcgcccgagcccactccat

SEQ ID NO: 1073 - DNA, 455 bp, Homo sapiens
aggggctctcggctttcggctcggaggaggccaaggtgcaacttccttcggtcgtcccgaatccgggttcatccgacaccagccgcctccaccatgccgccgaagttcgaccccaacgagatcaaagtcgtatacctgaggtgcaccggaggtgaagtcggtgccacttctgccctggcccccaagatcggccccctgggtctgtctccaaaaaaaagttggtgatgacattgccaaggcaacgggtgactggaagggcctgaggattacagtgaaactgaccattcagaacagacaggcccagattgaggtggtgccttctgcctctgccctgatcatcaaagccctcaaggaaccaccaagagacagaaagaaacagaaaaacattaaacacagtgggaatatcacttttgatgagattgtcaacattgctcgacagatgcggcaccgatcct

SEQ ID NO: 1074 - DNA, 497 bp, Homo sapiens
tacggatacgagaagacgacagaagggtacggctgcgagaagacgacagaagggtacggctgcgagaagacgacagaagggtacggctgcgagaagacgacagaaggggctctcttccacaggaggcctacacgccgccgcttgtgctgcagccatgtctctagtgatccctgaaaagttccagcatattttgcgagtactcaacaccaacatcgatgggcggcggaaaatagcctttgccatcactgccattaagggtgtgggccgaagatatgctcatgtggtgttgaggaaagcatacattgacctcaccaagagggcgggagaactcactgaggatgaggtggaacgtgtgatcaccattatgcagaatccacgccagtacaagatcccagactggttcttgaacagacagaaggatgtaaaggatggaaaatacagccaggtcctaaccaatggtctggacaacaagctccgtgaagagctggagcgactga

SEQ ID NO: 1075 - DNA, 351 bp, Homo sapiens
  misc_feature 273: n = A,T,C or G
ggcaccagctctctgctctcccagcgcagcgccgccgcccggcccctccagcttcccggaccatggccaacctggagcgcaccttcatcgccatcaagccggacggcgtgcagcgcggcctggtgggcgagatcatcaagcgcttcgagcagaagggattccgcctcgtggccatgaagttcctccgggcctctgaagaacacctgaagcagcactacattgacctgaaagaccgaccattcttccctgggctggtgaagtacatgaactcanggccggttgtggccatggtctgggaggggctgaacgtggtgaaaacaggccgagtgatgcttggggagaccaatccag

SEQ ID NO: 1076 - DNA, 414 bp, Homo sapiens
cagaagggggagaaccatcccggtaacccgatcaccgctggtcaccatgaaccacattgtgcaaaccttctctcctgtcaacagcggccagcctcccaactacgagatgctcaaggaggagcaggaagtggctatgctgggggcgccccacaaccctgctcccccgatgtccaccgtgatccacatccgcagcgagacctccgtgcctgaccatgtcgtctggtccctgttcaacaccctcttcatgaacacctgctgcctgggcttcatagcattcgcctactccgtgaagtctagggacaggaagatggttggcgacgtgaccggggcccaggcctatgcctccaccgccaagtgcctgaacatctgggccctgattttgggcatcttcatgaccattctgctcatcatcat

SEQ ID NO: 1077 - DNA, 262 bp, Homo sapiens
tacggctgcgagaagacgacagaaggggtggccggcgtggtgtcctaccccttcgacacggtgcggcggcgcatgatgatgcagtccgggcgcaaaggagctgacatcatgtacacgggcaccgtcgactgttggaggaagatcttcatagatgaggggggcaaggccttcttcaagggtgcgtggtccaacgtcctgcggggcatggggggcgccttcgtgctggtcctgtaccacgagctcaagaaggtgatctaagggc

SEQ ID NO: 1078 - DNA, 478 bp, Homo sapiens
acttttacgtataattttattttatttcatatatttcctattggctttttacatttaaattatggagcacttcatcatataaaaaacttcaattatatttaaacagtaagtctttggatttttttgccttgtaatttccatattacataataatgagataaacattaatgttttcagggtactttaaattttagataattactcattgtattcatgtgaaatttgtttttactgcatgtgtgggttggaggactgttttcacttctgattcatctttactcttatctcatcagagctcatacctcttgtagttgggggattgcagtttataattccaataaatggggcaaattcaataataacataatacaaatgagtttgaatgcaggacaggtcttcaaagcatacacaacatgggcctacatatgtacaacaataataatttataagttactgtttggatggaaagtaaaagtac

SEQ ID NO: 1079 - DNA, 217 bp, Homo sapiens
agacgacagaagggtacggctgcgagaagacgacagaagggtacggctgcgataagaccacagaagggtacggctgcgagaagacgacagaaggggctcctcttcctttctccgccatcgtggtgtgttcttgactccgctgctcgccatgtcttctcacaagactttcaggattaagcgattcctggccaagaaacaaaagcaaaatcgtcccatg

SEQ ID NO: 1080 - DNA, 334 bp, Homo sapiens
ggctttcccatcttgcaagatggcgggtgaaaaagttgagaagccagatactaaagagaagaaacccgaagccaagaaggttgatgctggtggcaaggtgaaaaagggtaacctcaaagctaaaaagcccaagaaggggaagccccattgcagccgcaaccctgtccttgtcagaggaattggcaggtattcccgatctgccatgtattccagaaaggccatgtacaagaggaagtactcagccgctaaatccaaggttgaaaagaaaaagaaggagaaggttctcgcaactgttacaaaaccagttggtggtgacaagaacggcggtacccgt

SEQ ID NO: 1081 - DNA, 202 bp, Homo sapiens
acgacagaagggtacggctgcgagaagacgacagaagggtacggctgcgagaagacgacagaagggctacaagagcccctgcccctctgttggaggcacagttttagaataaggaggaggagggagaagagaaaatgtaaaggagggagatctttcccaggccgcaccatttctgtcactcacatggacccaagataaaaga

SEQ ID NO: 1082 - DNA, 335 bp, Homo sapiens
ggttggggtctcaggaggcagcgctctcgggacgtctccaccatggcctgggctctgctattcctcaccctcctcactcatggcacagggtcctgggcccagtctgccctgactcagcctgcctccgtgtctgggtctcctggacagtcgatcaccatctcctgcactggaaccagcagtgacgttggtggccataactatgtcgcctggtaccaacaacacccaggcaaagcccccaaactcatcgtttatgatgtccgtcatcggccctcacggggttctgatcgcttctctggctccaagtctggcaacacggcctccctgaccatctctgg

SEQ ID NO: 1083 - DNA, 343 bp, Homo sapiens
gaacactgagtggggtgacaatggcttctttaaaatactcagaggacaggatcactgtggaatcgaatcacaagaggtggctggaattccacgcaccgatcagtactgggaaaagatctaatctgccgtgggcctgtcgtgccagtcctgggggcgagatgggggtagaaatgcattttattctttaagttcacgtaagataccagtttcagacagggtctgaaggactggattggtcaaacatcagacctgtcttccaaggagaccaagtcctggctacatcccagcctgtggttacagtgcagacaggccatgtgagccaccgctgccagcacagagcgtg

SEQ ID NO: 1084 - DNA, 324 bp, Homo sapiens
aaggcagaaggcttttggaagagttagaagaatttggaaggccttaaatatagtagcttagtttgaaaaatgtgaaggactttcgtaacggaagtaattcaagatcaagagtaattaccaacttaatgtttttgcattggactttgagttaagattattttttaaatcctgaggactagcattaattgacagctgacccaggtgctacacagaagtggattcagtgaatctaggaagacagcagcagacaggattccaggaaccagtgtttgatgaagctaggactgaggagcaagcgagcaagcagcagttcgtggtgaagat

SEQ ID NO: 1085 - DNA, 350 bp, Homo sapiens
gactcaaaagcttggaccgcatcctagccgccgactcacacaaggcagagttgccatggagaaaattccagtgtcagcattcttgctccttgtggccctctcctacactctggccagagataccacagtcaaacctggagccaaaaaggacacaaaggactctcgacccaaactgccccagaccctctccagaggttggggtgaccaactcatctggactcagacatatgaagaagctctatataaatccaagacaagcaacaaacccttgatgattattcatcacttggatgagtgcccacacagtcaagctttaaagaaagtgtttgctgaaaataaagaaatccagg

SEQ ID NO: 1086 - DNA, 329 bp, Homo sapiens
gcttttacctcgttgcactgctgagagcaagatgggtcaccagcagctgtactggagccacccgcgaaaattcggccagggttctcgctcttgtcgtgtctgttcaaaccggcacggtctgatccggaaatatggcctcaatatgtgccgccagtgtttccgtcagtacgcgaaggatatcggtttcattaagttggactaaatgctcttccttcataggattatacggggcatctactcaatgaaaaaccatgataattctttgtatatataatatacatttggtcataccatactcgtttgtttattaatatgctacttcgtgggtg

SEQ ID NO: 1087 - DNA, 316 bp, Homo sapiens
tggggaattgcgcttccgccatctttccagcctcagtcggacgggcgcggatacgcttctggaaggaacgccgcgatggctgcgcagggagagccccaggtccagttcaaacttgtattggttggtgatggtggtactggaaaaacgaccttcgtgaaacgtcatttgactggtgaatttgagaagaagtatgtaaccaccttgggtgttgaggttcatcccctagtgttccacaccaacagaggacctattaagttcaatgtatgggacacagccggccaggagatattcagtggactgagagatggctattata

SEQ ID NO: 1088 - DNA, 449 bp, Homo sapiens
agttgaaatctggaactgcctctgttgtgtgcctgctgaataacttctatcccagagaggccaaagtacagtggaaggtggataacgccctccaatcgggtaactcccatgagagtgtcacagagcaggacagcaaggacagcacctacagcctcagcagcaccctgacgctgagcaaagcagactacgagaaacacaaagtctacgcctgcgaagtcacccatcagggcctgagctcgcccttcacaaagagcttcaacaggggagagtgttagagggagaagtgcccccacctgctcctcagttccagcctgaccccctcccatcctttggcctctgaccctttttccacaggggacctacccctattgcggtcctccagctcatctttcacctcacccccctcctcctacttggctttaattatgctaatgttggaggagaatgaa

SEQ ID NO: 1089 - DNA, 147 bp, Homo sapiens
gagaagacgacagaagggacaaagagatctggacagaatcgccggacaggtggcaactgccaacaagaagcattagaacaaaccatgctgggttaataaattgcctcattcgcaaaaaaaaaaaaaaaaaaaaaaaaaaagtcgtat

SEQ ID NO: 1090 - DNA, 166 bp, Homo sapiens
cggagtgctgtgccacctggtgccgacaagaaagccgcggctgatgctgggtcagcaaccgaattccattttagaggcggatttggtcgtggacgtggtcagccacctcagttaaattggagaggattcttttgcattgaataaacttacagtcaaaaaaaaaaaa

SEQ ID NO: 1091 - DNA, 464 bp, Homo sapiens
tttttttttttttttttttttttttttttttttgaggaattaacagtctttattgggctcaaaccaggagtccgggggtcttgaggacctctgggtatttgtcaatttttttctccacgttcttttgggcctgctcctgaaggaaggagcaaatctgctggaaggggggtctgggggtgggctccaaggcccagcaggcctgcatgatgctgtatatattctttggggcaaatgcaggctgggccatttggtatccatcctttaccagtttatagaacttgctgttcaccaggatgccagggtagggattcagcccaagtgagaagatctcccagaggaggatgccataggaccagacgtcgctctgaaccgtgtagacccagtcaaagatgctctctggggccatccacttaacaggcaggcgggcattgcccttgacaatgtatttggagtcattcatgatg

SEQ ID NO: 1092 - DNA, 511 bp, Homo sapiens
cggctgcgagaagacgacagaagggtacggctgcgagaagacgacagaagggtacggctgcgagaagacgacagaagggtacggctgcgagaagacgacagaagggtacggctgcgagaagacgacagaagggtacggctgcgagaagacgacagaagggtacggctgcgagaagacgacagaagggtacggctgcgagaagacgacagaaggggctcttaccgccatcttggctcctgtggaggcctgctgggaacgggacttctaaaaggaactatgtctggaaggctgtggtccaaggccatttttgctggctataagcggggtctccggaaccaaagggagcacacagctcttcttaaaattgaaggtgtttacgcccgagatgaaacagaattctatttgggcaagagatgcgcttatgtatataaagcaaagaacaacacagtcactcctggcggcaaaccaaacaaaaccagagtcatctggggaaaagtaactcgggcccatg

SEQ ID NO: 1093 - DNA, 394 bp, Homo sapiens
gcttatccaaacggctgccgaagatggcggaggtgcacgtcctggtgcttgatggtcgaggccatcttctgggccggctggcggccatcgtggctaaacaggtactgctgggccggaaggtggcggtcgtacgctatgaaggcatcaacatttctggcaatgctctacagaaacaagttgaagtacctggctctcctccgcaagcggatgaacacctacccttcccgaggccactaccacttccggacccccatacgcatcttctggcggaccgtgcgaggtatgctgccccacacaaccaatcgaggccaagccgatctggaccgtctcaaggtgtttgacggcatcccaccggcctacgacaataaaaagcggatggtggttcctgctgccc

SEQ ID NO: 1094 - DNA, 535 bp, Homo sapiens
cggctgcgagaagacgacagaaggggccttttccggaaaaggcgccgcgcggtgaggttgtctagtccacgctcggagccatgccgtccaagggtccgctgcagtcggtgcaggtcttcggacgcaagaagacagcgacagctgtggcgcactgcaaacgcggcaatggtctcatcaaggtgaacgggcggcccctggagatgattgagccgcgcacgctacagtacaagctgctggagccagttctgcttctcggcaaggagcgatttgctggtgtagacatccgtgtccgtgtaaagggtggtggtcacgtggcccagatttatgctatccgtcagtccatctccaaagccctggtggcctattaccagaaatatgtggatgaggcttccaagaaggagatcaaagacatcctcatccagtatgaccggaccctgctggtagctgaccctcgtcgctgcgagtccaaaaagtttggaggccctggtgcccgcgctcgctaccagaaatcctaccgataagcccatcgtgactc

SEQ ID NO: 1095 - DNA, 480 bp, Homo sapiens
aaaggagactgctatcaggttctaatacaagactgtatcccggtactgaagaggtacgccaaagaagggagagaattcgattatgtgattaatgatttgacagctggtccaatctccacgtctccagaagaagattccacatgggagttactcagactgattcttgacctctcaatgaaagtgttgaaacaggatgggaaatattttacacaggggaactgtgtcaatctgacagaagcactgtcgctctatgaagaacagctggggcgcctgtattgtcctgtggaatcttcaaaggagatcgtctgtgtcccttcatacttggaattgtgggtattacacactgtttggaagaaagctaaaccctgaagatcagtatcccctaatcacatgtgctgcaaatagccttactgacctccatattgctgtacatgacatcaaaatgagtcaggcaattgattgtgaattccttaaagtttt

SEQ ID NO: 1096 - DNA, 495 bp, Homo sapiens
cttccagaagtgggcagctgtggtggtgccttctggagaagagcagagatacacatgccatgtacagcatgaggggctgccgaagcccctcaccctgagatgggagccgtcttcccagtccaccgtccccatcgtgggcattgttgctggcctggctgtcctagcagttgtggtcatcggagctgtggtcgctgctgtgatgtgtaggaggaagagctcaggtggaaaaggagggagctactctcaggctgcgtgcagcgacagtgcccagggctctgatgtgtctctcacagcttgaaaagcctgagacagctgtcttgtgagggactgagatgcaggatttcttcacgcctcccctttgtgacttcaagagcctctggcatctctttctgcaaaggcacctgaatgtgtctgcgtccctgttagcataatgtgaggaggtggagagacagcccacccccgtgtccaccgtgacccctgttcccatgctgactt

SEQ ID NO: 1097 - DNA, 378 bp, Homo sapiens
gagaggagctcggcctgcgctgcgccacgatgtccggggagtcagccaggagcttggggaagggaagcgcgcccccggggccggtcccggagggctcgatccgcatctacagcatgaggttctgcccgtttgctgagaggacgcgtctagtcctgaaggccaagggaatcaggcatgaagtcatcaatatcaacctgaaaaataagcctgagtggttctttaagaaaaatccctttggtctggtgccagatctggaaaacagtcagggtcagctgatctacgagtctgccatcacctgtgagtacctggatgaagcatacccaggtaagaagctttttctgtatgaaccctttttaaaaacgtcgccagaaaaaggac

SEQ ID NO: 1098 - DNA, 209 bp, Homo sapiens
ctcctgtggattctcccatcagccatctggttctcctcttaaggccagttgaagatggtcccttacagcttcccaagttaggttagtgatgtgaaatgctcctgtccctggccctacctccttccctgtccccacccctgcataaggcagttgttggttttcttccccaattcttttccaagtaggttttgtttaccctactccccaaa

SEQ ID NO: 1099 - DNA, 499 bp, Homo sapiens
acagaagggtacggctgcgagaagacgacagaaggatacggctgcgagaagacgacagaagggtacggctgcgagaagacgacagaagggtacggctgcgagaagacgacagaagggtacggctgcgagaagacgacagaagggtacggctgcgagaagacgacagaagggaccacgcttttcatctgtcccgctgcgtgttttcctcttgatcgggaactcctgcttctccttgcctcgaaatggaccccaactgctcctgctcgcctgttggctcctgtgcctgtgccggctcctgcaaatgtaaagagtgcaaatgcacctcctgcaagaagagctgctgctcctgctgccctgtgggctgtgccaagtgtgcccagggctgcatctgcaaagggacgtcagacaagtgcagctgctgtgcctgatgccaggacagctgtgctctcagatgtaaatagagcaacctatataaacctggattttttttttttttttt

SEQ ID NO: 1100 - DNA, 309 bp, Homo sapiens
tggctcatgcctgtaatcccagcactttgggaggccaaggagggcggatcgcttgaggtcaggagttcgagaccagcctggccaacatggtgaaaccctgtctctactaaaaatataaaaattagccaggcatggtggtgcacacctgtaatccccactactcaggaggctgaggcaggagaattgcctgaatctgggaggtggaggttgcagtgagccgagattgcaccactgcactccagcctgggtgacaagagcaaaactccgtctcaaaaaagaaaaaaagtataaaaaagaaaaaggttttgg

SEQ ID NO: 1101 - DNA, 514 bp, Homo sapiens
cagaaggggatgtgggaacccttctcttggaagaagttcctaattgtgtctcagaccggtgtaaacaaaccagccagccgccaccttgctaaacctataagctttttaaaatccaatatattctgccaagaatatgccttgatagttagccctcagcccataggtgttttttgttttttaacagaattatatatgtctgggggtgaaaaaacccttgcattccaaaggtccatactggttacttggtttcattgccaccacttagtggatgttcagtttagaaccattttgtctgctccctctggaagccttgcgcagagcttactttgtaattgttggagaataactgctgaatttttagctgttttgagttgattcgcaccactgcaccacaactcaatatgaaaactatttaacttatttattatcttgtgaaaagtatacaatgaagattttgttcatactgtatttatcaagtatgatgaaaagcaatagatatatattcttttattat

SEQ ID NO: 1102 - DNA, 510 bp, Homo sapiens
gggtacggctgcgagaagacgacagaagggtacggctgcgagaagacgacagaagggtacggctccgagaagacgacagaaggggcttcttccacaggaggcctacacgccgccgcttgtgctgcagccatgtctctagtgatccctgaaaagttccagcatattttgcgagtactcaacaccaacatcgatgggcggcggaaaatagcctttgccatcactgccattaagggtgtgggccgaagatatgctcatgtggtgttgaggaaagcagacattgacctcaccaagagggcgggagaactcactgaggatgaggtggaacgtgtgatcaccattatgcagaatccacgccagtacaagatcccagactggttcttgaacagacagaaggatgtaaaggatggaaaatacagccaggtcctagccaatggtctggacaacaagctccgtgaagacctggagcgactgaagaagattcgggcccatagagggctgcgtcacttctgg

SEQ ID NO: 1103 - DNA, 527 bp, Homo sapiens
acagaaggggctctctcctcccgccgcccaagatgccgaaaggaaagaaggccaagggaaagaaggtggctccggccccagctgtcgtgaagaagcaggaggctaagaaagtggtgaatcccctgtttgagaaaaggcctaagaattttggcattggacaggacatccagcccaaaagagacctcacccgctttgtgaaatggccccgctatatcaggttgcagcggcagagagccatcctctataagcggctgaaagtgcctcctgcgattaaccagttcacccaggccctggaccgccaaacagctactcagctgcttaagctggcccacaagtacagaccagagacaaagcaagagaagaagcagagactgttggcccgggccgagaagaaggctgctggcaaaggggacgtcccaacgaagagaccacctgtccttcgagcaggagttaacaccgtcaccaccttggtggagaacaagaaagctcagctggtggtgattgcacacgacgtggatcccatcgag

SEQ ID NO: 1104 - DNA, 109 bp, Homo sapiens
cggctgcgagaagacgacagaaggggagcagtggtgtgtgagagccaagcgtccctctggctgcccactcagtggcaacacccgggagctgttttgtcctttgtggagc

SEQ ID NO: 1105 - DNA, 131 bp, Homo sapiens
cagaagggttttcttgatgtctcataacttctcctttctcttcccacattccgaaaatcctcctatcctaaccttgctacatgaatggtaactgcttgaacacttgtgattggaatgactgatttaaaaag

SEQ ID NO: 1106 - DNA, 340 bp, Homo sapiens
ggctggggtctcaggaggcagcgctctcgggacgtctccaccatggcctgggctctgctattcctcaccctcctcactcagggcacagggtcctgggcccagtctgccctgactcagcctgcctccgtgtctgggtctcctggacagtcgatcaccatctcctgcagtggaaccagcagtgacgttggtggttatgaccatgtctcctggtaccaacaacacccaggcaaagcccccaaactcataatttctgatgtcagtaatcggccctcaggggtttctaatcgcttctctggctccaaatctggcaacacggccttcctgaccatctctgggctcc

SEQ ID NO: 1107 - DNA, 343 bp, Homo sapiens
agcttttccgtgctacctgcagaggggtccatacggcgttgttctggattcccgtcgtaacttaaagggaaattttcacaatgtccggaacccttgatgtcctgcaaatgaaggaggaggatgtccttaagttccttgcagcaggaacccacttatgtggcaccaatcttgacttccagatggaacagtacatctataaaaggaaaagtgatggcatctatatcataaatctcaagaggacctgggagaagcttctgctggcagctcgtgcaattgttgccattgaaaaccctgctgatgtcagtgttatatcctccaggaatactggccagaaggctgtgcg

SEQ ID NO: 1108 - DNA, 429 bp, Homo sapiens
cggctgcgagaagacgacagaaggggctctcgctcgggttttctgccgtcatcttggttccgagttccctgcacagcctcctttttattcccttccttcagaaatgcccggcgaagccacacaaaccgtccctgctacagagcaggagttgccgcacccccaggctgatacagggtctggaacagaatctgacagcgatgaatcagctaccagatcttgaagaacaggattccacccacgcaaccacacaacatgcccagctggcggcagcagctgaaatcgatgaagaaccaggcagcaaagcacaacagagtcggagtgaaaagaaggcaccgaatgctatgtgcaaactgggtcttctgcaggttacaggagttactagagtcactatccggaaatctaagaatatcctctttgtcatcacaaaac

SEQ ID NO: 1109 - DNA, 313 bp, Homo sapiens
  misc_feature 313: n = A,T,C or G
gctctctttccggtgtggagtctggagacgacgtgcagaaatggcacctcgaaaggggaaggaaaagaaggaagaacaggtcatcagcctcggacctcaggtggctgaaggagagaatgtatttggtgtctgccatatctttgcatccttcaatgacacttttgtccatgtcactgatctttctggcaaagaaaccatctgccgtgtgactggtgggatgaaggtaaaggcagaccgagatgaatcctcaccatatgctgctatgttggctgcccaggatgtggcccagaggtgcaaggagctgggtatcacn

SEQ ID NO: 1110 - DNA, 333 bp, Homo sapiens
gcctttccgtctggcggcagccatcaggtaagccaagatgggtgcatacaagtacatccaggagctatggagaaagaagcagtctgatgtcatgcgctttcttctgagggtccgctgctggcagtaccgccagctctctgctctccacagggctccccgccccacccggcctgataaagcgcgccgactgggctacaaggccaagcaaggttacgttatatataggattcgtgttcgccgtggtggccgaaaacgcccagttcctaagggtgcaacttacggcaagcctgtccatcatggtgttaaccagctaaagtttgctcgaagccttca

SEQ ID NO: 1111 - DNA, 488 bp, Homo sapiens
tacggctgcgacaagacgacacaaggatacggctgcgacaagacgacagaagggtacggctgcgacaagacgacagaagggtacggctgcgacaagacgacagaagggtacggctgcgagaagacgacagaagggtacggctgcgagaagacgacagaagggaccacgcttttcatctgtcccgctgcgtgttttcctcttgatcgggaactcctgcttctccttgcctcgaaatggaccccaactgctcctgctcgcctgttggctcctgtgcctgtgccggctcctgcaaatgtaaagagtgcaaatgcaccttctgcgagaagagctgctgctcctgctgacctgtgggctgtgccaagtgtgcccagggctgcatatgctaagggacgttagacaagtgcagctgctgtgcctgatgccaggacagctgtgctcttacatgtaaatagagcaacctatataaacctggattttttttttttttt

SEQ ID NO: 1112 - DNA, 321 bp, Homo sapiens
catgtaatcccagcactttgggaggctgaggcgagggcatcacctgaggtcaggagttcaagaccagcctggccaatatggtgaaacccggtctctactaaaaatacaaaaaattagctgggcatggtggtgggtgcctgtaatcccagctacttgggaggctgaggcaggagaattgcttgaacccgggaggcggagattgcagtgaaatgaggtcgtgccattgcactccagcctgggcaacaagagcgaaactccatctcaaaaaaaaaaacttatctttgttccagccatcacctggcacaattacggaacataatt

SEQ ID NO: 1113 - DNA, 239 bp, Homo sapiens
cgaccagacggaaccatggaagccccagcgcacgttctcttcctcctgctactctggctcccagataccactggagaaatagtgatgacgcagctccagtcaccctgtctgtgtctccaggggaaagagccaccctctcttgcagggcagtcagagtgttgacagcaacttagcctggtaccagcagaaacctggccaggctcccaggctcctcatctatggtgcatccaccagggcca

SEQ ID NO: 1114 - DNA, 530 bp, Homo sapiens
cagaagggtacggctgcgagaagacgacagaagggctttcgcgtctgcggtgcccggagtgtggtacttctcctagttgcagtcaggcttcatacgctattgtcctgcccgttagagcagccagcgggtacagaatggattttggaagagggagtcaccactggacctccaaggaagccacgtgcagacatctacaaccttcgatctcctgacgagtttattgttggccaaaaccaggctttgattgaaccaggatgaatgcgggtgttggaagtagaatatatatatacatataaaattgaaactggcgatggaatatgagaggagccctctggaaagaaaaggacagaccctgtgctttcatgaaagtgaagatctggctgaaccagttccacaaggttactgtatacatagcctgagtttaaaaggctgtgcccacttcaagaatgtcattgttagactttgaaatttctaactgcctacctgcataaagaaaataaaatcttttaaatcaaaaaaaaaaaaaaaaa

SEQ ID NO: 1115 - DNA, 335 bp, Homo sapiens
  misc_feature 335: n = A,T,C or G
gatcgccgcagatccagcgcccagagagacaccagagaacccaccatggccccctttgagcccctggcttctggcatcctgttgttgctgtggctgatagcccccagcagggcctgcacctgtgtcccaccccacccacagacggccttctgcaattccgacctcgtcatcagggccaagttcgtggggacaccagaagtcaaccagaccaccttataccagcgttatgagatcaagatgaccaagatgtataaagggttccaagccttatgggatgccgctgacatccggttcgtctacacccccgccatggagagtgtctgcggatacttccn

SEQ ID NO: 1116 - DNA, 335 bp, Homo sapiens; identical to SEQ ID NO: 1115
  misc_feature 335: n = A,T,C or G

SEQ ID NO: 1117 - DNA, 299 bp, Homo sapiens
ggcatggcccgcgactggcccgacgcccgcggtatctggcacaatgacaataagaccttcctggtgtgggtcaacgaggaggaccacctgcgggtcatctccatgcagaaggggggcaacatgaaggaggtgttcacccgcttctgcaccggcctcacccagattgaaactctcttcaagtctaaggactatgagttcatgtggaaccctcacctgggctacatcctcacctgcccatccaacctgggcaccgggctgcgggcaggtgtgcatatcaagctgcccaacctgggcaagcg

SEQ ID NO: 1118 - DNA, 466 bp, Homo sapiens
taactctgggaggggctcgagagggctggtccttatttatttaacttcacccgagttcctctgggtttctaagcagttatggtgatgacttagcgtcaagacatttgctgaactcagcacattcgggaccaatatatagtgggtacatcaagtccatctgacaaaatggggcagaagagaaaggactcagtgtgtgatccggtttctttttgctcgcccctgttttttgtagaatctcttcatgcttgacatacctaccagtattattcccgacgacacatatacatatgagaatataccttatttatttttgtgtaggtgtctgccttcacaaatgtcattgtctactcctagaagaaccaaatacctcaatttttgtttttgagtactgtactatcctgtaaatatatcttaagcaggtttgttttcagcactgatggaaaataccagtgttgggttttttttt

SEQ ID NO: 1119 - DNA, 160 bp, Homo sapiens
gagaagacgacagatgggtcaaatagctccagcccagatagcacctgcttcaaaggcatctggcaagaaagcataagtggccacccttaaaaggtattaaaggttttttctgacctgttgcgaaaaaaaaaaaaaattaaaatataaaatctcgcatcgt

SEQ ID NO: 1120 - DNA, 155 bp, Homo sapiens
gagaagacgacagaagggactaagagctgcatcctttaccgcacctgtttcatacgcgtctggccagatagcatctggctctgtcatggaaagtgatcctggctctttatcacctgccggggaaataaaaatgtggactgccaaaaagtcgtatc

SEQ ID NO: 1121 - DNA, 446 bp, Homo sapiens
ggcgcttccgccatctttccagcctcagtcggacgggcgcggagacgcttctggaaggaacgccgcgatggctgcgcagggagagccccaggtccagttcaaacttgtattggttggtgatggtggtaccggaaaaacgaccttcgtgaaacgtcatttgactggtgaatttgagaagaagtatgtagccaccttgggtgttgaggttcatcccctagtgttccacaccaacagaggacctattaagttcaatgtatgggacacagccggccaggagaaattcggtggactgagagatggctattatatccaagcccagtgtgccatcataatgtttgatgtaacatcgagagttacttacaagaatgtgcctaactggcatagagatctggtacgagtgtgtgaaaacatccccattgtgttgtgtggcaacaaagtggatatta

SEQ ID NO: 1122 - DNA, 498 bp, Homo sapiens
gggctttcccatcttgcaagatggcgggtgaaaaagttgagaagccagatactaaagagaagaaacccgaagccaagaaggttgatgctggtggcaaggtgaaaaagggtaacctcaaagctaaaaagcccaagaaggggaagccccattgcagccgcaaccctgtccttgtcagaggaattggcaggtattcccgatctgccatgtattccagaaaggccatgtacaagaggaagtactcagccgctaaatccaaggttgaaaagaaaaagaaggagaaggttctcgcaactgttacaaaaccagttggtggtgacaagaacggcggtacccgggtggttaaacttcgcaaaatgcctagatattatcctactgaagatgtgcctcgaaagctgttgagccacggcaaaaaacccttcagtcagcacgtgagaaaactgcgagccagcattacccccgggaccattctgatcatcctcactggacgccacaggggca

SEQ ID NO: 1123 - DNA, 495 bp, Homo sapiens
gcttcctgtctgtaccagggcggcgcgtggtctacgccgagtgacagagacgctcaggctgtgttctcaggatgaccgagtgggagacagcagcaccagcggtggcagagaccccagacatcaagctctttgggaagtggagcaccgatgatgtgcagatcaatgacatttccctgcaggattacattgcagtgaaggagaagtatgccaagtacctgcctcacagtgcagggcggtatgccgccaaacgcttccgcaaagctcagtgtcccattgtggagcgcctcactaactccatgatgatgcacggccgcaacaacggcaagaagctcatgactgtgcgcatcgtcaagcatgccttcgagatcatacacctgctcacaggcgagaaccctctgcaggtcctggtgaacgccatcatcaacagtggtccccgggaggactccacacgcattgggcgcgccgggactgtgagacgacaggctgtggatgtgt

SEQ ID NO: 1124 - DNA, 551 bp, Homo sapiens
aaatttattattcttacaggttaggaatacgagtaaaaataagtaatattttcccttacagaaaattgtaatgataccattgagtacaattaaacaccctgagaatttcacagaaacatcagaattttaatagacagtagccatcgtccttgtggccagtgtgagtgacttctcacagctgcaaacaccctgggccagatttcttaaaacagttacatgacaaaaacaatgttattgatatccaataatgctaaagcctgggtacaccccgtctcactgactggggtttccaaacatctctccactgactgtggtttttcaccaaaggaaaggtaaatggaatattctttgtgccttccatcctagacacaactccggacctaagtacatgggttggtgagtccgtacccgtttggaagtttgaatttcttcttttttccgtgtgacttttgtacggagttttgtatagatgacctgctatctatattcccatgtatttgtgtttttacgcgtggatgaatctttctcctctttgcttacatgtctttctg

SEQ ID NO: 1125 - DNA, 613 bp, Homo sapiens
tcacactacaatagttaattttatttgttcaagagctcagattgcaagcattaaaccaagcataggctttgattctgtgagcccaaattcacatattgaagaagatcaaagcaaactgtgatccatgtacatggatgaaaactaaaggctcgagttaatcacattgtagtttttaaatttctacagcctagagctcactagtcacaggtcttttaggtccttctggatgtcccacagggtatctgcacttttcttgagctgagcaacctcatcatcctttagcttctggttgataacgctggttaatccccgggcattgaggatacatggaaggctcaggaagacttcattctcaatgccatacatcccctttaccattgttgacacgggatgaatcctggatagatttttcaacatggattcaataagatcagccacacttaatccaatagcccagttggtatatccttttagcttgatgacttcataggcactttcaaccaccatcttatgcacttccttccaattttcactatcattgtcagttcccatttctggattcaattcctggagagaaacacctgccacattcacaccactccacacagccaca

SEQ ID NO: 1126 - DNA, 478 bp, Homo sapiens
tctgggcttttcttccacacagtcaaggtccttagtatttcagatgtgttaggtcgatcctcaggtttctttgagagtaatttctgtagaagagttttttcttttttatcaaatatatctgagatgatgccatcccgtaggtctgtgaaaaactttgatgtttcaaaagcagtgtcacatacatgaagaagttcagcaagaattagccccaaagcgtagaggtccacttcctttccatagtcttgcgaagaaatctgttctgggctcatgtatcgcaaagttcccttactccttgttcgctttccatcatttttcagagatgttacaagtccaaagtctccaatctttacttgttttgtatctactaagaatatattacttggcttaagatctctatgaattaatttttttgaatgtatataatccaccccttttgttatttgttcaaagagttccaaagccaaaactttgtctagtt

SEQ ID NO: 1127 - DNA, 833 bp, Homo sapiens
tttttttttttttttttttttttttttcacaaatagcactttttatttgccactatttgaagtctgaactttaaacagattcttggactggtggttcatatccatcagctcgttcaactttagcacctgtctcgtccccagtggcttttccagaactactgccttcaccatgaagctccatgagctttcccaattcaaacttgggcttcttcagcatttttacttttctaacgaagacatcatggagaggataaatagattggcaagccttttctatgtcttttccaatgctgtctggaatcaatttattgaccacttctttcaagtcatttgtctgcacctctcgggtcatgatttccatcatcttcttccggatttggcggacctgttggtgctgagcataagaggtcttccgtatctgattgttgcgttttttagtaaaaccaacacagaacagacgaagcaagtaaccatcggtagtcttgacatcaacgtgagcttcaatcattgtctgccattttttgaccatggaacacattttgtcacgggtaagatccatgccatggaagttagtcaggcagtttttaccctgaacatcttcagtaatcagcttgaattttctaaatgcaacttcatcattctgcaaatcagcaagactcacttcaaacacacgacccttgagaccatcagatgcaattttgggtccttggggtcctggtgacgagcgtcttttccatattctctatattgaacatagcaggtgtttcacatcataccaacctttctaggaaatggatcatccatttcctcttggctcccttttggcggctttc

SEQ ID NO: 1128 - DNA, 893 bp, Homo sapiens
tagaaactgatgtttattttccatcaaccatttttccatgctgcttaagagcctatgcaagaacagcttaagaccagtcagtggttgctcctacccattcagtggcctgagcagtgggagctgcagaccagtcttccgtggcaggctgagcgctccagtcttcagtagggaattgctgaataggcacagagggcacctgtacaccttcagaccagtctgcaacctcaggctgagtagcagtgaactcaggagcgggacgagtccattcaccctgaaattcctccttggtcactgccttctcagcagcagcctgctcttctttttcaatctcttcaggatctctgtagaagtacagatcaggcatgacctcacatgggtgttcacgggaaatggtgccacgcatgcgcagaacttcccgagccagcatccaccacattaaacccactgagtgagctcccttgttgttgcatgggatgggcatgtccacatagcgcagaggagaatctgtgttacacagcgcaatggtaggtaggttaacataagatggctccgtgagaggctggtggtcagccctggggtcaagtaacacaagaagccgtggctccgggaagctggctggatctggttagtggaggttcaggagtgaagcggccagcaattggagtggcttccagtggcagagcaaacttcaggccagcccttctggccggtatttccggagaattataacactgactcagacaggtttttcaatgggaacaatttgccgggctgcccagcgaaagtctctcccggggcctttctgaatttttgaatagagaggcccacttttctccttttagaaatgtatcttccctccggaaggtaagtattggtgccactcaatgggttcc

SEQ ID NO: 1129 - DNA, 226 bp, Homo sapiens
ttgctccttgtcgccctatcctacactctggccagagataccacagctgaacctggagccaacatggacacagaggactctcagacccaaactgccccacaccctctgcagaggttgtggtgaccaactcatgtggactcatacatatgaagaagctctatacatatgcaagacatgcatcacacccttgatgattattcatcacttggatgagtgcccacacagt

SEQ ID NO: 1130 - DNA, 207 bp, Homo sapiens
atggatcacctgaggtcaggagtttgagacgagcctggccaacatggtgaaaccctgtctctactaaaaatacaaaaaattatccaggcatggtggcgggcgcctgtaatcccagctacttgggaggctgaggcaggagaattgcttgaacctgggaggcataggttgcagtgagccgagatcgcaccactgcactccagcctgggc

SEQ ID NO: 1131 - DNA, 337 bp, Homo sapiens
ggtagtcccagccacttgggaggctgaggtgggaggattacctgagcccaggaggcagaggctgcattgagccaagatcatgccacagcactctagcctgggtgacagagtgagaccctgtctcaaaaaataaataagtaaatataataaaaataataactaataggccgggcgcagtggctgatgcctgtaatcccagcactttgggaggctgaggttggtggatcacctgaggtcaggagttcgagaccagcctggccaacgtggtgaaaccccatctctactaaaaacacaaaaattagctgggtatggtggcaggcacctgtaatcccagctt

SEQ ID NO: 1132 - DNA, 308 bp, Homo sapiens
tgctattgctgtatggctgggagctaccagactggacaacacagatagagaagcctcatagcatcccataaagttgcattgaaatgtgctgatcaagggcaggagttcaagaccagcctggtcaacatggtgaaaacctgtctctactaaaaatacaaacatgagctgggtgtggtggtgtgcacctgtaatcatagctacttgggaggctgaggcaggagaatcgcttgaacccaggaggtggagattgcagtgagccgagattgcgccactgctctccagcctggagacagagtgagactccatct

SEQ ID NO: 1133 - DNA, 203 bp, Homo sapiens
acgacagaaggggaagctgctcatgatggctggtatcgatgactgctacacctcagcccggggctgcactgccaccctgggcaacttcgccaaggccacctttgatgccatttctaagagctacagctacctgacccccgacctctggaaggagactgtatttaccaaggctccctatcaggagttcactgaccacctcgtcg

SEQ ID NO: 1134 - DNA, 333 bp, Homo sapiens
gctctcctcccgccgcccaagatgccgaaaggaaagaaggccaagggaaagaaggtggctccggccccagctgtcgtgaagaagcaggaggctaagaaagtggtgaatcccctgtttgagaaaaggcctaagaattttggcattggacaggacatccagcccaaaagagacctcacccgctttgtgaaatggccccgctatatcaggttgcagcggcagagagccatcctctataagcggctgaaagtgcctcctgcgattaaccagttcacccaggccctggaccgccaaacagctactcagctgcttaagctggcccacaagtacagacca

SEQ ID NO: 1135 - DNA, 325 bp, Homo sapiens
tgagcactctgtcactagggtatataagccaggatggacacagggaaggacatttctgcatcagtggtgggtccccatcagttaagagagcctgtgactctgtcgagggaccatggggggtggcaccagagcccagggcacctgagggcctgtctggatgcagctgctagtggtcataggacagcaaacactattcattggattctgacttaggcaggtaccctgccgagtgccttaaaggtgtaatctcagttactcttcacagtacattaaaaaaatagttggctgggtgcagtggctcaggccaggcgcggtggctcatgcc

SEQ ID NO: 1136 - DNA, 451 bp, Homo sapiens
acagaaggggtgtgcctgctgaataacttctatcccagagaggccaaagtacagtggaaggtggataacgccctccaatcgggtaactcccaggagagtgtcacagagcaggacagcaaggacagcacctacagcctcagcagcaccctgacgctgagcaaagcagactacgagaaacacaaagtctacgcctgcgaagtcacccatcagggcctgagctcgcccgtcacaaagagcttcaacaggggagagtgttagagggagaagtgcccccacctgctcctcagttccagcctgaccccctcccatcctttggcctctgaccctttttccacaggggacctacccctattgcggtcctccagctcatctttcacctcacccccctcctcctccttggctttaattatgctaatgttggaggagaatgaataaataaagtgaatctttg

SEQ ID NO: 1137 - DNA, 639 bp, Homo sapiens
attctcttttttgacaaagcactactggctattggaaatgttttatttgtagccggcttggcttttgtaattggtttagaaagaacattcagattcttcttccaaaaacataaaatgaaagctacaggtttttttctgggtggtgtatttgtagtccttattggttggcctttgataggcatgatcttcgaaatttatggattttttctcttgttcaggggcttctttcctgtcgttgttggctttattagaagagtgccagtccttggatccctcctaaatttacctggaattagatcatttgtagataaagttggagaaagcaacaatatggtataacaacaagtgaatttgaagactcatttaaaatattgtgttatttataaagtcatttgaagaatattcagcacaaaattaaattacatgaaatagcttgtaatgttctttacaggagtttaaaacgtatagcctacaaagtaccagcagcaaattagcaaagaagcagtgaaaacaggcttctactcaagtgaactaagaagaagtcagcaagcaaactgagagaggtgaaatccatgttaatgatgcttaagaaactcttgaaggctatttgtgttgtttttccacaatgtgcgaaactca

SEQ ID NO: 1138 - DNA, 399 bp, Homo sapiens
cacctcctcgccagcagccgtccggagccagccaacgagcggaaaatggcagacaatttttcgctccatgatgcgttatctgggtctggaaacccaaaccctcaaggatggcctggcgcatgggggaaccagcctgctggggcagggggctacccaggggcttcctatcctggggcctaccccgggcaggcacccccaggggcttatcctggacaggcacctccaggcgcctaccatggagcacctggagcttatcccggagcacctgcacctggagtctacccagggccacccagcggccctggggcctacccatcttctggacagccaagtgcccccggagcctaccctgccactggcccctatggcgcccctgctgggccactgattgtgccttat

SEQ ID NO: 1139 - DNA, 501 bp, Homo sapiens
ggcaatgaaacgcttggaagaggcccgactccataaggagattcctgagacaacaaggacctcccagatgcaagagctgcacaagtctctccggtctttgaataatttttgcagtcagattggggatgatcggcctatctcctactgtcactttagtcccaattccaagatgctggccacagcttgttggagtgggctttgcaagctctggtctgttcctgattgcaacctccttcacactcttcgagggcataacacaaatgtaggagcaattgtattccatcccaaatccactgtctccttggacccaaaagatgtcaacctggcctcttgtgcggctgatggctctgtgaagctttggagtctcgacagtgatgaaccagtggcagatattgaaggccatacagtgcgtgtggcgcgggtaatgtggcatccttcaggacgtttcctgggcaccacctgctatgaccgttcatggcgcttatgggatttggaggctca

SEQ ID NO: 1140 - DNA, 505 bp, Homo sapiens
ctgaggcccagaggcctgcaagggagtgagttgatagcacagaccctgccctgtgggccccccaaatggaaatgggcagagcagagaccatccctgaaggccccgcccaggcttagtcactgagacagcccgggctctgcctcccatcacccgctaagagggagggagggctccagacacatgtccaagaagcccaggaaaggctccaggagcagccacattcctgatgcttcttcagagactcctgcaggcagccaggccacaagacctcttgtggtcccaccccacacacgccagattctttcctgaggctgggctcccttcccacctctctcactccttgaaaacactgttctctgccctccaagaccttctccttcacctttgtccccaccgcagacaggaccagggatttccatgatgttttccatgagtcccctgtttgtttctgaaagggacgctacccgggaagggggctgggacatgggaagggggaagttgtagg

SEQ ID NO: 1141 - DNA, 267 bp, Homo sapiens
caacatgtgagcatggtcacaagcacaaagctcaagatgacagctcttctaaggaaatggagaagctctgtttataaaaacaaaaacaaaaccagctgctactcataagttggaccagaggaagccccttactatgatctcaggagcttgcaagaagcaggaaggggaatggaataggttaagtttaggcctatcaacctaagcaacagaaataatctgacactaccttatcaggcaaattggggaggggagggtgtatctagctct

SEQ ID NO: 1142 - DNA, 563 bp, Homo sapiens
taagctcggaattcggctcgaggggataaaagccaatttgtctgttacatttcctttcacgtatttcttttagcagcacttctgctactaaagttaatgtgtttactctctttccttcccacattctcaattaaaaggtgagctaagcctcctcggtgtttctgattaacagtaaatcctaaattcaaactgttaaatgacatttttatttttatgtctctccttaactatgagacacatcttgttttactgaatttctttcaatattccaggtgatagatttttgttgttttgttaattaatccaagatttacaatagcacaacgctaaatcacacagtaactacaaaaggttacatagatatgaaaagattggcagaggccattgcaggatgaatcacttgtcacttttcttctgtgctgggaaaaataatcaacaatgtgggtctttcatgagcagtgacggatagtttagcttactatgtttcccccccaattcaatgatctataacaacagagcaaagtctatgctcatttgcagactggaatcattaagtaatttaa

SEQ ID NO: 1143 - DNA, 571 bp, Homo sapiens
cccagcatcaccaaccgagtttggggtaccccccctcacctgccaatttcatccagccagggaagcagccgctctcgtccattgtgcccgacgatcatggtgggccaggacggccaggtccggatggtggtgggagctgctgggggcacacagatcaccacggccactgcactggccatcatctacaacctctggttcggctatgacgtgaagcgggccgtggaggagccccggctgcacaaccagcttctgcccaacgtcacgacagtggagagaaacattgaccaggcagtgactgcagccctggagacccggcaccatcacacccagatcgcgtccaccttcatcgctgtggtgcaagccatcgtccgcacggctggtggctgggcagctgcctcggactccaggaaaggcggggagcctgccggctactgagtgctccaggaggacaaggctgacaagcaatccagggacaagatactcaccaggaccaggaaggggactctgggggaccggcttcccctgtgagcagcagagcagcacaataaatgaggccactgtgccaggctcc

SEQ ID NO: 1144 - DNA, 188 bp, Homo sapiens
gccagcatctcttgggtttgctgagaactcacgggctccagctacctggccatgaccaccacatttctgcaaacttcttcctccacctttgggggtggctcaacccgagggggttccctcctggctgggggaggtggctttggtggggggagtctctctgggggaggtggaagccgaagtatctcagc

SEQ ID NO: 1145 - DNA, 318 bp, Homo sapiens
ttttttttttttttttttttttttttccaagttttatgatttatttaacttgtggaacaaaaataaaccagtttaaccacaaccatgccttactttatcaaatgtataagaagtaaatatgaatcttatatgacaaaatgtttcattcattataacaaaggggcaataatcctgtcaattgtatttctaaattttcccccaaattctaagcagagtatgtaaattggaagttaacttatgcacgcttaactatcttaacaagctttgagtgcaagagattgaagagttcaaatctgaccaaaatgttgatgttggatg

SEQ ID NO: 1146 - DNA, 550 bp, Homo sapiens
  misc_feature 456: n = A,T,C or G
cggagcttgaggaaaccgcagataagtttttttctctttgaaagatagagattaatacaactacttaaaaaaatatagtcaataggttactaagatattgcttagcgttaagtttttaacgtaattttaatagcttaagattttaagagaaaatatgaagacttagaagagtagcatgaggaaggaaaagataaaaggtttctaaaacatgacggaggttgagatgaagcttcttcatggagtaaaaaatgtatttaaaagaaaattgagagaagggactacggagccccgaattaataccaatagaagggcaatgcttttagattaaaatgaaggtgacttaaacagcttaaagtttagtttaaaagttgtaggtgattaaaataatttgaaggcgatcttttaaaaagagataaaaccgaaggtgattaaaagaccttgaaatccatgacgcanggagaattgcgtcatttaaagcctagttaacgcatttactaaacgcagacgaaaatggaaaggttaattgggagtggtaggatgaaacaatttg

SEQ ID NO: 1147 - DNA, 487 bp, Homo sapiens
ccgagcgggaagcgccgggcgagcccactgtgcggccgtcgtgggggaagcgaaggttcctgattccacctacctcctaagtgaaggcttccgtccctggagaggaggcggcgccctgtatcggccttcgtcctccgcgggagctgcggcgccaagatgagtggagaggagaacccagccagcaagcccacgccggtgcaggacgtacagggcgacgggcgctggatgtccctgcaccatcggttcgtggctgacagcaaagataaggaacccgaagtcgtcttcatcggggactccttggtccagctcatgcaccagtgcgagatctggcgcgagctcttctctcctctgcatgcacttaactttggcattggtggtgacggcacacagcatgtactgtggcggctggagaatggggagctggaacacatccggcccaagattgtggtggtctgggtgggcaccaacaaccacggacacacagcag

SEQ ID NO: 1148 - DNA, 528 bp, Homo sapiens
gagagaaggctagaggttttaggaaaaacaagttttgccttattttcagtactgagtgttcagcaggacaagacaggaacgttctgtagcaagcacctagtcagttccattagccctcaggcaaggtggggagatgtaggaaggaaaagcaaacattctgcctcctagatacagtccaccaccatggacaaggcacgaggaaaagaagagacacatacagagactgtttgggatttttctctctctgttttcaccacgcagggaaagcaatgctaaaagtagtttctactttgggcaggaagcatgaagtgttgggtaaggccacggttctgtggccatctaatacgccagcgaggagctactgctgtccatgagctcagcagctgggcactggcacagacagatttttacaaaacccaaagccagagagagggagaatgtgttcctggataggggattaagaacaaagcacgtgggaaatgacaatgtgccttgtttgttctatttctttttttttattttatttct

SEQ ID NO: 1149 - DNA, 518 bp, Homo sapiens
ttttttttttttttttttttttttggggtcactaatttggtagtttataaaaatgctggaaatgaaattgtgtctagactaaattggggagtatgttctattttaaatatttagtttgaaggtcattctcacttttttgcctgattctttcagcgtcaactggcactggcttctgtgggtataagctgctgacttatttgtcaggcagctggaggcaaacgtcactgacaagattcagttatgttctcctctgcccgaagtccctgtcagctacataaagatgggaggttttctttacactgtcaggtgattgcagaccctgttttttcaaatatcagatgtcgacaatggcagcatcagctcctaggagccaactctgaatctgtgggcaatttacagagtaattgatttatacatctctttcgacagagcttcttttgtaaatcttgtaaatcttcacttgctggcatatctcggttctctgggtgaccctgcctatgctgacccttgtgcttatg

SEQ ID NO: 1150 - DNA, 456 bp, Homo sapiens
tttttttttttttttttttttttaaccatcaaattcacagctatttttcgcttttagtgtgctcacagaaaattagaacaccttaagcaggagtttaatagcattttttgtaagcaaagttacattccatctctaagtcaaattggtcaaagcttctccagtatttacaaaacatgatagacaagatgctacacaaaaccattgcatctgaagattttgttttcctttattctcaaagacgactggaaaagaaagcattatctgctgtaatcaaaaacataccacagtataaacagttaccattccacttatcacagcttggttgagtttagaattagtgttttaaaaagtccaagatgactgcagttttacaaaaatgggcagggtggaaagttgcaaacttcatgtgcttctggatatcaagatttgtttttatacaatagtcacagttaaaaa

SEQ ID NO: 1151 - DNA, 486 bp, Homo sapiens
ttttttttttttttttttttttttatcgagcgtgtctatttattgttgctgccaccctggaggagccccagtttcttctgtagctttcttttctgggggatcttcctggctctgcccctccattcccagcctctcactccccatcttgcacttttgctagggttggaggcgctttcctggtagcccctcagagactcagtcagcgggaataagtcctaggggtggggggtgtggcaagccggcctggatcctgtcctgggtcctccttcctccgcagtcccgtctctattgctgggtgtagtgtccatggtctggcctcatctccagctctgtctcagcgccgtgcccctcgcttcttcctctctgaattctgcagcttggtcaccagtttcctctcgtgcccgccagggctggggcggttggtgttggcagcagcttctctcttggtgcgacctttccggcctccacctccgaggtaggaatggg

SEQ ID NO: 1152 - DNA, 609 bp, Homo sapiens
tttttttttttttttctttttttcctgcaaaaaatttcatgtatactgagtaacaacctttgatcgatttattaattagaagctatttataccagtagaaaaatacccacaaacaattaaaattataagactatttttaaattcataaaaatggtactgtactgggtgtgactacatttccagtttttggtgtctcatgtgatacagaatcaggaggacttacatggctggaggggaggggagctgttttcctaatttgttactatttaaaaatggttaagggtggccacatcttgggggcttctcctttaatgtaaagtcccttttggaatatcacttaaaatctgggacaggtcaaatcagctgctactctacacgaccgtgtctgcagtacaggcgtggtgagaagacctatacctcactcggcagagtctcacctatgctgttcgcagcaacgcatcggccgcaggcacagagcgccatggccagagcccaccagggcagccgcctcgcaccacaaccaagggcctcacagcgcgcaatcaaaggtctggggctcactcaacgctgcggtcggagggtcggggcgccttgtctgggcaattttct

SEQ ID NO: 1153 - DNA, 619 bp, Homo sapiens
tcccgggtggagctggctgagtcgcgcgctctgctccacccgacggggctgtgtgtgctgggcctggctcgcggcgaaccgagatggcagagcagtcggacgaggccgtgaagtactacaccctagaggagattcagaagcacaaccacagcaagagcacctggctgatcctgcaccacaaggtgtacgatttgaccaaatttctggaagagcatcctggtggggaagaagttttaagggaacaagctggaggtgacgctactgagaactttgaggatgtcgggcactctacaaatgccagggaaatgtccaaaacattcatcattggggagctccatccagatgacagaccaaagttaaacaagcctccggaaactcttatcactactattgattctagttccagttggtggaccaactgggtgatccctgccatctctgcagtggccgtcgccttgatgtatcgcctatacatggcagaggactgaacacctcctcagaagtcagcgcaggaagagcctgctttggacacgggagaaaagaagccattgctaactacttcaactgacagaaaccttcacttgaaaacaatgattttaatatatctctttctttttct

SEQ ID NO: 1154 - DNA, 602 bp, Homo sapiens
gtatctgcacaattagaaaagtcctcagaagctttttcttggagggtacactttcttcactgtccctattcctagacctggggcttgagctgaggatgggacgatgtgcccagggagggacccaccagagcacaagagaaggtggctacctgggggtgtcccagggactctgtcggtgccttcagcccaccagcaggagcttggagtttgcgagtggggatgagtccgtcaagcacaactgttctctgagtggaaccaaagaagcaaggagctaggacccccagtcctgccccccaggagcacaagcagggtcccctcagtcaaggcagtgggatgggcggctgaggaacggggcaggcaaggtcactgctcagtcacgtccacgggggacgagccatgggttctgctgagtaggtggagctcattgctttctccaagcttggaactgttttgaaagataacacagagggaaagggagagccacctggtacttggccaccctgcctcctctgttctgaaattccatccccctcagcttaggggaatgcacctttttccctttccttctcacttttgcatgtttttactgatcattcgatatg

SEQ ID NO: 1155 - DNA, 629 bp, Homo sapiens
gctcaggcaatccacccgccttggcctcccaaagtgctaggattacaggtatgagccaccacacccagctattttttctttcgttttttaattttaaagttggggggggtctcaatttgttatcctggctgatctcgaactcccggacttaagcgatcctctggctccaagcccactaccagtctcaggtttctttactaaaagatcactacctttttttctcttgtctgctgccatgtgagatgtggctttcaccttccgccatgattgtgaggccttcccagccacgtggaactgtaagtccattaaacctcttttgtaaattaaaaaaaaatcactatttaagatactaggatggattgtgactgttgaggagtacttacatatcctacatttgactacattatttccaaaccaagtattccatccaaaggaacatactgctatcatagagaccaaggagggactgtttaaggttgccaaggtgaagcgagctgagaggctttgtcctcatgccagtaactctgaaatctctcttaattcctgctgtccaggcagcagaatgccatggtttccccaagtaggtagctgctttagcagttaaagcccaaatgtctgttctgctgatc

SEQ ID NO: 1156 - DNA, 500 bp, Homo sapiens
gggccattgttagaatacttcataaaaaaagaagtgtgaaaatctcagtatctctctctctttctaaaaaattagataaaaatttgtctatttaagatggttaaagatgttcttacccaaggaaaagtaacaaattatagaatttcccaaaagatgttttgatcccactagtagtatgcagtgaaaatctttagaactaaataatttggacaaggcttaatttaggcatttccctcttgacctcctaatggagagggattgaaaggggaagagcccaccaaatgctgagctcactgaaatatctctcccttatggcaatcctagcagtattaaagaaaaaagggaactatttattccaaatgagagtatgatggacagatattttagtatctcagtaatgtcctagtgtggcggtggttttcaatgtttcttcatgttaaaggtataagcctttcatttgttcaatggatgatgtttcagattttttttttttttaaaaa

SEQ ID NO: 1157 - DNA, 578 bp, Homo sapiens
aataagtatcaattggtcctcttcacagggaccttcaccagcactgaatattacttagtctcttaatttttgacaaatatttcagtatttatggatgatttattaatttttctaataattatccaaacttatttttatttctctgaatggttagaattgagtaagaccttctgaagatggatacttgaagtagagttatcagagataaagtagagcactttttaaaagttttttttaaatagaaatgttttattgaaattagttcaatttaagtcattcttaaaaaataaattggaatactgatacatagaaaaatctgatgagatttgggattaaggacttctgtttttaagagaactgaaactattgatatttatttggagcaaagatgaatattattaccatacacttttggttaaaatttaaaaattctgatttgaacttcttgcccacagtttcttcctgctctctcaaccctcccttcttaaagtcctttaactatatcctttagttcacttctcccaaaatgctttaaaggtttctcactgcctcatagagattaacaataatatcataat

SEQ ID NO: 1158 - DNA, 637 bp, Homo sapiens
taagttccaaacaagtgaaagagattaatgctcagaagattgttctcatcaccaagtagccttgtctgatgctgtggagccttagttgagatttcagcatttcctaccttgtgcttagctttcagattatggatgattaaatttgatgacttatatgagggcagattcaagagccagcaggtcaaaaaggccaacacaaccataagcagccagacccacaaggccaggtcccgtgctatcacagggtcacctcttttacagttagaaacaccagccgaggccacagaatcccatccctttcctgagtcatggcctcaaaaatcagggccaccattgtctcaattcaaatccatagatttcgaagccacagagtctctccctggagcagcagactatgggcagcccagtgctgccacctgctgacgacccttgagaagctgccatatcttcaggccatgggttcaccagccctgaaggcacctgtcaactggagtgctctctcagcactgggatgggcctgatagaagtgcattctcctcctattgcctccattctcctctctctatccctgaaatccaggaagtccctctcctggcgctccaagcagtttgaagcccaatctgcaaggacatttctc

SEQ ID NO: 1159 - DNA, 504 bp, Homo sapiens
ctggggccgtggctgctggtcccgggtgatgctaggcggctccctgggctccaggctgttgcggggtgtaggtgggagtcacggacggttcggggcccgaggtgtccgcgaaggtggcgcagccatggcggcaggggagagcatggctcagcggatggtctgggtggacctggagatgacaggattggacattgagaaggaccagattattgagatggcctgtctgataactgactctgatctcaacattttggctgaaggtcctaacctgattataaaacaaccagatgagttgctggacagcatgtcagattggtgtaaggagcatcacgggaagtctggccttaccaaggcagtgaaggagagtacaattacattgcagcaggcagagtatgaatttctgtcctttgtacgacagcagactcctccagggctctgtccacttgcaggaaattcagttcatgaagataagaagtttcttgacaatacatgccccagttcatg

SEQ ID NO: 1160 - DNA, 522 bp, Homo sapiens
gttgcaggtcactgtagcgggacttcttttggttttctttctctttggggcacctctggactcactccccagcatgaaggcgctgagcccggtgcgcggctgctacgaggcggtgtgctgcctgtcggaacgcagtctggccatcgcccggggccgagggaagggcccggcagctgaggagccgctgagcttgctggacgacatgaaccactgctactcccgcctgcgggaactggtacccggagtcccgagaggcactcagcttagccaggtggaaatcctacagcgcgtcatcgactacattctcgacctgcaggtagtcctggccgagccagcccctggaccccctgatggcccccaccttcccatccagacagccgagcccgctccggaacttgtcatctccaacgacaaaaggagcttttgccactgactccggccgtgtcctgacacctccagaacgcaggtgctggcgcccgttctgcctgggaccccgggaacctctcctgccggaagccggac

SEQ ID NO: 1161 - DNA, 456 bp, Homo sapiens
agagcacctctgtgtttctctagggagtaacattcaacatttaattgaatcgtgtatcctgataggtggattaggaacaggattcattcctttaactttaacttttggctaaacgacatgccttggattgagtgtatatgtcttccccaaattcatatgttgaagcttaaatcctgaatgtgatggttcttggaattgggacctttggaaggttattaggtcttgagggcagagccctcacgaatggggttaaggcccttataagaagagacatggggccaggtgcagtggctcacacctgtaatcccaacattttgagaggccgagaagggtggatcatgaggtcaggagatggagaccatcctggccaacatggtgaaacctcatctctactaaaaatacaaaaattagctgggcgtggtggtgcgtgcctgtagttccagctacttgggaggc

SEQ ID NO: 1162 - DNA, 530 bp, Homo sapiens
gggagacagcagcaccagcggtggcagagaccccagacatcaagctctttgggaagtggagcaccgatgatgtgcagatcaatgacatttccctgcaggattacattgcagtgaaggagaagtatgccaagtacctgcctcacagtgcagggcggtatgccgccaaacgcttccgcaaagctcagtgtcccattgtggagcgcctcactaactccatgatgatgcacggccgcaacaacggcaagaagctcatgactgtgcgcatcgtcaagcatgccttcgagatcatacacctgctcacaggcgagaaccctctgcaggtcctggtgaacgccatcatcaacagtggtccccgggaggactccacacgcattgggcgcgccgggactgtgagacgacaggctgtggatgtgtcccccctgcgccgtgtgaaccaggccatctggctggtgtgcacaggcgctcgtgaggctgccttccggaacattaagaccattgctgagtgcctggcagatgagctcatcaatgct

SEQ ID NO: 1163 - DNA, 612 bp, Homo sapiens
tacggccgggacatgaaggagctaggagtgggaatagctttgcgaaaaatgggcgcaatggccaagccagattgtatcatcacttgtgatggtaaaaacctcaccataaaaactgagagcactttgaaaacaacacagttttcttgtaccctgggagagaagtttgaagaaaccacagctgatggcagaaaaactcagactgtctgcaactttacagatggtgcattggttcagcatcaggagtgggatgggaaggaaagcacaataacaagaaaattgaaagatgggaaattagtggtggagtgtgtcatgaacaatgtcacctgtactcggatctatgaaaaagtagaataaaaattccatcatcactttggacaggagttaattaagagaatgtccaagctcagttcaatgagcaaatctccatactgtttctttctttttttttcattactgtgttcaattatctttatcataaacattttacatgcagctatttcaaagtgtgctggattaattaggatcatccctttggttaataaataaatgggtttgtgctaatatatcttgtatgcattctttaaaccttacaggaaattagtgatgagtttt

SEQ ID NO: 1164 - DNA, 242 bp, Homo sapiens
cggcgtctctggccctttcttattctttggctcctcatccaccgtgatgagaagcgctgctgaggccacggcacactgcttggcttgggtggcggggtcatggccagttggtgtcatcagcaacgagaaaaagcacaggttagctccccattagatggaaaagtgtaaggactgataagggctgcatcctcagcagtgtacagagtcccccgcgctctgaggttggagagaaagaacagacc

SEQ ID NO: 1165 - DNA, 459 bp, Homo sapiens
ttatctaacgtttctaacaggggtgttaatgatattagcagcaagagctatgagaaataactttagacattatttcattgaaccttcccaactgaaattattttatgatgttataacatggatagtaactcaagtagcaataagttacacagttgtgccatttgtgcttctttctataaaaccatcactcacgttttacagctcctggtattattgcctgcacattcttggtatcttagtattatcgttgttgccagtgaaaaaaactcaaagaaggaagaatacacatgaaaacattcagctctcacaatccaaaaagtttgatgaaggagaaaattctttgggacagaacagtttttctacaacaaacaatgtttgcaatcagaatcaagaaatagcctcgagacattcatcactaaagcagtgatcgggaaggctctgagggctgttttttttttt

SEQ ID NO: 1166 - DNA, 632 bp, Homo sapiens
cggactaagataagaccatcatcatgtggaaactgaccagggatgagaccaactatggaattccacagcgtgctctgcggggtcactcccactttgttagtgatgtggttatctcctcagatggccagtttgccctctcaggctcctgggatggaaccctgcgcctctgggatctcacaacgggcaccaccacgaggcgatttgtgggccataccaaggatgtgctgagtgtggccttctcctctgacaaccggcagattgtctctggatctcgagataaaaccatcaagctatggaataccctgggtgtgtgcaaatacactgtccaggatgagagccactcagagtgggtgtcttgtgtccgcttctcgcccaacagcagcaaccctatcatcgtctcctgtggctgggacaagctggtcaaggtatggaacctggctaactgcaagctgaagaccaaccacattggccacacaggctatctgaacactgtgactgtctctccagatggatccctctgtgcttctggagacaaggatggccaggccatgttatgggatctcaacgaaggcaaacacctttacacgctagatgggtggggacatcatcaacgccctgtgcttcagccctaa

SEQ ID NO: 1167 - DNA, 653 bp, Homo sapiens
tgtccgacaaccctggcgtccatgagcctggtgagcctgatttaaatacattgggaatatgcatgggaatgaggctgttggacgagaactgctcattttcttggcccagtacctatgcaacggataccagaaggggaacgagacaattgtcaacctgatccacagtacccgcattcacatcatgccttccctgaacccagatggctttgagaaggcagcgtctcagcctggtgaactcaaggactggtttgtgggtcgaagcaatgcccagggaatagatctgaaccggaactttccagacctggataggatagtgtacgtgaatgagaaagaaggtggtccaaataatcatctgttgaaaaatatgaagaaaattgtggatcaaaacacaaagcttgctcctgagaccaaggctgtcattcattggattatggatattccttttgtgctttctgccaatctccatggaggagaccttgtggccaattatccatatgatgagacgcggagtggtagtgctcacgaatacagctcctccccagatgacgccattttccaaagcttggcccgggcatactcttctttcaacccggccatgtctgaccccaatcggccaccatgtcgcaagaatgatgatgacagcagctttgtag

SEQ ID NO: 1168 - DNA, 566 bp, Homo sapiens
atgaatttataaatctggatttgccttgtgtccttctgagttttcaaaggcaagtattcaacagtccctgtgtgatgactgacagggttatttgccccatccacatccaccttcggaatacattaacttcctttgtaatttatttgaaagtagtgttaaactcattcagatcattcagttggattttcccaatgaagaggaaaaggaaagtagttattcctagctccatttcttattttccaccaaatttaattgaagggcattaattagatgtcttcaccctgaatttagactttgctctgtgttctcccggtaactgtcagacaaaaagtttattggctctgaggaactgagaaatgttgggaacctggtttctgctgtacacaggaaagatttgtaagtgagctctctctttgaaaacaggacccaggctgggcacagcagctcatgcctgtaatcctagtattataggaggcagaggctcgggaggattgcttgagcccaggagttcaagatcagcctaggcaacatagggagaccctatccctacaaaaaatttctgaaaa

SEQ ID NO: 1169 - DNA, 579 bp, Homo sapiens
cagctttgatgactacccacctagaagaggtgatgatagctttggagacaagtatcgagatcgttatgattcagaccggtatcgggatgggtatcgggatgggtatcgggatggcccacgccgggatatggatcgatatggtggccgggatcgctatgatgaccgaggcagcagagactatgatagaggctatgattcccggataggcagtggcagaagagcatttggcagtgggtatcgcagggatgatgactacagaggaggcggggaccgctatgaagaccgatatgacagacgggatgatcggtcgtggagctccagagatgattactctcgggatgattataggcgtgatgatagaggtcccccccaaagacccaaactgaatctaaagcctcggagtactcctaaggaagatgattcctctgctagtacctcccagtccactcgagctgcttctatctttggaggggcaaagcctgttgacacagctgctagggaaagagaaagccaagatccactaccggaagaagaaatagctcatgaggctacggaaacaggccgagaagaacgtggaga

SEQ ID NO: 1170 - DNA, 619 bp, Homo sapiens
tcaggcagcacttccctgccactcctctgctcgattatgcactggaagtagagaagataccacctcgaagaagccaaatcttatcctgaatgtagatggtctcatcggagtcgcatttgtagacatgcttagaaactgtgggtcctttactcgggaggaagctgatgaatatattgacattggagccctcaatggcatctttgtgctgggaaggagtatggggttcattggacactatcttgatcagaagaggctgaagcaggggctgtatcgtcatccgtgggatgatatttcatatgttcttccggaacacatgagcatgtaacagagccaggaaccctactgcagtaaactgaagacaagaactcttcccccaagaaaaagtgtacagacagctggcagtggagcctgctttatttagcaggggcctggaatgtaaacagccactggggtacaggcaccgaagaccaacatccacaggctaacaccccttcagtccacacaaagaagcttcatatttttttataagcatagaaataaaaaccaagccaatatttgtgactttgctctgctacctgctgtatttattatatggaagcatctaagtactgtcaggatg

SEQ ID NO: 1171 - DNA, 611 bp, Homo sapiens
acaaaatataaattggatctagaagaagggcaatgcaggcaatggaaaaatagtagaaatccctttaaggttagttggtaaaatcaggtaagtttatttataatttgctttcatttatttcactgcaaattatattttggatatatatatattgtgcttcctctgcctgtcttacagcaattcgccttgcagagttctaggaaaaaggtggcatgtgtttttactttcaaatatttaaatttccatcattctaacaaaatcgatttttcagagtaatgattctcactgtggagtcatttgattattaagacccgttggcataagattacatcctctgactataaaaatcctggaagaaaacctaggaaatattcgtctggacattgcacttggcaatgaatttatgggtaagtcctcaaaagcaattgccagaaaaatgaaaattgacaagcgtgatttaattaaactaaagagctgcttctgcacagcatgagaaactctcaagggggattgaacagacagcctacagagtggaagaaaatattcacactatgcatacagcaaaggcctattatccagaatctataagagacttagacaaatcaagaagc

SEQ ID NO: 1172 - DNA, 442 bp, Homo sapiens
ggcagccggcccacatgtctctcaagtacctgtcccctcgctctggtgattatttcttgcagaatcaccacacgagaccatcccggcagtcatggttttgctttagttttccaagtccgtttcagtcccttccttggtctgaagaaattctgcagtggcgagcagtttcccacttgccaaagatcccttttaaccaacactagcccttgtttttaacacacgctccagcccttcatcagcctgggcagtcttaccaaaatgtttaaagtgatctcagaggggcccatggattaacgccctcatcccaaggtccgtcccatgacataacactccacacccgccccagccaacttcatgggtcactttttctggaaaataatgatctgtacagacaggacagaatgaaactcctgcggctctttggcctgaaagtgggaatggt

SEQ ID NO: 1173 - DNA, 517 bp, Homo sapiens
gtacaaggtattctccaagttctacctgacgtaccccaccaaaagaaacgaattccattttaacatttattcattcaccttcacctggtggtgatcctcaggagcagagactgttatgaattctggcgtggcttatgaaattaaaagttgccatcaaagccattttcttttaatttcacaaacatcaggcaatttccagggttggtctagagtcttgccactaaatattgatcactcgtttaaggactttccactccattgcaactgatgccactatatttgcctagcaacttgcagctacttccttttcaaagcctcatgtatctcccagacccttctcttgaagtccaataacaagaccaagtaagaatgtttcaacaatgcgttggcaagagatgtgagatgacaacaggaacatacaagatactgtgaatctagatgttctgacctaaaggtgtagtctacatagccccagcttggggtccaatccatctgtccctggcatgtgccttcacgt

SEQ ID NO: 1174 - DNA, 616 bp, Homo sapiens
tgcccgccgggactcgggctgccggccgacaaaggacggtcctcgggggttctgaagtctgacccggccagtgggaaagccacctgcatcacaaagcgaggggcacacctgaaccggggctggcgggaagagaaacagggaaaattgaccaagagattcacaaatacaacaccccaggattcactggttgcctctccagagtccagttcaaccagatcgtccctctcaaggccgccttgaggcagacaaacgcctcggctcacgtccacatccagggcgagctggtggagtccaactgcggggcctcgccgctgaccctctcccccatgtcgtccgccaccgacccctggcacctggatcacctggattcagccagtgcggattttccatataatccaggacaaggccaagctataagaaatggagtcaacagaaactcggctatcattggaggcgtcattgctgtggtgatgttcaccatcctgtgcaccctggtcttcctgatccggtacatgttccgccacaagggcacctaccataccaacgaagcaggggggcggagtcggcagagagcgcggacgccgccatcatgaacaacgaccccaacttcacagag

SEQ ID NO: 1175 - DNA, 619 bp, Homo sapiens
aaaccatcaagctatggaataccctgggtgtgtgcaaatacactgtccaggatgagagccactcagagtgggtgtcttgtgtccgcttctcgcccaacagcagcaaccctatcatcgtctcctgtggctgggacaagctggtcaaggtatggaacctggctaactgcaagctgaagaccaaccacattggccacacaggctatctgaacacggtgactgtctctccagatggatccctctgtgcttctggaggcaaggatggccaggccatgttttgggatctcaacgaaggcaaacacctttacacgctagatggtggggacatcatcaacgccctgtgcttcagccctaaccgctactggctgtgtgctgccacaggccccagcatcaagatctgggatttagagggaaagatcattgtagatgaactgaagcaagaagttatcagtaccagcagcaaggcagaaccaccccagtgcacctccctggcctggtctgctgatggccagactctgtttgctggctacacggacaacctggtgcgagtgtggcaggtgaccattggcacacgctagaagtttatggcagagctttacaaataaaaaaaaaaactggcttt

SEQ ID NO: 1176 - DNA, 617 bp, Homo sapiens
tggggataaagtgagactccggccagtgtgccagctggatgcatagaagtcccttggacgattcgtcttaaacggacgttattgcgcccccactatgagatgggagtatttagaggagcaggacccagtcctgcctgcgaggggcttaaggtggggtgcgtagaagcactgacagttatccagagctagggactgaatcggatccctcacgcagctctcatttactgctagatctttcaaagaatgctttatctcaatctagatctttcgaaaaatgctttatctcaatcttattgaaagggaaaccgcgtcgaagaagctgaataaattaacaggcaccatccccgcaaaaagggagacgtgataagaatggacaccagatctctttgaccctggagcttgagagtaattaagctcacagctttggggtagattctctgttcaattaccttctatgtgaccttgagcaagttatttactctttcttgcctcagttctatcctgtataaaaataaggattataattgtacatagtgcacatagtgtggtctctatattattaccagacacatagtgtggtgtctatatatgctgttattaccagacactataatata

SEQ ID NO: 1177 - DNA, 480 bp, Homo sapiens
taaccctgctgtcctttttattgtttttaattaatatttttgttttaattgatagcaaaatagtttatgggtttggaaacttgcatgaaaatattttagccccctcagatgttcctgcagtgctgaaattcatcctacggaagtgaccgcaaaactctagagggggagttgagcaggcgccagggctgtcatcaacatggatatgacatttcacaacagtgactagttgaatcccttgtaacgtagtagttgtctgctctttgtccatgtgttaatgaggactgcaaagtcccttctgttgtgattcctaggacttttcctcaagaggaaatctggatttccacctaccgcttacctgaaatgcaggatcacctacttactgtattctacattattatatgacatagtataatgagacaatatcaaaagtaaacatgtaatgacaatacatactaacattcttgtaggagtggttagaga

SEQ ID NO: 1178 - DNA, 336 bp, Homo sapiens
gtgagaacatctaccccgcagagctcgaggacttctttcacaccccccccaaggtgccggaagtgcaggtggtgggagtgaaggacgatcggatgggggaagagatttgtgcctgcattccgctgaaggacggggaggagaccacgggggaggagataaaagctttctgcaaagggaagatctctcacttcaagattccgaagtacatcgtgtttgtcacaaactaccccctcaccatttcaggaaagatcccgaaattcaaacttcgagagcagatggaacgacatctaaatctgtgaataaagcagcaggcctgtcctggccggttggcttgac

SEQ ID NO: 1179 - DNA, 269 bp, Homo sapiens
ggctgtgttggaagctggcttagctggtggggcagccttatttcaattaaaagggcattgactgggagcgggggtcctggagtttgttgcatttcctattgccctcaaaatgagaaaccaggaaaatagcagattggagccttccagaaggcagtaaatggctgtttttattgacaaaaggaaaacattttacctgcctctcactgatggcatctcactggcttaaaatgaaggcaggttgtagtaaaaaaaaaaagtctacatttttc

SEQ ID NO: 1180 - DNA, 617 bp, Homo sapiens
atgtcatcttaaatgagccctctgcagatgccccagctgctctctaccagacaattgaagaaaatattaaaatctttgaagaagaagaagttgaatttatcagtgtgcctgtcccagagtttgcagatagtgatcctgccaacattgttcatgactttaacaagaaacttacagcctatttagatcttaacctggataagtgctatgtgatccctctgaacacttccattgttatgccacccagaaacctactggagttacttattaacatcaaggctggaacctatttgcctcagtcctatctgattcatgagcacatggttattactgatcgcattgaaaacattgatcacctgggtttctttatttatcgactgtgtcatgacaaggaaacttacaaactgcaacgcagagaaactattaaaggtattcagaaacgtgaagccagcaattgtttcgcaattcggcattttgaaaacaaatttgccgtggaaactttaatttgttcttgaacagtcaagaaaaacattattgaggaaaattaatatcacagcataaccccaccctttacattttgtgcagtgattattttttaaagtcttctttcatgtaagtag

SEQ ID NO: 1181 - DNA, 95 bp, Homo sapiens
agaagactgtcaccatctccaagccctgtggcaaactgaccaagcccaaacctcaagccgaatctaaaaaaaaaaaaaaaaaaaaaaaaaaaaaa

SEQ ID NO: 1182 - DNA, 256 bp, Homo sapiens
gtagagacagactccggcagccctggacttgctagcccaaagaaggaggatgggggggggctgtttcacctggtttgtcctaaggccatagttaaaaagtaccagctctggctggggtccgtgaagcccaggccaggcagccaaatcttgcctgtgctgggcatacaaccctctgctttcacatctctgagctatatcctcattaggggaggtggcttttgctttatagtttggctggggagcacttaattcttcc

SEQ ID NO: 1183 - DNA, 423 bp, Homo sapiens
tttttttttttttttttttttttttcttttttttttttttttttttttcccaagaccatcctttattgtagtattagttcatggtaactgcatgaaaaaacatttcaggaggaatttacaatttccagcttaaagaacttgcccaccaacataaccaatttatgaaagtcaattcattaaaaggtatagaacctcttgttgggcatgatggcaagggacaaagctacaacttggcctgtgcctttggaagctgaggcaggaggaccatctgagcccaggagcctgaaaccagcctgggcaacataaagaatccgtctcaacaaaaaaaaaattttagccaggtgtgctgtgagctgtagtcccagctacaaggtgggaggattgcttaggcctgggtgattgaggatgcaatgagctgtgatt

SEQ ID NO: 1184 - DNA, 374 bp, Homo sapiens
tttttttttttttttttttttgtcaaaatagtttattatgttcagaaaaatcacagtttgaggaaaccttaaacaataagtacacaagagatgccccatggggcattccatagcagagacagactcctgtatgttttattccagaggcattgcatggtgataataaaatgataggaaatagaggaaaatagatacaggaaaaggcaatagacagggaagccagctagatgttagagtacggagcaatcgaggaggcataaccacacttggggtggctatagggctggaaaacgctgaagatgactgctttcactgaggtcaaggattgtaatattgccagctttgtaaagtcattaaagcagaagtttcttcag

SEQ ID NO: 1185 - DNA, 100 bp, Homo sapiens
gaagtctctttaagaaaatagtttaaacaatttgttaaaaaattttccgtcttatttcatttctgtagcagttgatatctggctgtcctttttataatgc

SEQ ID NO: 1186 - DNA, 582 bp, Homo sapiens
tgacacacaattggggcactgaagatgatgagacccaaagttaccacaatggcaattcaaaccctcgaggattcggtcatattggaattgctgttcctgatgtatacagtgcttgtaaaaggtttgaaaaactgggagtcaaatttgtgaagaaacctgatgatggtaaaatgaaaggcctggcatttattcaagatcctgatggctactggattgaaattttgaatcctaacaaaatggcaaccttaatgtagtgctgtgagaattctcctttgagatttcagaagaaaggaaacaatgtgattcaagatatttacataccagaagcatctaggactgatggatcactgtcccgattcaaattattcttcagtccatttccccttcctatttcagctgttccttttcacctaactgttcagtcattctggttttcaagcagtgctttatctcatgtccttgaatatagttgtgtaactttattttttaggtaataattagaacagttcccttcagaggctgcatttgccttcttctgccacctaaatattacttcccttcaaatctgcctttgaatcatca

SEQ ID NO: 1187 - DNA, 396 bp, Homo sapiens
ccttctgctctacgagaactatgggcagtcggaaacgggactaatttgtgccacctactggggaatgaagatcaagccgggtttcatggggaaggccactccaccctacgacgtccaggtcattgatgacaagggcagcatcctgccacctaacacagaaggaaacattggcatcagaatcaaacctgtcaggcctgtgagcctcttcatgtgctatgagggtgacccagagaagacagctaaagtggaatgtggggacttctacaacactggggacagaggaaagatggatgaagagggctacatttgtttcctggggaggagtgatgacatcattaatgcctctgggtatcgcatcgggcctgcagaggttgaaagtgctttggtggagcaccc

SEQ ID NO: 1188 - DNA, 478 bp, Homo sapiens
ggaggagagcgtgagaggctacgactggtccccgcgcgacgcccggcgcagcccaaaccagggccggcagcaggcggagcggaggagcgtgctgcggggcttctgcgccaactccagcctggccttccccaccaaggagcgcgcattcgacgacatccccaactcggagctgagccacctgatcgtggacgaccggcacggggccatctactgctacgtgcccaaggtggcctgcaccaactggaagcgcgtgatgatcgtgctgagcggaagcctgctgcaccgcggtgcgccctaccgcgacccgctgcgcatcccgcgcgagcacgtgcacaacgccagcgcgcacctgaccttcaacaagttctggcgccgctacgggaagctctcccgccacctcatgaaggtcaagctcaagaagtacaccaagttcctcttcgtgcgcgaccgcttcgtgcgcctgatctccgccttccgc

SEQ ID NO: 1189 - DNA, 450 bp, Homo sapiens
tttttttttttttttttttttttttgcggcttggaatctattttatgccaccagttggtcctcatcagataaaatttccttaggagtgcagagggctcattgcgaaaataaaaataataaaaataaatcaaacttcctaaaagcaaaagattgaaaaccactaacagtccaggtgcctcgttttatagaaaaacaggcccagggaactactagggcttatccaaatgtacagtttgaggcagagttacgaatggaacccagggcctcctggcgctgtccagagtggagttccttaggacccctgcaagccagccaagtccaaatctttgggccggggcctggagtccgccctactagttacctcctctcctctcggggtgactgaagctcgtggtgcaaagctaccatctcctgtcaatgggggcccctgggcctttctcattctgcccc

SEQ ID NO: 1190 - DNA, 602 bp, Homo sapiens
atgtaacagaatacctagctattactttagcagaaagtagagataagggaaaagaactgtaagtctgaagatgggcattatgcaagaacagattatgcagagaatgctaacaaattagaagaaagtgccagagaacaccacataccttgtccggaacattacaatggcttctgcatgcatgggaagtgtgagcattctatcaatatgcaggagccatcttgcaggtgtgatgctggttatactggacaacactgtgaaaaaaaggactacagtgttctatacgttgttcccggtcctgtacgatttcagtatgtcttaatcgcagctgtgattggaacaattcagattgctgtcatctgtgtggtggtcctctgcatcacaagggccaaactttaggtaatagcattggactgagatttgtaaactttccaaccttccaggaaatgccccagaagcaacagaattcacagacggaagcaaaatacagggcactacagttcagacaatacaacaagagcgtccacgaggttaatctaaagggagcatgtttcacagtggctggactaccgagagcttggactacacaatacagtattatagac

SEQ ID NO: 1191 - DNA, 622 bp, Homo sapiens
acttaagattttttcaatgtaagaaaaatgcaatgaaataatagctgcaaatacccactactaacaattgcttggccttcttatatagacctcccgaggttctcatcttttacatttcaggagtagaatcagttaaaaactaatctttatatgtaagggatgagagagagaaagaggagggtatgtgtatgcacacatgtgtgtgtgtgtggtgggtagtaattttaattcaatgatttactagagttcgatgtcgtttgctgataaatgaagcaggaggaagagccaggtttggaggggacgagagaatgagttccatttgtctcatatagaagttgaagtaactgagtgatgatgggtagagatgtccctcaggggtagccacagtattttatttactttttattcaccacatgcagcaaggagctttgttctccaaaatgctgtcaattatttttctaaattacaggtttgattgcttcactgtattttcatgtctcattactacctttacgcttaaaaccagaaactgtgccacagcgttaaagattctgctaacttttaaaatacagaactctggagatgccataattagattgcagatttatgagtcttctggata

SEQ ID NO: 1192 - DNA, 384 bp, Homo sapiens
ttttttttttttttttttttttttttggagcaacatcattccccccattttcaaccaccatccctccctggtactaaagggaatgctgcaaggaggaaaagaagggagaagggaagcagaggtggtggagaaggatctgaaatgctacttcctacacgctttttttttcttggaggtggaaggagtggaggatgatgatgaaaattcaagcagcatgtactagacggcagagcagcatgagctacatccacactgtgcaaagtccttaatgtgcacacctagaggagcaagggccctgttctcagttaacagttgtcaagagaaaaagacaggttgtcctgctgggttaactggcaaggaaagttttagggactatgatggctc

SEQ ID NO: 1193 - DNA, 497 bp, Homo sapiens
aaggccaagcaaggttacgttatatataggattcgtgttcgccgtggtggccgaaaacgcccagttcctaagggtgcaacttacggcaagcctgtccatcatggtgttaaccagctaaagtttgctcaaagccttcagtccgttgcagaggagcgagctggacgccactgtggggctctgagagtcctgaattcttactgggttggtgaagattccacattcaaattttttgaggttatcctcattgatccattccataaagctatcagaagaaatcctgacacccagtggatcaccaaaccagtccacaagcacagggagatgcgtgggctgacatctgcaggccgaaagagccgcggccttggaaagggccacaagttccaccacactattggtggctctcgccgggcagcttggagaaggcgcaatactctccagctccaccgttaccgctaatataagtaaagtttgtaaaattcatacttaataaacaattt

SEQ ID NO: 1194 - DNA, 430 bp, Homo sapiens
gcttttgtgacaatttaaaaaagttagctcatgtatatacacggtgggggtgagaactgacagcttgctcagatctaggagaacgcagagtgaaatgctatcattcaaccatgtcagtttgctgcccccggggcatttcaaaccaaacctttctacgggagattctgtccatctgtcagcctgctgtggtcacaggtctccgttcctcagtgtgaacggggactccgggctgcagcgtgccacccgcctcctgcatgtgtggagtagatggtttcgaactccgtggcagaagggaaatttaagaggccaccggggctccatctctttgtacggccatgtgactgggaagcaaatcaaaggaagccgagttttaacctgttgattcttaagagcgatgaagggggacaggagagtctgtggcctgctgtgc

SEQ ID NO: 1195 - DNA, 352 bp, Homo sapiens
gtgtgaggtccagggttgctaggaaaagaaatcagcagacacaggtgtagaccagagtgtttcttaaatggtgtaattttgccctctctgtgtcctggggaatactggccatgcctggagacatatcactcaatttctctgaggacacagataggatggggtgtctgtgttatttgtgggatacagagatgaaagaggggtgggatccacactgagagagtggagagtgacatgtgctggacactgtccatgaagcactgagcagaagctgggggcacaacgcaccagacactcacagcaaggatggagctgaaaacatgacccactctgtcctggaggcactgggaagcct

SEQ ID NO: 1196 - DNA, 438 bp, Homo sapiens
aagctcatctaccttcagcactaccgctgagccggcgcccgggtgggcctggacacagatgacctctacgggagtctgaacgccaagatttagtctcaggattaaccttgcttgcacagaagttagaacactctcagttttttgtcatgtaagatactaacctagccaccctgggagagaacagaaagctgtccctggctgcgctttctcagccctgggaggggcgcctgaacccagaacatttccctaaccccaacctggtaggactcagccacttcttcaggaatttcacttatttggacgggattttaggtttccctcccttccccaaaccatacagttgagaagtaattcagaagtaggccagaagacactttattcgtttatattgtgagaaaacagccccatcaggcttgtgttaaggcaatggactgaatg

SEQ ID NO: 1197 - DNA, 430 bp, Homo sapiens
aagaatgagagtgcccggcagcagctcgagcggcagaacaaggagctccggagcaagctccacgagatggagggggccgtcaagtccaagttcaaatccaccatcgcggcgctggaggccaagattgtacagctagaggagcaggtcgagcaggaggccagagagaaacaggcggccaccaagtcgctgaagcagaaagacaagaagctgaaggaaatcttgctgcaggtggaggacgagcgcaagatggccgagcagtacaaggagcaggcagagaaaggcaatgccagggtcaagcagctcaagaagcagctggaggaggcagaggaggagtcccagcgcatcaacgccaaccgcaggaagctgcagcgggagctggatgaggccacggagagcaacgaggccatgggccgcgaggtgaacgcactca

SEQ ID NO: 1198 - DNA, 585 bp, Homo sapiens
tacagccagaagcccatggagcagggatgtcacgtcttgaaaagcctattagatgttttacaaatttaattttgcagattattttagtctgtcatccagaaaatgtgtcagcatgcatagtgctaagaaagcaagccaatttggaaacttaggttagtgacaaaattggccagagagtgggggtgatgatgaccaagaattacaagtagaatggcagctggaatttaaggagggacaagaatcaatggataagcgtgggtggaggaagatccaaacagaaaagtgcaaagttattccccatcttccaagggttgaattctggaggaagaagacacattcctagttccccgtgaacttcctttgacttattgtccccactaaaacaaaacaaaaaacttttaatgccttccacattaattagattttcttgcagtttttttatggcattttctttaaagatgccctaagtgttgaagaagagtttgcaaatgcaacaaaatatttaattaccggttgttaaaactggtttagcacaatttatattttccctctcttgcctttcttatttgcaataaaaggtattga

SEQ ID NO: 1199 - DNA, 568 bp, Homo sapiens
gcattcgggccgagatgtctcgctccgtggccttagctgtgctcgcgctactctctctttctggcctggaggctatccagcgtactccaaagattcaggtttactcacgtcatccagcagagaatggaaagtcaaatttcctgaattgctatgtgtctgggtttcatccatccgacattgaagttgacttactgaagaatggagagagaattgagaaagtggagcattcagacttgtctttcagcaaggactggtctttctatctcttgtactacactgaattcacccccactgaaaaagatgagtatgcctgccgtgtgaaccatgtgactttgtcacagcccaagatagttaagtgggatcgagacatgtaagcagcatcatggaggtttgaagatgccgcatttggattggatgaattccaaattctgcttgcttgctttttaatattgatatgcttatacacttacactttatgcacaaaatgtagggttataataatgttaacatggacatgatcttctttataattctactttgagtgctgtctccatgtttgatgtatctg

SEQ ID NO: 1200 - DNA, 443 bp, Homo sapiens
atagcctgaggtcaggagtttgagaccagcccggccaaaatggcgaaaccccgtctctaaaaacacaaaaattagccgggtgtggtggtgcacacctgtaatcccagccactcgggaggctgaggcaagagaactgtctggaacccaggaggcagagctttgcagcgagccaagatcatgccactgcacttcagcctgggcaacagagcgagactctgtctcaaaaaataataaaacaaaacacagaatataagttccataaggaaggagatgtttttctgtcatatgcacctcctgtagccaggactgtatttcagtgagtatctgtagggtggacagatgggtggatgtgggtgactgattctagaagagtaataaatgtgtcagaccagctgagaaagtcttttttttttttgaaacaaaattttactttttttgcccag

SEQ ID NO: 1201 - DNA, 575 bp, Homo sapiens
agctgctgctgtggctgctggtgctgtgcgcgctgctcctgctcttggtgcagctgctgcgcttcctgagggctgacggcgacctgacgctactatgggccgagtggcagggacgacgcccagaatgggagctgactgatatggtggtgtgggtgactggagcctcgagtggaattggtgaggagctggcttaccagttgtctaaactaggagtttctcttgtgctgtcagccagaagagtgcatgagctggaaagggtgaaaagaagatgcctagagaatggcaatttaaaagaaaaagatatacttgttttgccccttgacctgaccgacactggttcccatgaagcggctaccaaagctgttctccaggagtttggtagaatcgacattctggtcaacaatggtggaatgtcccagcgttctctgtgcatggataccagcttggatgtctacagaaagctaatagagcttaactacttagggacggtgtccttgacaaaatgtgttctgcctcacatgatcgagaggaagcaaggaaagattgttactgtgaatagcatcctgggtatcata

SEQ ID NO: 1202 - DNA, 67 bp, Homo sapiens
ggagaattgcgtcatttaaagcctagttaacgcatttactaaacgcagacgaaaatggaaagattaa

SEQ ID NO: 1203 - DNA, 564 bp, Homo sapiens
ctgagtgtgaagtcagcagagctgtgactgtggcaacctaatattgtgacctccatcttgaagagtctgcacatttaagctggggatagcgtttcttgacttctgtgaggctccggcaggggaagaggaagcactttaatacatatgcctctcttttacaaaaaagaaaaaaaaatcatcgtaggccctaacatgtaccatgttgacaaaaatgccagatcaaatggatttgagaaataagcccaattcaaggctggctcagccctccacggggcctcccagggaaaggaattcctttatgttcttggaagcccttttctagaaaagccattccattcatacctttgtagagcagtgggctgggtgtggagggcagcgcggagggtatctgcaagagcctgtattttccgcctcccttgcccccactccttttatccttttaaaagtcctatcagccctgccttcgtcccttccgccctaagccctaagagtggggggaggtttaatacggccaatggatcttgtataaagtctacgtaagttttaatttaccagagctataag

SEQ ID NO: 1204 - DNA, 546 bp, Homo sapiens
tggggcccaaatcacgctgcagatcccattataaccagatggaaaagggatagcagtggaaataaaatcatgcatcctgtttctgggaagcatatcttacaatttgttgcaataaaaaggaaagactgtggagaatgggcaatcccaggggggatggtggatccaggagagaagattagtgccacactgaaaagagaatttggtgaggaagctctcaactccttacagaaaaccagtgctgagaagagagaaatagaggaagagttgcacaaactcttcagccaagaccacctagtgatatataagggatatgttgatgatcctcgaaacactgataatgcatggatggagacagaagctgtgaactaccatgacgaaacaggtgagataatggataatcttatgctagaagctggagatgatgctggaaaagtgaaatgggtggacatcaatgataaactgaagctttatgccagtcactctcaattcatcaaacttgtggctgagaaacgagatgcacactggagcgaggactctgaagctgac

SEQ ID NO: 1205 - DNA, 602 bp, Homo sapiens
ttaggccgcagaggtctgtgggcctgagcccacgctggactctgtccgttctgcgatgactgctgctctggccgtcgtcacgacgtcgggtttggaagatggggtgcctaggtcccgtggcgaagggaccggggaagtggtcttggagcgggggcccggcgcggcctgccacatgttcgtggtgatggaggacttggtggagaagctgaagctgctccgctacgaggaggagttcctccggaagagcaacctgaaggccccgtccagacactattttgcactgcctaccaaccctggcgaacagttctacatgttttgtactcttgctgcttggttgattaataaagcgggacgtccctttgagcagcctcaagaatatgatgaccctaatgcaacaatatctaacatactatccgagcttcggtcatttggaggaactgcagattttcctccttcaaaattaaagtcaggttatggagaacatgtatgctatgttcttgattgcttcgctgaagaagcattgaaatatattggtttcacctggaaaaggccaatatacccagtagaagaattagaagaagaaagcgttgcagaagatgatg

SEQ ID NO: 1206 - DNA, 534 bp, Homo sapiens
attttccatgtggatatggcaaagaaggagacggtctggcggcttgaagaatttggacgatttgccagctttgaggctcaaggtgcattggccaacatagctgtggacaaagccaacctggaaatcatgacaaagcgctccaactatactccgatcaccaatgtacctccagaggtaactgtgctcacgaacagccctgtggaactgagagagcccaacgtcctcatctgtttcatcgacaagttcaccccaccagtggtcaatgtcacgtggcttcgaaatggaaaacctgtcaccacaggagtgtcagagacagtcttcctgcccagggaagaccaccttttccgcaagttccactatctccccttcctgccctcaactgaggacgtttacgactgcagggtggagcactggggcttggatgagcctcttctcaagcactgggagtttgatgctccaagccctctcccagagactacagagaacgtggtgtgtgccctgggcctgactgtgggtctggtgggcatcattatt

SEQ ID NO: 1207 - DNA, 557 bp, Homo sapiens
tggcttcttgaaaagttcgctctgccagaaaccacctaggccacgttagctgcttccttgagctccccagagtcggtttccacattgtgaggtggagggctggtgtggaggtctcatggggtgcggtgcttgggagacagccaggcccaggtggctgctgcttcctgctaagtgggggaggtgagacagatctggaaagccgtctccctcagatggtttcatttaatgctttatactgccgagtctgggagcttgttttggtttgggggcagccatcctccaccagaaagggggagctccttccgctgcggctccagatagatggggatgccgggctccaggccgaccagcacttgggatctgatgggacacggccagtgcctaggggtgccgagtccaaggcctcccactgggagtcatcgctgagaagatgccaatgtttcatccaccggctgcacaggcacaaactcccccacccaggacggctgtgatgaggtggccctccctgtcaaccctggtccctggagtccccaacacctggggccctggtggggctg

SEQ ID NO: 1208 - DNA, 595 bp, Homo sapiens
tgcaatggggtgctggaaggcattcgcatctgccggcagggcttccccaaccggatcgtcttccaggagttccgccaacgctacgagatcctggcggcgaatgccatccccaaaggcttcatggacgggaagcaggcctgcattctcatgatcaaagccctggaacttgaccccaacttatacaggatagggcagagcaaaatcttcttccgaactggcgtcctggcccacctagaggaggagcgagatttgaagatcaccgatgtcatcatggccttccaggcgatgtgtcgtggctacttggccagaaaggcttttgccaagaggcagcagcagctgaccgccatgaaggtgattcagaggaactgcgctgcctacctcaagctgcggaactggcagtggtggaggcttttcaccaaagtgaagccactgctgcaggtgacacggcaggaggaggagatgcaggccaaggaggatgaactgcagaagaccaaggagcggcagcagaaggcagagaatgagcttaaggagctggaacagaagcactcgcagctgaccgaggagaagaacctgctacaggaacagctgcaggcag

SEQ ID NO: 1209 - DNA, 639 bp, Homo sapiens
aagcctacccggtgtacacagaccggctctattctcgctcggacttcaacaactacgtggctgctgtatacaaggtgctggggaccttcctgtttggggctgccgtgagccagtctctgacagacctggccaagtacatgattgggcgtctgaggcccaacttcctagccgtctgcgaccccgactggagccgggtcaactgcccggtctacgtgcagctggagagggtgtgcaggggaaaccctgctgatgtcaccgaggccaggttgtctttctactcgggacactcttcctttgggatgtactgcatggtgttcttggcgctgtatgtgcaggcacgactctgttggaagtgggcacggctgctgcgacccacagtccagttcttcctggtggcctttgccctctacgtgggctacacccgcgtgtctgattacaaacaccactggagcgatgtccttgttggcctcctgcagggggcactggtggctgccctcactgtctgctacatctcagacttcttcaaagcccgacccccacagcattgtctgaaggaggaggagctggaacggaagcccagcctgtcactgacgttgaccctgggcgaggctgaccacaaccactatggatacccgcact

SEQ ID NO: 1210 - DNA, 621 bp, Homo sapiens
tgagggtccccgctcagctcctggggctcctgctactctggctccgaggtgccagatgtgacatccagatgacccagtctccatcctccctgtctgcatctgttggagacagagtcaccatcgcttgccgggcaagtcagagcattggcatctatttaaattggtatcaacaaaaaccagggaaagcccctaaactcctgatctatgattcatccagattgcaaagtggggtcccatcaaggttcagtggcagtggaggtgggacacacttcactctcaccatcagcagtctgcaacctgaagatttagcaacttactactgtcaacaagggtacagtacacctggcaccttcggccaagggacacgactggaaattaaacgaactgtggctgcaccatctgtcttcatcttcccgccatctgatgagcagttgaaatctggaactgcctctgttgtgtgcctgctgaataacttctatcccagagaggccaaagtacagtggaaggtggataacgccctccaatcgggtaactcccaggaggggtgtcacagagcaggacagcaaggacagcacctacagcctcagcagcaccctgacgctgagcaaagcagactacgag

SEQ ID NO: 1211 - DNA, 583 bp, Homo sapiens
aagacggcctggggatacaactctggagtcctctgagagagccaccaaggaggagcaggggagcgacggccggggcagaagttgagaccacccagcagaggagctaggccagtccatctgcatttgtcacccaagaactcttaccatgaagaccctcctactgttggcagtgatcatgatctttggcctactgcaggcccatgggaatttggtgaatttccacagaatgatcaagttgacgacaggaaaggaagccgcactcagttatggcttctacggctgccactgtggcgtgggtggcagaggatcccccaaggatgcaacggatcgctgctgtgtcactcatgactgttgctacaaacgtctggagaaacgtggatgtggcaccaaatttctgagctacaagtttagcaactcggggagcagaatcacctgtgcaaaacaggactcctgcagaagtcaactgtgtgagcgtgataaggctgctgccacctgttttgctagaaacaagacgacctacaataaaaagtaccagtactattccaataaacactacagagggagcacccctcgttgctgagtc

SEQ ID NO: 1212 - DNA, 662 bp, Homo sapiens
tttcctccctaaatcttttagcaagtcctcattgtctattcttctttcaaaaaccatttatttgaaaatactattaaaatagaaaattttccacattcttacttcttaaaaattaatgtgttttaagtctctcctactccacttccatcccatgcctctttactcaatggatgcaattattcttctacatgttccttctggccatgtgtagctttgtcattttaattttaatctatttggaccctgtgttatctgggatgaggtagagtgatatttttattttctcaggtaattatttgcctaatgcctgtttccaaataatccaccatttccttacaatttaaaaatgctccagcatgtttttaatagctacacatatttgacacattttctggagaatttctgttttatttgtctatttcattattcttgtatcattatcatattatctcagtagctttgtggcaagtattaagatctactatgccaaatgtctattcactgtaccatttttcagaaaattctttttcaatcatctcatatttattcactcctgtagaatttaaaatcaacttatctagcctaacattaaacctcacaccctagaacaacaacatgtcgtagtaattctgactaaaattgctggaaatttatagatgaat

SEQ ID NO: 1213 - DNA, 598 bp, Homo sapiens
agtggcactgcaggaagctcaggacaccatgcaaggcaccagccgctcccttcggcttatccaggacagggttgctgaggttcagcaggtactgcggccagcagaaaagctggtgacaagcatgaccaagcagctgggtgacttctggacacggatggaggagctccgccaccaagcccggcagcagggggcagaggcagtccaggcccagcagcttgcggaaggtgccagcgagcaggcattgagtgcccaagagggatttgagagaataaaacaaaagtatgctgagttgaaggaccggttgggtcagagttccatgctgggtgagcagggtgcccggatccagagtgtgaagacagaggcagaggagctgtttggggagaccatggagatgatggacaggatgaaagacatggagttggagctgctgcggggcagccaggccatcatgctgcgctcagcggacctgacaggactggagaagcgtgtggagcagatccgtgaccacatcaatgggcgcgtgctctactatgccacctgcaagtgatgctacagcttccagcccgttgccccactcatctgccgcctttgcttttgg

SEQ ID NO: 1214 - DNA, 600 bp, Homo sapiens
cagtgcggctctgggctggccgaaggggtggcgctgcgatcccgcagggcagcgacgcgactctggtgcgggccgtcttcttccccccgagctgggcgtgcgcggccgcaatgaactgggagctgctgctgtggctgctggtgctgtgcgcgctgctcctgctcttggtgcagctgctgcgcttcctgagggctgacggcgacctgacgctactatgggccgagtggcagggacgacgcccagaatgggagctgactgatatggtggtgtgggtgactggagcctcgagtggaattggtgaggagctggcttaccagttgtctaaactaggagtttctcttgtgctgtcagccagaagagtgcatgagctggaaagggtgaaaagaagatgcctagagaatggcaatttaaaagaaaaagatatacttgttttgccccttgacctgaccgacactggttcccatgaagcggctaccaaagctgttctccaggagtttggtagaatcgacattctggtcaacaatggtggaatgtcccagcgttctctgtgcatggatacccagcttggatgtctacagaaagctaatagagcttaactac

SEQ ID NO: 1215 - DNA, 548 bp, Homo sapiens
atgatataaacattttttagtgtcctatagaggaaaaagtgacataatgtcttatagaactataatattaagaaagatacccagaaaagctttagaaatctaaaatctcttcaggatgtttatactattttaattaataaccagttattagagaatttcaaagtatatgcgatgagataattgcgaggtttgagtgtctagtgactaaaacaactttgattgtgtttagtatattgcaacatgagaaaacagatgtgacagccatttggtgaagtttaacattaggagcattccgaaaaactgaaaagctttgtatatctgcatactttatattatttgaattatgtccaaaatattcctaatatctttatttttctatatgtgtggctaatatctaaattacattttcttaatacataattcaaaaattgtgaaagtttattaaaatgtaatgctcatgaaaacttgttttcatgaaaggttatggaagaattagaaaaggtaaaacaagaaatggaagaaaagggcagcagcatgactgatggtgc

SEQ ID NO: 1216 - DNA, 449 bp, Homo sapiens
agccctcggtctgccccgtccggtctctggggccaaggctgggtttccctcatgtatggcaagagctctactcgtgcggtgcttcttctccttggcatacagctcacagctctttggcctatagcagctgtggaaatttatacctcccgggtgctggaggctgttaatgggacagatgctcggttaaaatgcactttctccagctttgcccctgtgggtgatgctctaacagtgacctggaattttcgtcctctagacgggggacctgagcagtctgtattctactaccacatagatcccttccaacccatgagtgggcggtttaaggaccgggtgtcttgggatgggaatcctgagcggtacgatgcctccatccttctctggaaactgcagttcgacgacaatgggacatacacctgccaggtgaagaacccacctgatgttgatgg

SEQ ID NO: 1217 - DNA, 463 bp, Homo sapiens
aattggaaaatcgcggataattctagtcttactatactacctaatatagcatcctactatacacttatgttaagtttcttgatagcatttatcacggccgagcgcagtggctcatgcctgtaatcctagcgctttgggaggccgaggtgggtggatcacctgaggtagggagttcaagaccagcctggccaacacggctaagccctgtctctgctggaaatacaaaaattaaccaggcatgttgagcgcctgtagttccagctactcggaaggctggggcggggggattgcttgaacccaggtggcagaggttgtagtgagccgagatcatgccactgcactccagcagtggaaacagagtgagactgtcttaaaaacaaacaaacaaaacaacaacaacagcaacaaaaagcatttattatataaatactggcttatttatttatttgttttcctgtttact

SEQ ID NO: 1218 - DNA, 461 bp, Homo sapiens
gacatcagccagaacaagcgagccgtgaggcggcggcgcaccgcctgcgagagggccaagaggaccctgtcgtccagcacccaggccagcctggagatcgactccctgtttgagggcatcgacttctacacgtccatcaccagggcgaggttcgaggagctgtgctccgacctgttccgaagcaccctggagcccgtggagaaggctctgcgcgacgccaagctggacaaggcccagattcacgacctggtcctggtcgggggctccacccgcatccccaaggtgcagaagctgctgcaggacttcttcaacgggcgcgacctgaacaagagcatcaaccccgacgaggctgtggcctacggggcggcggtgcaggcggccatcctgatgggggacaagtccgagaacgtgcaggacctgctgctgctggacgtggctcccctgtccctggggctggagac

SEQ ID NO: 1219 - DNA, 635 bp, Homo sapiens
atatgatgacataagacttcactccaacttccagttcaaattcccatcagatctaggtatagtttgtttcttatctttgattttttgaggatatattgtataagatatagcctcctttagtgctaatttgaatatattttcacttgtttcatccaaaatagccttagtgagacttgttactttccacgaaaaacattttcatttttaatgtaccttttcagtgtggcttttccaatgtatttatctgttgaaattgtaaaggtgctttatgatctagcccaattcctatttgtgactttttagaaatttcaccccaaattagtattgtttttacacacctttgttcttagtgcacttcttattctattcaaagccttagacattctacttttgatattttaagttctgtatctatttccataatactactttgaaccatatcaaattgtcccgggtattaatattgtacaaatcgccgatacttgactatttttgacttactaaaatggcaatttcatgcagatcaacttattatattggaagaaaatttactgacagagaggtatcttaatgatctctacaccctgaatatctgattaatggtaggtcttggtatattttggtgaaattaaata

SEQ ID NO: 1220 - DNA, 539 bp, Homo sapiens
tacggccgggattgtattagctattataggtaatctagagatgatttaaagtgtatggtaggatgtgcacaggttatatgcaaatactacaccattttctataagggacttgaacatcatggactttagtaccctagggggttcttggaacccatcacccataggggcaccataggacaactatagtaccgtgtttatttcctattaattcaggttccgtttagagtctaaaactaaaacctaatcatttagtcacagtgtaaaaacaaatggaaataacagctcaaatcttcaaaatattactatagcattatgtttaaaataatctacaacaaaaatgtaccattttcaagcagtactacattaggagcccttttatagaaaataatttcttctttacccccgttccagtgtgaatctagtattctgttaacatttgtgtggcatttggagtttgtcatccccattgaagggagagccttctcagacatgaagcaagggaaacatactgaatagttttacacaaatttgatctggct

SEQ ID NO: 1221 - DNA, 519 bp, Homo sapiens
aggacctcggtcttcatccaagtggcctgagtatttcactggcaggttgtgaatttttcttttcctctttggggatccaaatgatgatgtgcaatttcatgttttaacttgggaaactgaaagtgttcccatatagcttcaaaaacaaaaacaaatgtgttatccgacggatacttttatggttactaactagtactttcctaattgggaaagtagtgcttaagtttgcaaattaagttggggagggcaataataaaatgagggcccataacagaaccagtgtgtgtataacgaaaaccatgtataaaatgggcctatcacccttgtcagagatataaattaccacatttgccttcccttcatcagctaacacttatcacttatactaccaataacttgttaaatcaggatttggcctcacacactgaattttcagtattttatctcaagtagatatagacactaaccttgatagtgatacgttagagggttcctattcttccattgtacgataatgtc

SEQ ID NO: 1222 - DNA, 542 bp, Homo sapiens
ctttccgtctggcggcagccatcaggtaagccaagatgggtgcatacaagtacatccaggagctatggagaaagaagcagtctgatgtcatgcgctttcttctgagggtccgctgctggcagtaccgccagctctctgctctccacagggctccccgccccacccggcctgataaagcgcgccgactgggctacaaggccaagcaaggttacgttatatataggattcgtgttcgccgtggtggccgaaaacgcccagttcctaagggtgcaacttacggcaagcctgtccatcatggtgttaaccagctaaagtttgctcgaagccttcagtccgttgcagaggagcgagctggacgccactgtggggctctgagagtcctgaattcttactgggttggtgaagattccacatacaaattttttgaggttatcctcattgatccattccataaagctatcagaagaaatcccgacacccagtggatcaccaaaccagtccacaagcacagggagatgcgtgggctgacatctgcaggccga

SEQ ID NO: 1223 - DNA, 547 bp, Homo sapiens
cattgagaaggggaaaggcgggtatttttaaaagccaaagattgacccagttacttgagggtagggaggcgggcccagtgcaggaggctgcatccctggcctgctggtgcccaccgggggctgtgcctgtgccgggccgcagggaagctggctgcccccattcctgctgctgctgctgctgctgctctgtggctgtttcaaagactgggcgaaaggctgtccggagggcagaccaggtgccttgccgcagagaaaacaccaaagtctcctgttcgctcataaagaagtttttgggatgggagagaatccagaccatcttggggcagccaggcccttgccttcatttttacagaggtagcacaattgattccaacacaaaactccttcccctttttaaaatgatttctgttctaatgccatagatcaaaggcctcagaaaccattgtgtgtttcctctttgaagcaatgacgagcactttactttcacggtggtttttgttttttcttattgctgtggaacctcttttggaggacgttaaaggcgtgt

SEQ ID NO: 1224 - DNA, 624 bp, Homo sapiens
ctcagcagttccctctttcagaactcactgccaagagccctgaacaggagccaccatgcagtgcttcagcttcattaagaccatgatgatcctcttcaatttgctcatctttctgtgtggtgcagccctgttggcagtgggcatctgggtgtcaatcgatggggcatcctttctgaagatcttcgggccactgtcgtccagtgccatgcagtttgtcaacgtgggctacttcctcatcgcagccggcgttgtggtctttgctcttggtttcctgggctgctatggtgctaagactgagagcaagtgtgccctcgtgacgttcttcttcatcctcctcctcatcttcattgctgaggttgcagctgctgtggtcgccttggtgtacaccacaatggctgagcacttcctgacgttgctggtagtgcctgccatcaagaaagattatggttcccaggaagacttcactcaagtgtggaacaccaccgcgaaagggctcaagtgctgtggcttcaccaactatacggattttgaggactcaccctacttcaaagagaacagtgcctttccccccattctgttgcatgacaacgtcaccaacacagccaatgaaacctgcaccaagca

SEQ ID NO: 1225 - DNA, 599 bp, Homo sapiens
ctgacattttattttaaagaactatgatatccagtatttttccatgagagatattgatcgacttggtatccagaaggtcatggaacgaacatttgatctgctgattggcaagagacaaagaccaatccatttgagttttgatattgatgcatttgaccctacactggctccagccacaggaactcctgttgtcgggggactaacctatcgagaaggcatgtatattgctgaggaaatacacaatacagggttgctatcagcactggatcttgttgaagtcaatcctcagttggccacctcagaggaagaggctaagactacagctaacctggcagtagatgtgattgcttcaagctttggtcagacaagagaaggagggcatattgtctatgaccaacttcctactcccagttcaccagatgaatcagagaatcaagcacgtgtgagaatttaggagacactgtgcactgacatgtttcacaacaggcattccagaattatgaggcattgaggggatagatgaatctaaatggttgtctgggtcaatactgccttaatgagaacatttacacattctcacaattgtaaagtttcccctc

SEQ ID NO: 1226 - DNA, 650 bp, Homo sapiens
  misc_feature 582: n = A,T,C or G
ccactgctcaagtgggttgatcagtgcccccgcccgggtccactggaagctggagcggtctgtcactttagcttgcaagtctcaggggccctgaaaacgcacttcccagtacttactgatcattgctgatcaataccagaccacttaccaggcactttgcctctagtgagtatacattgctccagctcctcaaagccttaaaataccgttcgaagtcaagaagctaagttacacagcaatagggttagaattgttttttttcctaagggaaatgaatatatttcacaggaatcagacaaggcttctctagctggtgttgataactcacatattttctttccacagccctttattacagtgtatatactttcaacaaaaattgttgctaagccctgcgctaggtgctggagatgtaaagattaataaaagacagttccaaacctgaaggaacctcacagactattgagaaggagagaagcaaacataactgagtatagttgtgaactgctataactgtacaaattgctgtgggaccacttaaaatatataaatacataccctttacattctgcttggagggtnaggagtgtcttataacatggcgcttttaacattctttgctaaataaaatgtaaagataacaataaaca

SEQ ID NO: 1227 - DNA, 546 bp, Homo sapiens
aggcattgaggcagccagcgcaggggcttctgctgagggggcaggcggagcttgaggaaaccgcagataagtttttttctctttgaaagatagagattaatacaactacttaaaaaatatagtcaataggttactaagatattgcttagcgttaagtttttaacgtaattttaatagcttaagattttaagagaaaatatgaagacttagaagagtagcatgaggaaggaaaagataaaaggtttctaaaacatgacggaggttgagatgaagcttcttcatggagtaaaaaatgtatttaaaagaaaattgagagaaaggactacagagccccgaattaataccaatagaagggcaatgcttttagattaaaatgaaggtgacttaaacagcttaaagtttagtttaaaagttgtaggtgattaaaataatttgaaggcgatcttttaaaaagagattaaaccgaaggtgattaaaagaccttgaaatccatgacgcagggagaattgcgtcatttaaagcctagttaacgcatttactaaacgc

SEQ ID NO: 1228 - DNA, 634 bp, Homo sapiens
tcaccaaaaggggaatgaagctgtagcttccagagacctgagtgaaaacaacgaccagagacagcagctccaagccctcagtgagcctcagcccaggctgcaggcagcaggcctgccacacacagaggtgccacaagggaagggaaacgtgcttggtaacagcaagtcccagacaccagcccccagttccgaagtggttttggattcaaagagacaagttgagaaagaggaaaccaatgagatccaggtggtgaatgaggagcctcagagggacaggctgccgcaggagccaggccgggagcaggtggtggaagacagacctgtaggtggaagaggcttcgggggagccggagaactgggccagaccccacaggtgcaggctgccctgtcagtgagccaggaaaatccagagatggagggccctgagcgagaccagcttgtcatccccgacggacaggaggaggagcaggaagctgccggggaagggagaaaccagcagaaactgagaggagaagatgactacaacatggatgaaaatgaagcagaatctgagacagacaagcaagcagccctggcagggaatgacagaaacatagatgtttttaatggttgaagatcagaagagagacaccat

SEQ ID NO: 1229 - DNA, 568 bp, Homo sapiens
aataataataattccagcttctacacaggagtctatattctgatcggagccggcgccctcatgatgctggtgggcttcctgggctgctgcggggctgtgcaggagtcccagtgcatgctgggactgttcttcggcttcctcttggtgatattcgccattgaaatagctgcggccatctggggatattcccacaaggatgaggtgattaaggaagtccaggagttttacaaggacacctacaacaagctgaaaaccaaggatgagccccagcgggaaacgctgaaagccatccactatgcgttgaactgctgtggtttggctgggggcgtggaacagtttatctcagacatctgccccaagaaggacgtactcgaaaccttcaccgtgaagtcctgtcctgatgccatcaaagaggtcttcgacaataaattccacatcatcggcgcagtgggcatcggcattgccgtggtcatgatatttggcatgatcttcagtatgatcttgtgctgtgctatccgcaggaaccgcgagatggtctagagtcagcttacatccctgagcaggaaag

SEQ ID NO: 1230 - DNA, 518 bp, Homo sapiens
tggtccttctgggggtcaggcctttgacagcttgcgctggtggcaggtttgggagcagttgaggggcttcctgtgtgtcttttggagggggtgaccctggaagttggcactctggaagggagctgtttggccctagagttttggaaagggccctgaacctgttcggtccccctcggaaagggaagggagcagtggcttagtccctccctcctccattcgtgcaatgcctggggtaggggtagacctggagcgggtggactcatatccttggaattcgtcaggacagctgctccggggccttggccctcagtcggtctggggctgaggagtagggaagctgggaacttggggcagaggaagaagatgcgtttagaaagacctccattatgcaaactggagtccatttatgcaaactggtcacccttccagtagctccaaagagtggcagtggagtggcatcttgattgatttaacctcttctcaggggacctgggtctgcgagggaggatatggctgcg

SEQ ID NO: 1231 - DNA, 158 bp, Homo sapiens
tgaggacaagctaccattttgtcctcatccttacccccgatgacttgtcgagagatctgacctttcaggttttgatcctgtccttatctaggatgaggagcacgcactttgctgacgcgcatggtgaagtattgcgcctaggtcctggatcttcatct

SEQ ID NO: 1232 - DNA, 510 bp, Homo sapiens
tatatatgcatctgtggataatacattgttggttatcacattcggcagctttagtgcagtagcaatccctccaaatcccagtgacttaaccaaaaccatatacttgtcacttgactttgtgcattagcagcagcttcttatctaggcagctctgcccaatatgtctcattgaaagctaaaaagtgctcattctgggcactaggctgaaggagcagcgcttatttgagatatatggtccttgtggcagacagaaaagagtaagatagctaaagaaaacaatcaatggctcttaaaacttctgcttggtagtgaagtgtgcacacacactcactttgcgtggaccaaatcaagtcacatggctgagcctgacggcaatgggcatgaatatttatcccttccattggaggcactgccaatcaaattgcagaaggtggggacatataatccttttaaaagaagggcaagtggccaggcatggtggctcatgcttgtaatcccagccctttggga

SEQ ID NO: 1233 - DNA, 528 bp, Homo sapiens
gtgccactgcactccagcctgggcaacagaacaaaactccatctcaaaaaataactaaataaaaataaatgtttgtgtgtgtgtataagtgtatgtgtgtatatactgcgctccagcctcagcgacagagtgagactgtatctcaagaaaaaaggttttgaaaaaggaaaaggaggtgttgcttcagccacatcttaaaggaggtaacacttgaccagaagggaaggggatctggatgttcttggtacagaaaccacaagttcatatgaacagaagtgtcaacagctgaaaaagtaaggggacaagtagtcccatgggactgcagccaaatgtacaaggttagcgaccagataagactctggacgggtcagcaggaggggccaggtgatggatgccagaccactgggtcctgggtacttaccacattgtgcttcctagtccccaagatgtggtcctcaaaaaagacgaaaagtcacggtcaaatgaatttgggggatgccaagttaaagctctcccaagcggggaaat

SEQ ID NO: 1234 - DNA, 604 bp, Homo sapiens
tacggccgggttcttctgatcctgaccaatcaggcgagtttatgtttgactttgatggtgatgagattttccatgtggatatggcaaagaaggagacggtctggcggcttgaagaatttggacgatttgccagctttgaggctcaaggtgcattggccaacatagctgtggacaaagccaacctggaaatcatgacaaagcgctccaactatactccgatcaccaatgtacctccagaggtaactgtgctcacgaacagccctgtggaactgagagagcccaacgtcctcatctgtttcatcgacaagttcaccccaccagtggtcaatgtcacgtggcttcgaaatggaaaacctgtcaccacaggagtgtcagagacagtcttcctgcccagggatgaccaccttttccgcaagttccactatctccccttcctgccctcaactgaggacgtttacgactgcagggtggagcactggggcttggatgagcctcttctcaagcactgggagtttgatgctccaagccctctcccagagactacagagaacgtgggtgtgtgccctgggcctgactgggggtctggtgggcatcattattggga

SEQ ID NO: 1235 - DNA, 264 bp, Homo sapiens
gtgaagaacagtacggtttggtgttgaatgcagtatataattcacagttgcagtccatactgtctgagtcagttcatgctgctagaacagaataccatagactgggtggcttttaaacaatagaaatttatttctcacgattctagaggctgggaaatccatcaaatcaccagcagattaagtgtctggtgagagtctacttaccgatttcataagcagccattttttctctgtgtcctcacgtggtggaagggacaagggacc

SEQ ID NO: 1236 - DNA, 601 bp, Homo sapiens
tacggccgggcccctgtgttggtcgtctatgatgatagcgagcggccctcagaaatccctgagcgattctctgggttccactctgggaacacggccaccctgaccatcagcagggtcgaggccggggatgaggccgagtattactgtcaggtgtgggatggtagtagtgttcctccctatgtcttcggaactgggaccaaggtcaccgtcctaggtcagcccaaggccaaccccactgtcactctgttcccgccctcctctgaggagctccaagccaacaaggccacactagtgtgtctgatcagtgacttctacccgggagctgtgacagtggcctggaaggcagatggcagccccgtcaaggcgggagtggagaccaccaaaccctccaaacagagcaacaacaagtacgcggccagcagctacctgagcctgacgcccgagcagtggaagtcccacagaagctacagctgccaggtcacgcatgaagggagcaccgtggagaagacagtggcccctacagaatgtcataggttcccaactctaaccccacccacgggagcctggagctgcaggatcccaggggagggggtctctctcc

SEQ ID NO: 1237 - DNA, 519 bp, Homo sapiens
attaaagtgagtgagtgttctgaaagttgagtattagtctaaacattattcctgtacattaggcagcagttaaagaataggtaaaatactgctttctggttttagaaccatgtaaattaatagcagtttcacagcagtgacactgctcattctttatcttgttgcacttccactgatgttttagctgtgatttttaaataccttgtgcaatttaagtatgctttatatattgtgtttttattaatagtatataagatctgaagctgcaaatcaatttttatagcttataacaaaaacatttatttgttttaatccacagtaaacttggggagctatattccctggctttaaagaaattgattttgatttagtcgatttattaaacaatttttaaaatgcttatagttattttttctctagtattaattatatctttcaagatacagctgagaaagattaacatgcctattaaatttatttctccagtgactttgttaactttagctcatcataggaatg

SEQ ID NO: 1238 - DNA, 244 bp, Homo sapiens
gaggcagggttcaaactcaggaaatctagaccccagaagctcaggccctcagccacatctcttaaagaggcgcactctattccacaggctgtggcaggctggaccttccccaagcttctttctgaacatgggctcggctttctaaaaatggagccaccttgatcctccaaggagtggatctgaaccacatgcctgcctaacaactgactctgggccctcctggctttgcggttcatcagctctc

SEQ ID NO: 1239 - DNA, 313 bp, Homo sapiens
tttttttttttttttttttttgcaagtcttatgatttatttaacttgtggaacaaaaataaaccagattaaccacaaccatgccttactttatcaaatgtataagaagtaaatatgaatcttatatgacaaaatgtttcattcattataacaaatttccaataatcctgtcaattatatttctaaattttcccccaaattctaagcagagtatgtaaattggaagttaacttatgcacgcttaactatcttaacaagctttgagtgcaagagattgaagagttcaaatctgaccaagatgttgatgttggata

SEQ ID NO: 1240 - DNA, 247 bp, Homo sapiens
tttttttttttttttttttttttcaaatactgactttattgtcaaatgtggaaatattttgttaaacaatacagagatgatagtagtacttagggtaagcattaacaatattattcaaaatgttatatagagttcaactgtatacaatagcgcatttattaaagtgtgtccaaagcgcttataaataaagcatcttcgaggcaggcggctcacttgaggttaggaggaaagcaaactggccaacatg

SEQ ID NO: 1241 - DNA, 107 bp, Homo sapiens
gataacattctgagtatattggattagtcacagcagaatttactttagttagatgagttctacaaatttaaagctttgaaaagctactacttttacttctaatacat

SEQ ID NO: 1242 - DNA, 115 bp, Homo sapiens
gagggtgagtggcctgaggtagttacggcacttaaaactcccttgctaccgatctggaactcaagccccaagacatccccttagatgatctgaatacgcattcagggacagatct

SEQ ID NO: 1243 - DNA, 493 bp, Homo sapiens
tttttttttttttttttttttttggaaggtgctcaggtctttatttgctctctcaaattccaggaattgacttatttaattaatccatcaacctctcatagcaaatatttgagaaaacaaatttatattcagattcttattttcagtagggaagtaagaagttgcagctcagtgcacataaagttgagacagagatggagacatccagccccacctctctggaacaggaaagatgactggggaggaaacacaagtcagcatgggaacaggggtcacggtggacacgggggtgggctgtctctccgcctcctcacattatgctaacagggacgcagacacattcaggtgtctttgcagaaagagatgccagaggctcttgaagtcacaaaggggaggcgtgaagaaatcctgcatctcagtccctcacaagacagctgtctcaggcttttcaagctgtgagagacacatcagagccctgggcactgtcgctgca

SEQ ID NO: 1244 - DNA, 457 bp, Homo sapiens
catgccggaaaattggtcgcgattgtagatgttattgatcagaacagggctttggtcgatggaccttgcactcaagtgaggagacaggccatgccttccaagtgcatgcagctcactgatttcatcctcaagtttccgcacagtgcccaccagaagtatgtccgacaagcctggcagaaggcagacatcaatacaaaatgggcagccacacgatgggccaagaagattgaagccagagaaaggaaagccaagatgacagattttgatcgttttaaagttatgaaggcaaagaaaatgaggaacagaataatcaagaatgaagttaagaagcttcaaaaggcagctctcctgaaagcttctcccaaaaaagcacctggtactaagggtactgctgctgctgctgctgctgctgctgctgctgctaaagttccagcaaaaaaagatcaccgccgcgagt

SEQ ID NO: 1245 - DNA, 578 bp, Homo sapiens
tcatctcaaaaactcactttaaacatttactgcttccaaggctctttgcttctaacccagcatttgatatggtattattggatggtaatatttttcccatctaaacaaagagctccttgagggcaggggctgtatcttttgtttctatatcctcaaccctaagataaattgcgtataaagcaagaatttgcatgtaaaatatttctttagtttcatgttttactgaaagttcaacctccaacatgcaacaaaaattgctattaaaactcacactgcccatctgaaaaaattttccaacatttatttatttaaaatctatttatatttaattttcccagattgttaccaaataatcagttcataggactaccgaaactaaattaacagaattcctatctgcattcttaataactccatggttttaagtgtgtaaaactgccgtgctgattatgccaaagctctacatacttaaagagacacactggacagtccacaatacagcttcaattgataaaaaacagtttagaatttgcttaattccaattgagaaaactctgctcttaatgacttactgacct

SEQ ID NO: 1246 - DNA, 98 bp, Homo sapiens
ggaaggaacaaaagaactcatggcttctatatggataatctgaacattcaaagctttgacatctacaacattggccactttttcataatccaaacttg

SEQ ID NO: 1247 - DNA, 83 bp, Homo sapiens
gaatggacatagtaagttattctaccgtaacaagggacttactaaagaaaatgctaaaggccgggcacagtggctcacacctg

SEQ ID NO: 1248 - DNA, 472 bp, Homo sapiens
catgccggaaaattggtcgcgattgtagatgttattgatcagaacagggctttggtcgatggaccttgcactcaagtgaggagacaggccatgcctttcaagtgcatgcagctcactgatttcatcctcaagtttccgcacagtgcccaccagaagtatgtccgacaagcctggcagaaggcagacatcaatacaaaatgggcagccacacgatgggccaagaagattgaagccagagaaaggaaagccaagatgacagattttgatcgttttaaagttatgaaggcaaagaaaatgaggaacagaataatcaagaatgaagttaagaagcttcaaaaggcagctctcctgaaagcttctcccaaaaaagcacctggtactaagggtactgctgctgctgctgctgctgctgctgctgctgctgctgctaaagttccagcaaaaaagatcaccgccgcgagtaaaaaggctc

SEQ ID NO: 1249 - DNA, 503 bp, Homo sapiens
gtgaagaagcaggaggctaagaaagtggtgaatcccctgtttgagaaaaggcctaagaattttggcattggacaggacatccagcccaaaagagacctcacccgctttgtgaaatggccccgctatatcaggttgcagcggcagaaagccatcctctataagcggctgaaagtgcctcctgcgattaaccagttcacccaggccctggaccgccaaacagctactcagctgcttaagctggcccacaagtacagaccagagacaaagcaagagaagaagcagagactgttggcccgggccgagaagaaggctgctggcaaaggggacgtcccaacgaagagaccacctgtccttcgagcaggagttaacaccgtcaccaccttggtggagaacaagaaagctcagctggtggtgattgcacacgacgtggatcccatcgagctggttgtcttcttgcctgccctgtgtcggaaaatgggggtcccttactgcattatcaaggg

SEQ ID NO: 1250 - DNA, 617 bp, Homo sapiens
tttttttttttttttttttttggagatgaaaactatcatttatttcaattgaatttagtttcattaaaaaattctatgataacattaaaacagaaacaggacgtttatatgactgtctttaacctcaaaagtccaaataaacatatagacattttgaatatagctatcgttttaacaaacctcattatgatcactgttgcaatttcagtcacctaaaatacgaaccatgactattaataaacatttactgtgtgtggtttgttggactgaacattgaccatacgtgtatttctaagtactaggagttgaacagctactacggtcaatgtattttggcagttagctgtgtgtggtgtgtgctttttaaggcttcactcaataaaacatctgttgctctctgctgatgagcaaaaagcttgctatacgaaggacaaatatatgtatacaaacaaatacacacgtgtgcatgtctatatacatatatgcaatttcagggaggtgacaccttattctgagaggtcatgagactccacttcaaaccataatagtaaaacctttagtaaactgaactcaacatattacagccaccatcatcaggaaaaattaaagactcatag

SEQ ID NO: 1251 - DNA, 202 bp, Homo sapiens
ggcggcttccgctgcctggccttcgagtgccctgagaactaccgccgctccgcagccacccgctgtgagcgcttgccttgccatgagaatcgggagtgctccaagctgcctctgagaataacctactaccacctctctttccccaccaacatccaagcgcccgcggtggttttccgcatgggcccctccagtgctgtccccg

SEQ ID NO: 1252 - DNA, 568 bp, Homo sapiens
ttttttttttttttttttttttttttcgagacagagtctcactctgtcgcccaggctggagtgcaatggcgccatctcacctcactgtaagctccgcctcccgggttcatgccattctcccacctcagcctcccgagtagctgggactacaggcgcctgccaccatgcctggctaattttttgttttcgtatttttagtacagacggggtttcaccgtgttagccaggatggtctccatctcctgacctcgtggtccgcccgcctaggcctcccaaagtactgggattacaggcgtgagccaccgcgcccggctggaacattgtatcttttacctgctaacgtgcccgtatttttctgtgagtcactgatatgactgacagtgagtttggagtttcctgtctgcgtgccaagtgtctttcagtgagccagggacagagatatgccacaccatagcagcctttattccaagcacacctcacaccaagctagggggcacttttatatttctgtttattttctgtttattttgtggaagtctcctatggccacatggctcgaaatgttaca

SEQ ID NO: 1253 - DNA, 604 bp, Homo sapiens
tttttttttttttttttgagacagagtctcgctctgttgccaggctggagtgcagtggcatgatctcggctcactgcaacctgcaacctccacctcccgggttcaggctattctcctgccttagcctcccaagtagctaggactacaggcacgtgccacctctcccagctaatttttttatttttagtagagacggggtttcccccatgttgggcaggatggtctcaatctcttgacctcgtgatctgcccgcctcggcctcccaaggtgctgggattacaggagtgagccatggtgcctgggcagcaagtaaccattttaaagaaatactctcaacgagttctttttttatggggtatttcagttgttaacaaagttaaaatacttattggaactaattctttgtattttattcgaggaagaagaatctataagattgacttactcattgttgactggttttttgaagctttactgggtatatggacagtttgggataaaaagcaaatcacttttcaaaagctgacttaaagtcacataaactttcaatacttcacctgcaaatctgcttcaacctcactacacacaaaagaaactgctatgc

SEQ ID NO: 1254 - DNA, 558 bp, Homo sapiens
tttttttttttttttttttttttcaaatatttatctaaccacatgtatatacaactttctaaacttgaagtctgaatttgaaatgacgaatctttaaaccaaaagatacatataccattgacagagacacctatctatacaaacctagcccacgggaggctacatctgtagcaataaggatgggtgcctttccagaacggaactcattaagtacccaatctctttctggttgactcttgtctccatggatacacatagctggccaaccatctctgcgcatccttcgagtcagatcatcacagcgtctctttgtctccacaaatattattgttttgttttccttttcagccattatttcttccattagttggatcaacttgtggtctttttcactttccatgcagacatccactatctggaggatgttgtggttggcactcaactccagattgcctacgttgatctgggtgtaatcacgaaggaaatcctctgcaagctgtcttacttcttttggccaggttgcactccacatcagtgtctgcctatcaggcctgattt

SEQ ID NO: 1255 - DNA, 554 bp, Homo sapiens
ccaaccccacctagatgcaaagcaggattcaaaagaacatctttgcgttttctaccggctccccatcatcgtactagggaggaagaagcgggtgagaaacaaaacttctttccattgtcctgcccgtttctgcggacttgttctgaggccgaggcacctctaagatactgatggctctgcagaggacccattcattgcttctgcttttgctgctgaccctgctggggctggggctggtccagccctcctatggccaggatggcatgtaccagcgattcctgcggcaacacgtgcaccctgaggagacaggtggcagtgatcgctactgcaacttgatgatgcaaagacggaagatgactttgtatcactgcaagcgcttcaacaccttcatccatgaagatatctggaacattcgtagtatctgcagcaccaccaatatccaatgcaagaacggcaagatgaactgccatgagggtgtagtgaaggtcacagattgcagggacacaggaagttccagggcacccaactgcagatatcgggccatagcgagcact

SEQ ID NO: 1256 - DNA, 639 bp, Homo sapiens
cagctgtggctctgaacaaggggcccgcgaggcaggccaaatgctgcgcccactaggtgcagccactcctgggggctgtggggaagacaccccctgcctgggccatggccagctctaggtggattctgattcactgtcaatgctgggttgctcccgagccctagatgttcctggaagttggccccctttatgaaaaccacttcccacagccagtgggaactgccagaggaagatctggcgtcacatggctcccaggaaagtgctgtgccctatccccactgataccatctgattccccgatgcctgtgcctgttccatctggacggtggccccctcagcctggcagcctctggacagagaggaaggaaggattggaaaagtccccgcagcacagcgacggtgggaagatgccttacgtctgatcttgatgggggcactggcctggagcctaggcccacctgcttctggggggttggggagcaggccagatggaggtggtggtgccaggaagaaatggagcgatgactgactgtggggtgggcccaggatttccacatcttggcgaagttgcccctgggaagggcagctgggggcagtggcgccagttcccttccatggtctcccggctggcaatgtggt

SEQ ID NO: 1257 - DNA, 646 bp, Homo sapiens
ggctcagcggatggtctgggtggacctggagatgacaggattggacattgagaaggaccagattattgagatggcctgtctgataactgactctgatctcaacattttggctgaaggtcctaacctgattataaaacaaccagatgagttgctggacagcatgtcagattggtgtaaggagcatcacgggaagtctggccttaccaaggcagtgaaggagagtacaattacattgcagcaggcagagtatgaatttctgtcctttgtacgacagcagactcctccagggctctgtccacttgcaggaaattcagttcatgaagataagaagtttcttgacaaatacatgccccagttcatgaaacatcttcattatagaataattgatgtgagcactgttaaagaactgtgcagacgctggtatccagaagaatatgaatttgcaccaaagaaggctgcttctcatagggcacttgatgacattagtgaaagcatcaaagagcttcagttttaccgaaataacatcttcaagaaaaaaatagatgaaaagaagaggaaaattatagaaaatggggaaaatgagaagaccgtgagttgatgccagttatcatgctgccactacatcgttatctggaggcaacttctg

SEQ ID NO: 1258 - DNA, 616 bp, Homo sapiens
ttgaagccttggaaacttgggtggctgatattctccagaggcagaaaaatgttcccagccgagagaggccatctccagcaggtcctgagtgtcaggaattcagattctctgccccactcctgctggataggaggacacttccactagaacctgggcctggcccctttccagttttctgctgggagtccggattctggtgctttgctccgaagcagtgcccgtgggcctccgggcctggctcatcatcacagcttctctgctcagtgaggagaccatcattgtgctgcttttctgatgccttccatttgcctttttctccacttgggaaaaacaaaaaaagctagtatgctacatcctgaaaagttgttaacccttcaccaccacatacattgaaaaatcagttcctgccgggaagtaccactaaaggcatattgtaaactttttttctaattggaaaggtaaacttttttcccccataactatttttcgtgtgaaggaagtaactgacctcttgagtcagagatggcactcgagtttttccccatgggtcttgcctgctacactcctggccaccctttctgtggggcttgaccaaatggaccacactggccagcct

SEQ ID NO: 1259 - DNA, 534 bp, Homo sapiens
gggcactgctggtgggctgggctgagcctagaggtcagagtgggggtgtggtgaccagaatgtcagtgcagttggcagctgagggtgtttgtgtgacctgaggtcacccttgtaagaggctccctggggcctgcatggtacatcctcccctctcctgggggaacccagctggcccaggatttgtggattgcttagaaagatccttttgggcagcctgaagactggggagggttttcctccctcctccacctccacccacattccacttaccctttccctcctcatcccagttggtaacattcccacctgattagtgtggggagttgctgctgcagctgagttctggttttgcccagcaggatcacacacgtgcggccaggaggctggcaggtggaatcagggtgtgcaggggtgcagcccaagtccttttctgctggaaaatgggctgggtgacttcacttgcgtttttttggtatgtagtgggagtaggtccccattcttcccccttgccctttgctttggggtttctaccct

SEQ ID NO: 1260 - DNA, 641 bp, Homo sapiens
ctattggcaattagttggcagtggcctgttacggttgggattggtggggtgggtttaggtaattgtttagtttatgattgcagataaactcatgccagagaacttaaagtcttagaatggaaaaagtaaagaaatatcaacttccaagttggcaagtaactcccaatgatttagtttttttccccccagtttgaattgggaagctgggggaagttaaatatgagccactgggtgtaccagtgcattaatttgggcaaggaaagtgtcataatttgatactgtatctgttttccttcaaagtatagagcttttggggaaggaaagtattgaacagggggttggtctggcctactgggctgacattaactacaattatgggaaatgcaaaagttgtttggatatggtagtgtgtggttctcttttggaatttttttcaggtgatttaataataatttaaaactactatagaaactgcagagcaaaggaagtggcttaatgatcctgaagggatttcttctgatggtagcttttgtattatcaagtaagattctattttcagttgtgtgtaagcaagtttttttttagtgtaggagaaatacttttccattgtttaactgcaaaacaagatgttaaggtatgct

SEQ ID NO: 1261 - DNA, 443 bp, Homo sapiens
gggtgggcggatcacttgtgatcaggagttcaagaccagccttgcccacatggtgaaacctcatctctgctaaaaatgtaaaaattagccgggcatgactgtgggcatttgtaatctcaggtacttgggaggctgaggcaggagagttgcttgaacctgggaggcagaggttgcagtgagctttgtgccaccacactccagtctgggtgacagagtgagactccatctcaaaaaaaaaaaaaaaaaaaacccctaaataaggcccgaaaaagccaagggaaaaggggccagggtttcccccttttatccccaccttttaaaaacccaaattggggggaacccggaaaaccaagaatttaaaaaccacccgggcaaaatggaaaaaattttttttttaaaaaaaggcccaaaaaatttcctggaattgggggggggcttttggg

SEQ ID NO: 1262 - DNA, 610 bp, Homo sapiens
aatgtcccgggtggagctggctgagtcgcgcgctctgctccacccgacggggctgtgtgtgctgggcctggctcgcggcgaaccgagatggcagagcagtcggacgaggccgtgaagtactacaccctagaggagattcagaagcacaaccacagcaagagcacctggctgatcctgcaccacaaggtgtacgatttgaccaaatttctggaagagcatcctggtggggaagaagttttaagggaacaagctggaggtgacgctactgagaactttgaggatgtcgggcactctacagatgccagggaaatgtccagaacattcatcattggggagctccatccagatgacagaccaaagttaaacaagcctccggaaactcttatcactactattgattctagttccagttggtgggccaactgggtgatccctgccatctctgcagtggccgtcgccttgatgtatcgcctatacatggcagaggactgaacacctcctcagaagtcagcgcaggaagagcctgctttggacacgggagaaaagaagccattgctaactacttcaactgacagaaaccttcacttgaaaacaatgattttaatatatc

SEQ ID NO: 1263 - DNA, 470 bp, Homo sapiens
cgacggggctgtgtgcgctgggcctggctcgcggcgaaccgagatggcagagcagtcggacgaggccgtgaagtactacaccctagaggagattcagaagcacaaccacagcaagagcacctggctgatcctgcaccacaaggtgtacgatttgaccaaatttctggaagagcatcctggtggggaagaagttttaagggaacaagctggaggtgacgctactgagaactttgaggatgtcgggcactctacagatgccagggaaatgtccaaaacattcatcattggggagctccatccagatgacagaccaaagttaaacaagcctccggaaactcttatcactactattgattctagttccagatggtggaccaactgggtgatccctgccatctctgcagtggccgtcgccttgatgtatcgcctatacatggcagaggactgaacacctcctcagaagtcagcgc

SEQ ID NO: 1264 - DNA, 510 bp, Homo sapiens
aaacacagttggccctccatatctgagtttcacagacgaaaaatattcagaagaaaaaaaaatcaatggctgtatttgtactaaacatgcccaggctttttttcttattgttatcccctaaacaatacaacaactatttttatagcatttacattgtattagatgttataactactctaaagaggatttaaagtatatggaatgatgtgcataggttatatgcaaatactatactatttatatcagggacttgagcatccttggattttggtatgtgtgggaggtcctgaaaccaatgtcctgtggatactgaaggataactgtactaatttggagatttctctctactatgatcaagattttcaaacattacattgctgattacattacatcgttacattgtgattctttccaagacttgagataaagtttgggaagaagttaccacttgtttcagtttatgaaatagaaaaaaaaaaaaggggtaaagcatgaaataaaaacctaaac

SEQ ID NO: 1265 - DNA, 611 bp, Homo sapiens
acaggattggacattgagaaggaccagattattgagatggcctgtctgataactgactctgatctcaacattttggctgaaggtcctaacctgattataaaacaaccagatgagttgctggacagcatgtcagattggtgtaaggagcatcacgggaagtctggccttaccaaggcagtgaaggagagtacaattacattgcagcaggcagagtatgaatttctgtcctttgtacgacagtagactcctccagggctctgtccacttgcaggaaattcagttcatgaagataagaagtttcttgacaaatacatgccccagttcatgaaacatcttcattatagaataattgatgtgagcactgttaaagaactgtgcggacgctggtatccagaagaatatgaatttgcaccaaagaaggctgcttctcatagggcacttgatgacattagtgaaagcatcaaagagcttcagttttaccgaaataacttcttcaagaaaaaaatagatgaaaagaagaggaaaattatagaaaatggggaaaatgagaagaccgtgagttgatgccagttatcatgctgccactacatcgttatctggaggcaacttct

SEQ ID NO: 1266 - DNA, 594 bp, Homo sapiens
ttactgtcatccctcttggttctagaaaaatagtacaaaaatgacaggtcatcctatgagcgtcatgccaatgaaaccccatcttctggagaaacccttgaatcagaattatcttttttcttgatgtcgtcagatgcagccagtttcttaatttttttaaaaactgtatgtttctgtggtatgtatatttgtacacctaactacctggcacttggaaatcacagcactactcagaggcaattgaataaagaaaaatttaattttaaatatcaagtcctgtcaaacatttctcaaacttctgattttatcaaaggtttgccagccaataaagtgcatcccaagtatacaggggagaaagctagactcctacagggtcctagagtttaagtaatttttttgttattaatataggtaataatttttctaatttttattttttggttccaaatgtaaagctccttgtgtttacctctgtttatgtcattcttgacatgtttatctaaataatgtgtgctctgtgacaggtgaaatgtaaatctgggatccatagtcaagatatcataaggacctacttcccagcctacctttcttcct

SEQ ID NO: 1267 - DNA, 597 bp, Homo sapiens
actgcaggcatgctttgatgtcccttcatcattgctgggtcctcaatgcagggggccatttcatagatgaaaatggctctcgccttccagcaattccccgcagtgctacaaatgggaagtcagagaccatcacagctgatgtcaatcacaacttgaaggatgccaatgatgtaccaatccaatgtgaaatctctcctcttatctcctatgctggagaaggattagaaagttatgtggcagataaagaattccatgcacctctaatcatcgatgagaatggagttcatgagctggtgaaaaatggtatttgaaccagataccaagttttgtttgccacgataggaatagcttttatttttgatagaccaactgtgaacctacaagacgtcttggacaactgaagtttaaatatccacagggttttattttgcttgttgaactcttagagctattgcaaacttcccaagatccagatgactgaatttcagatagcatttttatgattcccaactcattgaaggtcttatttatataattttttccaagccaaggagaccattggccatccaggaaatttcgtacagctgaaatataggc

SEQ ID NO: 1268 - DNA, 598 bp, Homo sapiens
gcctggcttctctccaaccagccatcgccttctgcccactccctagccttggcccacaccagatccttggagtgaagtcggtcaagaacaaatggcccctatgcacagagccataggaactgggggccttccctggacagtgatcatgccaggcctggacctttaggcctgcctccccaggactccttagatcccactctttctacagacttctgtgatcacagccccctgcgggcaggggggctctccctccaccgactctcaaggctcctcagcctaagactatggctcatgagaaacactcaggcctgacctaggcttgggagtcaaactgctcatattgagcatattgttaagtgggtaaagccaagtaaaggtactgggtgtttttgtgaccacttgtgaatgggtgtatggagaactgaaaagggtatctgcatgaaggctcctgtctgactattccaggatccaatattactgccttctgaaacttcctctttagggtaaccatcatgtatgcccacgagggtgatagtaattcgtgagactgaagttgcttagagtacttctttgaccaaggaataccacagacacccta

SEQ ID NO: 1269 - DNA, 616 bp, Homo sapiens
ttatcattacagataaacaacttgatgcagatgtttcccccaagcccactatttttcttccttcaattgctgaaacaaagctccagaaggctggaacatacctttgtcttcttgagaaatttttccctgatgttattaagatacattggcaagaaaagaagagcaacacgattctgggatcccgggaggggaacaccatgaagactaacgacacatacatgaaatttagctggttaacggtgccagaaaagtcactggacaaagaacacagatgtatcgtcagacatgagaataataaaaacggagttgatcaagaaattatctttcctccaataaagacagatgtcatcacaatggatcccaaagacaattgttcaaaagatgcaaatgatacactactgctgcagctcacaaacacctctgcatattacatgtacctcctcctgctcctcaagagtgtggtctattttgccatcatcacctgctgtctgcttagaagaacggctttctgctgcaatggagagaaatcataacagacggtggcacaaggaggccatcttttcctcatcggttattgtccctagaagcgtcttctgaggatctagttgggctttct

SEQ ID NO: 1270 - DNA, 507 bp, Homo sapiens
gggggcattcctgaactgacagcattcgggccgagatgtctcgctccgtggccttagctgtgctcgcgctactctctctttctggcctggaggctatccagcgtactccaaagattcaggtttactcacgtcatccagcagagaatggaaagtcaaatttcctgaattgctatgtgtctgggtttcatccatccggcattgaagttgacttactgaagaatggagagggaattgaaaaagtggagcattcagacttgtctttcagcaaggactggtctttctatctcttgtactacactgaattcacccccactgaaaaagatgagtatgcctgccgtgtgaaccatgtgactttgtcacagcccaagatagttaagtgggatcgagacatgtaagcagcatcatggaggtttgaagatgccgcatttggattggatgaattccaaattctgcttgcttgctttttaatattgatatgcttatacacttacactttatgcacaaaat

SEQ ID NO: 1271 - DNA, 460 bp, Homo sapiens
ttgatggtcgaggccatctcctgggccgcctggcggccatcgtggctaaacaggtactgctgggccggaaggtggtggtcgtacgctgtgaaggcatcaacatttctgggaatttctacagaaacaagttgaagtacctggctttcctccgcaagcggatgaacaccaacccttcccgaggcccctaccacttccgggcccccagccgcatcttctggcggaccgtgcgaggtatgctgccccacaaaaccaagcgaggccaggccgctctggaccgtctcaaggtgtttgacggcatcccaccgccctacgacaagaaaaagcggatggtggttcctgctgccctcaaggtcgtgcgtctgaagcctacaagaaagtttgcctatctggggcgcctggctcacgaggctggctggaagtaccaggcagtgacagccaccctggaggagaagaggaaaga

SEQ ID NO: 1272 - DNA, 583 bp, Homo sapiens
aagcccctaaactcctgatctataaggcgtctagtttagaaagtggggtcccatcaaggttcagcggcagtggatctgggacagaattcactctcaccatcagcaccctgcagcctgatgattttgcaacttattactgccaacagtatgattctgattcggtcactttcggcggagggaccaaggtggagatcaaacgaactgtggctgcaccatctgtcttcatcttcccgccatctgatgagcagttgaaatctggaactgcctctgttgtgtgcctgctgaataacttctatcccagagaggccaaagtacagtggaaggtggattacgccctccaatcgggtaactcccaggagagtgtcacagagcaggacagcaaggacagcacctacagcctcagcagcaccctgacgctgagcaaagcagactacgagaaacacaaagtctacgcctgcgaagtcacccatcagggcctgagctcgcccgtcacaaagagcttcacaggggagagtgttagagggagaagtgcccccacctgctcctcagttccagcctgaccccctcccatcctttggcctct

SEQ ID NO: 1273 - DNA, 554 bp, Homo sapiens
taggttgtgtgcttcgtatgagaatctaatgccagatgatctatcattgtctcactttgcccccagataagaccatctagttgcagaaaaataagctcagagcttccactgattctacattatggatatgtgccgccgaagcaagcacaaagccctacttttacacatgcctagtgatgcgtcatggacaaggcttggctctgttgagtccaactaacctacctgagattctgagatttctcttcaatggcttcctgtgagctagagtttgaaaatatcttaaaatcttgagctagagatggaagtagcttggacgattttcattatcatgtaaatcgggtcactcaaggggccaaccacagctgggagccactgctcaggggaaggttcatatgggactttctactgcccaaggttctatacaggatataaaggtgcctcacagtatagatctggtagcaaagaagaagaacaaacactgatctctttctgccacccctctgaccctttggaactcctctgaccctttagaacaagcctacctaatatctgct

SEQ ID NO: 1274 - DNA, 469 bp, Homo sapiens
caaaaagcacttaaagcgtgttgcagcgccgaagcattggatgcttgacaaactaacgggtgtatttgcacctcgtccatcgacaggtccccacaagctgagggaatgtcttcctctgatcgtcttcctcaggaatagactcaagtatgcgttgactggagatgaggtaaagaagatatgtatgcaacgtttcatcaaaattgatggcaaggttcgagtggatgtcacataccctgctggattcatggatgtcatcagcatcgagaagacagatgaacatttccgcctggtctatgacaccaagggccgttttgctgttcaccgcatcacagtggaagaggcaaagtacaagttgtgcaaagtgaggaagattactgtgggagtgaagggaatccctcacctggtgactcatgatgctcgaaccatccgctacccagatcctgtcatcaaggtgaacgatactgtgcag

SEQ ID NO: 1275 - DNA, 611 bp, Homo sapiens
agtcagagcctcagcccggctgccctggtggaaggtacaggtgtgcagcaccttcagaaaagggcataaagtggtgggggacaattctcagtccaggaaaatgcattgaccattgctggctatttgcttacctagtaagaattggattcatttttgaccagattattcttctatgcttttttgcaataaatcaaatcccacatatctacaagtggtatgaagtcctgcaccccccaggaggcctgtccaggcatgtcttcagaggcagggtgggttacactcatttacctcccctctccccaccaaattatgacacaaacgagtatgtttcctctctagaaccctgtaatgcctcctcccccatccccggagctccttactgtaggtcttaccctggacaaggattttttcaagttggaggcacagaacatgagcaatctgacattcccacagcccctcaaacatgcaaggctactaaggcaggaggagtataaatgatggatattgaccaagacctgcttggacggagaccgccatattatctgttctcttcgttcacaaaacagccttcacttgtctcagaatttgatggacacatactgtgatgagca

SEQ ID NO: 1276 - DNA, 506 bp, Homo sapiens
ttctagcatcctcttaacgtgcagcaaaagcaggcgacaaaatctcctggctttacagacaaaaatatttcagcaaacgttgggcatcatggtttttgaaggctttagttctgctttctgcctctcctccacagccccaacctcccacccctgatacatgagccagtgattattcttgttcagggagaagatcatttagatttgttttgcattccttagaatggagggcaacattccacagctgccctggctgtgatgagtgtccttgcaggggccggagtaggagcactggggtgggggcggaattggggttactcgatgtaagggattccttgttgttgtgttgagatccagtgcagttgtgatttctgtggatcccagcttggttccaggaattttgtgtgattggcttaaatccagttttcaatcttcgacagctgggctggaacgtgaactcagtagctgaacctgtctgacccggtcacgttcttggatcctcagaactc

SEQ ID NO: 1277 - DNA, 175 bp, Homo sapiens
cagtgataaaaagtatagggtcgtggcgaaaaccaaacttcacatttttatcctagtgactttccattagagcatttatgctactactcagttttaaaatacatatattacaggggggatttttgaaatttatttatttatttttgagaccgagtctcgctctctcgcccagggc

SEQ ID NO: 1278 - DNA, 515 bp, Homo sapiens
atggccgagcagaaccggaaggatgctgaagcctggttcaccagccggactgaagaattgaaccgggaggtcgctggccacacggagcagctccagatgagcaggtccgaggttactgacctgcggcgcacccttcaggggcgtgagattgagctgcagtcacagctgagcatgaaagctgccttggaagacacactggcagaaacggaggcgcgctttggagcccagctggcgcatatccaggcgctgatcagcggtattgaagcccagctgggcgatgtgcgagctgatagtgagcggcagaatcaggagtaccagcggctcatggacatcaagtcgcggctggagcaggagattgccacctaccgcagcctgctcgagggacaggaagatcactacaacaatttgtctgcctccaaggtcctctgaggcagcaggctctggggcttctgctgtcctttggagggtgtcttctgggtagagggatgggaaggaagggacccttacccccggct

SEQ ID NO: 1279 - DNA, 391 bp, Homo sapiens
acatgtgggttggttttttttatttttttctttaaaagcaatttatttctgattacaaaatacaggtgaggagcatgggcgatgcctgtaaccccttggttgtgcatcttcccagtctatttctgcttctagaaataccctgtgtacaacagcaagctcatgctgtccccaagtgcttgcacattctaacagctgcagagtatatgaccaggtggaaagtccaacagatgccccactcacaagatagggccctccaatcagtcttctggctccctttcactcatagtaactggttgctcttcctattggtcatagataaatgacacctgcacaattctccgagtgctttcaagcaacttcgggaggcagtgactaagaccctttccttgct

SEQ ID NO: 1280 - DNA, 477 bp, Homo sapiens
acatgttttttttttttttttttttttttttttcgagcaaaataattttatttcctaacatatggtaacatatacatccaatatgtgctccccttgcacatctattcacaagtgacttccaaatgacaactgctttgatatttaagcatgtgctaaaagttatcttagttgagatatgaaaaatgctttagatggataacattctgagtatattggattagtcacagcagaatttactttagttagatgagttctacaaatttaaagctttgaaaagctactacttttacttctaatacatccagatgaacacgatgtagcaatatcagcttgtattccagagaaatctcattagtttttctggtgatggaaccacttatccacgtctgttggtactgtgcaggcagattcacagggtggtggtaaagcatccacaatggctctggcagcatcaggatcacacttgaaggggctctc

SEQ ID NO: 1281 - DNA, 551 bp, Homo sapiens
ttttttttttttttttttttttttcctggaaatgtattttattttgtaagtgacaatcaaaatatatttgtgctactgattttttcaaatattaaatgggatcttaacaaaatttgtccactttgatgtattcatgtataactttagaatctgcaaagaccctgactaaagaaacagaagtaattgcacaactgagactgaaggtgttacagtgctgcaaatgatgccagatgtcttacatttagccaagtacaccttcagaggtcccttgattttgagcattaggaacaacagaggaatatacactgaaggcatcattaatagcgtttttcgttgctttatttaaatacgacagtatccaacatagctgctaaacactggacaatatttgaggtcataagtacatccacgtgttcctccaaatgacgtttggggtcctgcttgccaacattctttattgccagctgttcaggtgtcatcttatcttcttcttctacagccttattgtaattcttggctaattccaacatctcttttaccactgattcatt

SEQ ID NO: 1282 - DNA, 402 bp, Homo sapiens
ttttttctttttttttttttttttggcgagaattcactgtttatttgtgcaaagaaaaaaagatatgctgctactgcaatttagccactgctctgtttggtggccagcctcttatctctctcttcagcaacagtaagtcgaatgccctttcccctgggcagggaaatccaaggtttattgccattgccaatgacaaaaatgttggaaagcctcgtggcaaagctgttgccattggcatccttcacatgcaccacatcaaaagaaccaggatgtctttccctgttggtgatcacaccaacacgaccgaggttggctccaccaatcaccatacacaaattgcctgtatcaaatttgataaagttgattatcttgccagtccctaaatcaatctgcacagtatcg

SEQ ID NO: 1283 - DNA, 554 bp, Homo sapiens
tttttttttttttttttttttttttggtcaaatgtttatttctatgccatagttgcctcagcacaatctgtaaaagaaaggaatccaaaaaaatgaaatttttttagtcaggatattttctctgcagttataagaaagaaaataaacaccatgataccagaatcaccatttctttcacatcatcactctagtaagttgcatctaaatattttccttggttgccactttttttaggatggagaaatatccacaggaaaaaatgtctgaattcattaaaataaccttgggatagtctttgccagactgtatcgagaacatctttgtttgggtatgctatatcgctaattgccatattcttattatttaatataacaggcatactttattatataaaacaaagtgcactaaagatgaacaatgttacaaacaaactgaaatttggtgtatcttaaatcttcgggtgatgattagatagtagctgaagcgtgggtatacaaatttcttgttaatacaaatgcaactcttttctgtgatgaaaatgcacttagtagcct

SEQ ID NO: 1284 - DNA, 472 bp, Homo sapiens
gccaaccctcccaaaaagttcatagactgccttttcaaggtgtgccctatgaacagatattctgcccagaagcaatattggaaagcaaagcaagccaaacaagggaaccacaccgaggcagccttgctgaataaactacagcacgctgcagaactggaacaaaaacaaaatgaatcggagaataagagactgttgggagaaattgtaaaatacagtaatgttatacaactactgcatataaaaagcaacaaatatcttactgtcaacaagagattacctgctttactggagaagaatgccatgcgtgtgtccttggatgctgcacgaaatgaagggtcttggttttatattcatccgttctggaaactgagaagcgagggtgacaatattgttgtaggagataaagttgttttgatgcctgtgaatgcagggcagccactacatgccagcaacatagagcttcttgataacc

SEQ ID NO: 1285 - DNA, 483 bp, Homo sapiens
tatatctttagtaaggaatagaaaattggctctgtgtgtatacctattgcattgacctgaaagctgctttatccaatcttcagagaggtgacctactgcatacttctaccttcagaggcatgcctccccagccacccactcccactctcagcccttctccgtacttttctctgaaaggaatcttgtcttgttaaaccctaaagagagtgtccttaatagcaatcagcacttgtaagcttatatactggtgcatttggttttctgttgggtgaatgcggtgtgtgggcgtttgtggattctgaaagaaaaagccgtgtgtcgtgtgccatgacatttctattgcacattctttgtactggcttctttaacagcgatgaacgttcttttccctcctgggttgttcatccacgacagtctctccctgtgctccttcatcacctttccctctctctttgatggctacagagtggtagggcctggtgc

SEQ ID NO: 1286 - DNA, 373 bp, Homo sapiens
tttttttttttttttttttttttttgggatgctgctttatttctgtaaggatacactgaaacgttagatgataatagctaatgacagaatgtagaaatgaggcatcagcttctctaaccactcctacaagaatgttagtatgtattgtcattacatgtttacttttgatattggctcattatactatgtcatataataatgtagaatacagtaagtaggtgatcctgcatttcaggtaagcggtaggtggaaatccagatttcctcttgaggaaaagtcctaggaatcacaacagaagggactttgcagtcctcattaacacatggacaaagagcagacaactactatgttacaagggattcaactagtcact

SEQ ID NO: 1287 - DNA, 630 bp, Homo sapiens
ttttttttttttttttttttttggaatcgcaagaattcccaggccctctttttatttacagtgataccaaaccatccacttgcaaattctttggtctcccatcagctggaattaagtaggtactgtgtatctttgagatcatgtatttgtctccactttggtggatacaagaaaggaaggcacgaacagctgaaaaagaagggtatcacaccgctccagctggaatccagcaggaacctctgagcatgccacagctgaacacttaaaagaggaaagaaggacagctgctcttcatttattttgaaagcaaattcatttgaaagtgcataaatggtcatcataagtcaaacgtatcaattagaccttcaacctaggaaacaaaatttttttttctatttaataatacaccacactgaaattatttgccaatgaatcccaaagatttggtacaaatagtacaattcgtatttgctttcctctttcctttcttcagacaaacaccaaataaaatgcaggtgaaagagatgaaccacgactagaggctgacttagaaatttatgctgactcgatctaaaaaaaattatgttggttaatgttaaactatctaaaatagagcattttgggaatgct

SEQ ID NO: 1288 - DNA, 609 bp, Homo sapiens
tttttttttttttttttttttttacttatattaatattttatttccttctctatagagagagcaggtaaaaacatgtttagtgtttcctcgctttccaagttacattttatcttgagcagatttaaaacgagattagctgtaataggactccaggatgtgggcagatgtctacttgtcaaagacaatctctcttgcaatcagctccttcattatttcatttgtaccaccatagattggctgaactctggcatccacataagcttttgcaattgggtactcccacatgtatccccaacctccatggagctgtacacagtcgtaagctacactattttgtaactcagatgcccaatatttcgccatgcaagcagtggcggagtccaaacgtttcgcttcatgcagctggagacagttgtccacaaatgctcgggttacacatatatgtgtttttaattctgctaattgatgttgcactgtctgtaggtgagcaactgttttgccaaaagcttttctttgtttaacatagttcctggtttcttcaaacatgaattcactagccgaaattgccacatcagcaattaacagcctttcctgtggaagctctttca

SEQ ID NO: 1289 - DNA, 487 bp, Homo sapiens
gctaatggctctgccagcccttctccccaccagagagggcagggggattcaggccctctagaggtagcattgtgaccgtgtctgtagtagtcaatccttgtgtgccacagtccctgactttgttgataagagcatcagcctacatccctctggtactcagtgataagcacctaaaatcttcttaaagaaaaaatttaaaaagctctcaaaatatacgacttaacatatgaggctgcataaatatctttttagcagttgtccaactggtgcttccggttctgcctccccagaaagtggatgaccgggccaccctccaccactgccctgtaagaccatgggacacacaggccaccagttcttttcatgtggtcatcccctgttagatgggagaaaatacacctgcctcatttttgtaccttctgtgtgaacattccacggcagagcttcactaaatgtggatgaagaattgaatgaatgaatgaatatg

SEQ ID NO: 1290 - DNA, 488 bp, Homo sapiens
ttttttttttttttttttttttttattctttaaattctttatttcatgtctgtttcagcagtattgaaatataggtttctcatacgtgcaattcttttatagattcaaaagtgaggtgttgtgtgaatgttacaaatcataacatgatccaaatttataagaaagtactttaaaaatcagacaaaagacttaagaattactatgttaaatttctaatccaaatgtaaacaagaatacaggatattggcaatgctaatattcaaaatgggtttaccccagttcataattcctctgctcccctcctacctaaaatctaagaaagtattcattataaattggaagtacagaattcttaaaaagccaactggatgctgagttgtatgattttctttacaggtacaatttacttttcagcaacctgtaagccatggaaagagtaactccatatccaacaaaaaaactcaaagctctatttggctggggaaggg

SEQ ID NO: 1291 - DNA, 286 bp, Homo sapiens
ttttttttttttttttttttgcagtataacagctctttatttctgtgagttctactaggaaatcatcaaatctgagggttgtctggaggacttcaatacacctccccccatagtgaatcagcttccagggggtccagcccctctccttacttcatccccatcccatgccaaaggaagaccctccctccttggctcacagccttctctaggcttcccagtgcctccaggacagagtgggttatgttttcagctccatccttgctgcaagtgtctggtgcgttgtgcc

SEQ ID NO: 1292 - DNA, 450 bp, Homo sapiens
aatattactccggaatggctacagcccaaacgcccaggcgtgccttgtttttggattcagttctcctgtgtgcatggctttccaaaaggactgtgagttctttggaattgtgaacattcttttgaaatatggagcccagataaatgaacttcatttggcatactgcctgaagtacgagaagttttcgatatttcgctactttttgaggaaaggttgctcattgggaccatggaaccatatatatgaatttgtaaatcatgcaattaaagcacaagcaaaatataaggagtggttgccacatcttctggttgctggatttgacccactgatactactgtgcaattcctggattgactcagtcagcattgacacccttatcttcactttggagtttactaattggaagacacttgcaccagctgttgaaaggatgctctctgctcgtgcctc

SEQ ID NO: 1293 - DNA, 545 bp, Homo sapiens
agaggcctccatccaggcgggcatctacgccactcgctctggtggggccctcgtgcttgtggggctgggctctgagatgaccaccgtacccctactgcatgcagccatccgggaggtggatatcaagggcgtgtttcgatactgcaacacgtggccagtggcgatttcgatgcttgcgtccaagtctgtgaatgtaaaacccctcgtcacccataggtttcctctggagaaagctctggaggcctttgaaacatttaaaaagggattggggttgaaaatcatgctcaagtgtgaccccagtgaccagaatccctgatgttaatgggctctgccctcatccccacagtcttgggatctcagggcacaatggctggacatgggtgggctctgatgcagaactttctcttttgaatgttaagaataactaatacaattcattgtgaacagaagtccttaagcagaggaattggtgtgccttgaagatacaatctgggatagtttgggggaacttgtagccagaatgccctgttcatgctgagcaaagt

SEQ ID NO: 1294 - DNA, 597 bp, Homo sapiens
ctggacagtgacaatgatgattctgactgcccatactcagaaaaagttccaagtattaaaattccaatggacatcatggaacagcaacctttcctaagcgacagcaaaccttctgacagagaaagatcaccaacattccttgaacgccacacatcatgctgataaaattcctttccttcagtcactcggtatgccaagtcctcctagaactccagtaaaagttgtgcctcagattagaatagaacttgaacctgaagacaatgattatttctggaggagcaagggaacagaaactacattgtaacctgtttgtctttcttaaaactgacatttgttgttaatgtcatttgtttttgtttggctgtttgtttattttttaacttttatttcgtctcagtttttggtcacaggccaaataatacagcgctctctctgcttctctcttgcatagatacaatcaagacaatagtgcaccgttccttaaaaacagcatctgaggaatcccccttttgtccttaaactttcagatgtgtcctttgataaccaaattctgtcactcaagacacagacacccacagaccctgtcctttgcctcta

SEQ ID NO: 1295 - DNA, 291 bp, Homo sapiens
aggaggtctgtgctcctgcagcttccacttgattacctcaggggatggcaaactcactccctcctgagggtttctttttttttttttttttttttaaaaaaaaattttcttttttcccccaaggttgaattgaaggggccccttttaatttaattgaaacctccttttccgggtttaacccttttttcttccttaaccttccaaataagtgggaattaagggccccaattacccccccgggttattttttttttttttaaaaaaaaacgggtttccattgtttaacccaga

SEQ ID NO: 1296 - DNA, 568 bp, Homo sapiens
ctctgaaaagcaccattaagagagtggacttacagagaagcttcctgggcgttaagccaattgcgttgggaaggtgagacaaactgtctagtcctccctggaggcatgacaggaaaaggtgaggcattgaggcagccagcgcaggggcttctgctgagggggcaggcggagcttgaggaaaccgcagataagtttttttctctttgaaagatagagattaatacaactacttaaaaaatatagtcaataggttactaagatattgcttagcgttaagtttttaacgtaattttaacagcttaagattttaagagaaaatatgaagacttagaagagtagcatgaggaaggaaaagataaaaggtttctaaaacatgacggaggttgagatgaagcttcttcatggagtaaaaaatgtatttaaaagaaaatagagagaaaggactacagagccccgaattaataccaatagaagggcaatgcttttagattaaaatgaaggtgacttgaacagcttaaagtttagtttaaaagttgtaggtgattaaaataatttgaaggcgatcttt

SEQ ID NO: 1297 - DNA, 603 bp, Homo sapiens
actgaagcctgtgattggtggagtttgggtgctgtcctctttgaacttctcactggcaagactctggttgaatgccatccagcaggaataaatactcacactactttgaacatgccagaatgtgtctctgaagaggctcgctcactcattcaacagctcttgcagttcaatcctctggaacgacttggtgctggagttgctggtgttgaagatatcaaatctcatccattttttacccctgtggattgggcagaactgatgagatgaacgtaatgcagggttatcttcacacattctgatcttctctgtgactggcatctccagcactgaggcacctctgactcacagttacttatggagcaccaaagcatttggataaagaccgttataggaaatgggggggaaatggctaaaagagaacaattcgtttacaattacaagatattagctaattgtgccaggggctgttatatacatatatacacaaccaaggtgtgatctgaatttaatcccacatttggtgttgcagatgagttgtaaagccaactgaaagagttccttcaagaagttcctctgataggaagctagaagtgtagaatgaag

SEQ ID NO: 1298 - DNA, 577 bp, Homo sapiens
gcggagcgggcgcggggtcgcgggtgcggaaagcgctaggtccagccctgctgggagttttctgccacacagatttgcggaagaacctgaccgtggacgagggcaccatgaaggtagaggtgctgcctgccctgaccgacaactacatgtacctggtcattgatgatgagaccaaggaggctgccattgtggatccggtgcagccccagaaggtcgtggacgcggcgagaaagcacggggtgaaactgaccacagtgctcaccacccaccaccactgggaccatgctggcgggaatgagaaactggtcaagctggagtcgggactgaaggtgtacgggggtgacgaccgtatcggggccctgactcacaagatcactcacctgtccacactgcaggtggggtctctgaacgtcaagtgcctggcgaccccgtgccacacttcaggacacatttgttacttcgtgagcaagcccggaggctcggagccccctgccgtgttcacaggtgacaccttgtttgtggctggctgcgggaagttctatgaagggactgcggatgagatgtgtaaagctctgct

SEQ ID NO: 1299 - DNA, 623 bp, Homo sapiens
agggagagcgctgttccttctggctgggaagtgcgagccggtggggggagagagaggagtagagcattatgtggaggtacttcccggttcccttgcgtctgagggtcttatgccagaggggatagaaagcccaacagaaactcaagatagaagaaggagaatctgcgagtgtctgtctcctgtcaagcttccctaatacagccctggtagaacttcatcaacagtggaaggcatttgcaaagccaccagacattacattccagagccttgagaaaaactgatgaaaaaaaagtcatgaaaaaaagtcattcgcacaagtgacaccatggtgtgaagtcaaggagcacagactctggagtcagagggcttgagtcaacctgagcatcttcagctttgactgtgaagacacagctttgactctctgtgttgcagagatggtagtgcccactccagtgacgcttgtgaggattagttgagataataaatacaaaatgctgagcatcaaacctagagtagagaaaggtctcaagtaagtactcattaccagtatttgttatttaatttcacttttgtctacattcccttgtgtgaaatggtttggataattaattaaggaaaacttt

SEQ ID NO: 1300 - DNA, 609 bp, Homo sapiens
gttgagccgggtagggaaagcagcctaaagcccgggacaggcgcacaggcccaggtgtgtaggccacagcagccgcagtcctgaaaggctgcaacacccagacctccaggagagaccaggcccaggatgcctcgcctgttcttgttccacctgctagaattctgtttactactgaaccaattttccagagcagtcgcggccaaatggaaggacgatgttattaaattatgcggccgcgaattagttcgcgcgcagattgccatttgcggcatgagcacctggagcaaaaggtctctgagccaggaagatgctcctcagacacctagaccagtggcagaaattgtaccatccttcatcaacaaagatacagaaactataattatcatgttggaattcattgctaatttgccaccggagctgaaggcagccctatctgagaggcaaccatcattaccagagctacagcagtatgtacctgcattaaaggattccaatcttagctttgaagaatttaagaaacttattcgcaataggcaaagtgaagccgcagacagcaatccttcagaattaaaatacttaggcttggatactcattctcaaaaaaagaga

SEQ ID NO: 1301 - DNA, 539 bp, Homo sapiens
agcccaggggagcaagtctccgcaaacttgctccgcattcacggcaggacttcccagccgctgtggatgttcaggaaaaccgagtctgttctgttagcgtggcctttgaatgcttcaaaaataaacagaggataaccaaccgcgggaggaaatttttagctggagagagttgtagttcctgtgtctgtctccaggactgtgatatgtgttgactgaagagctaactacaagttcatcgtgaagaataaatgagataagctacctcaagtgcctgtaccaagataggctcacaatacattgaccctggaaacagacgggggattcttataagtcacaaaagaaaataaataacttcatccatggagggaaagagacagcttgagaaaagggactttggaaaaaggctgtctctagacagcagtcttgtggaatacatggactccaataaatacattgagcatctgctgactcagcttgaggagcaacacaggagtctctggagggagaagttggcagtggcccgactacagcgagaagtt

SEQ ID NO: 1302 - DNA, 608 bp, Homo sapiens
gggaggggacgctgagggcccatgtgctgaaaatccgaagtgccgcggaaagtggaggtgagggccgcccgccctagaggtgcccgtccgagaggcagagctgacaaggaaggtttcgagcgttttgctggcaaagggatttcttacaatctccaggcatgcgtctttctgccctgctggccttggcatccaaggtcactctgcccccccattaccgctatgggatgagccccccaggctctgttgcagacaagaggaagaaccccccatggatcaggcggcgcccagtggttgtggaacccatctctgatgaagactggtatctgttctgtggggacacggtggagatcctagaaggcaaggatgccgggaagcagggcaaagtggttcaagttatccggcagcgaaactgggtggtcgtgggagggctgaacacacattaccgctacattggcaagaccatggattaccggggaaccatgatccctagtgaagcccccttgctccaccgccaggtcaaacttgtggatcctatggacaggaaacccactgagatcgagtggagatttactgaagcaggagagcgggtacgagtctccacacgatca

SEQ ID NO: 1303 - DNA, 523 bp, Homo sapiens
tacggccgggctgagctgtgctacagccatcgccaaggcatatccccccacgtccatgtccaggagcccccctactgtcctggtcatctgtggcccggggaataatggaggagatggtctggtctgtgctcgacacctcaaactctttggctacgagccaaccatctattaccccaaaaggcctaacaagcccctcttcactgcattggtgacccagtgtcagaaaatggacatccctttccttggggaaatgcccgcagagcccatgacgattgatgaactgtatgagctggtggtggatgccatctttggcttcagcttcaagggcgatgttcgggaaccgttccacagcatcctgagtgtcctgaagggactcactgtgcccattgccagcatcgacattccctcaggatgggacgtggagaagggaaatgctggagggatccagccagacttgctcatctccctcacagcccccaaaaaatctgcaacccagtttaccggtcgctactattacctgggg

SEQ ID NO: 1304 - DNA, 474 bp, Homo sapiens
ggcaaaaaatcaaggtatttggtcccggaacaaagcttatcattacagataaacaacttgatgcagatgtttcccccaagcccactatttttcttccttcaattgctgaaacaaagctccagaaggctggaacatacctttgtcttcttgagaaatttttccctgatgttattaagatacattggcaagaaaagaagagcaacacgattctgggatcccaggaggggaacaccatgaagactaacgacacatacatgaaatttagctggttaacggtgccagaaaagtcactggacaaagaacacagatgtatcgtcagacatgagaataataaaaacggagttgatcaagaaattatctttcctccaataaagacagatgtcatcacaatggatcccaaagacaattgttcaaaagatgcaaatgatacactactggcgcagctcacaaacacctctgcatattacatgtacc

SEQ ID NO: 1305 - DNA, 524 bp, Homo sapiens
cctaccatttatttcatgattggtttcagacttgttcctcctggaaacactccctaacaagcacccttgcaggaatgaagacacaccacacacatctaccccattactgcatgtactcaagagtcagcttttatatgatctctcccaagtgctcctataatggggatctttcactcaccctaaagtgaggacaaaatacttgaaagcatgagcccagtgcctgtaggtgtgcaattaacctcagaccaaggaagtgccgaacgcatctggcttttagcaaggcacctgacaaagtccttcaggatgtttttgtgcatgagctagagaaatgtacctggagaacagcttctactgccagatgatcttactcaaaagatgcagattaagcaaaatatcaacccaaaggggtggtccctgatggcccaccagccctgtgcctggctcgtttcctatgtttcctagatttggtttcagacttgctcctcctgcagacactccctaaccagcatccttgcagaaaactg

SEQ ID NO: 1306 - DNA, 646 bp, Homo sapiens
aaaacagtcgaaatcatagtcctttactcctcctgcccttctccttttgcttaaggtgagcttcaccaggaacattttcgccacaccaaaggaaaactagccagaggcaaaccagctctaagttaatatttgccaattaaatggtttaagttttggattcacagaaacactgacagcatcttattagaatatactgtactgcatatagcaggggctcaatgaatatctgttgaattgagattgatactttcattattattgatgggttcattttacctaatgggtcaacgcgttgtatggatggatgccctgaatattctgatgatttgggttcgacttcttttcttttctacctgaggtgggtgagctacaatgactctgaataatagaatcagcattatattatctagttaatataaaatctgaataaaatctaaggaaatcttggaaagcaatattttcataaaccatatcatcagttgccgaactccccacacatacaagtactatggaaaaagtaatgtctactgcccaggagtcatcttatagaaaccacaattctagaagttgctgtacccacctggaaatccatgctgactgttttgtctcgggtgctttttgctttcagtcctgtgaaggggttcac

SEQ ID NO: 1307 - DNA, 539 bp, Homo sapiens
ctgagtgtgaagtcagcagagctgttactgtggcaacctaatattgtgacctccatcttgaagagtctgcacatttaagctggggatagcgtttcttgacttctgtgaggctccggcaggggaagaggaagcattttaatacatatgcctctcttttacaaaaaagaaaaaaaaatcatcgtaggccctaacatgtaccatgttgacaaaaatgccagatcaaatggatttgagaaataagcccaattcaaggctggctcagccctccacggggcctcccagggaaaggaattcctttatgttcttggaagcccttttctagaaaagccattccattcatacctttgtagagcagtgggctgggtgtggaggacagcgcggagggtatctgcaagagcctgtattttccgcctcccttgcccccactccttttatccttttaaaagtcctatcagccctgccttcgtcccttccgccctaagccctaagagtgggggaggtttaatacggccaatggatcttgtataaagtctacgtaa

SEQ ID NO: 1308 - DNA, 651 bp, Homo sapiens
cctgtccagcctggacggcgacctggcgggccgatactacgcgctcaagagcatgacggaggcggagcagcagcagctcatcgacgaccacttcctcttcgacaagcccgtgtcgcctctgctgctggcctcgggcatggcccgcgactggcccgacgcccgcggtatctggcacaatgacaataagaccttcctggtgtgggtcaacgaggaggaccacctgcgggtcatctccatgcagaagaggggcaacatgaaggaggtgttcacccgcttctgcaccggcctcacccagattgaaactctcttcaagtctaaggactatgagttcatgtggaaccctcacctgggctacatcctcacctgcccatccaacctgggcaccgggctgcgggcaggtgtgcatatcaagctgcccaacctgggcaagcatgagaagttctcggaggtgcttaagcggctgcgacttcagaagcgaggcacaggcggtgtggacacggctgcggtgggcggggtcttcgacgtctccacgctgaccgcctgggcttctcagaggtggagctggtgcagatggtggtggacggagtgaagctgctcatcgagatggagcagcggctggagcagggccaggccatcgacgacctcatgcct

SEQ ID NO: 1309 - DNA, 634 bp, Homo sapiens
cctggaagctgcctgtccttctccctgtgcttaaccagaggtgcccatgggttggacaatgaggctggtcacagcagcactgttactgggtctcatgatggtggtcactggagacgaggatgagaacagcccgtgtgcccatgaggccctcttggacgaggacaccctcttttgccagggccttgaagttttctacccagagttggggaacattggctgcaaggttgttcctgattgtaacaactacagacagaagatcacctcctggacggagccgatggtcaagttcccgggagccgtggacggcgcaccctatatcctggtgatggtggatccagatgcccctagcagagcagaacccagacagagattctggagacattggctggtaacagatatcaagggcgccgacctgaaggaagggaagattcagggccaggagttatcagcctaccaggctccctccccaccggcacacagtggcttccatcgctaccagttctttgtctatcttcaggaaggaaaagtcatctctctccttcccaaggaaaacaaaactcgaggctcttggaaaatggacagatttctgaaccgtttccacctgggcgaacctgaagcagcacccagttcatga

SEQ ID NO: 1310 - DNA, 504 bp, Homo sapiens
ttctgtgctggctaccccgagggtggcattgatgcctgccagggcgacagcggtggtccctttgtgtgtgaggacagcatctctcggacgccacgttggcggctgtgtggcattgtgagttggggcactggctgtgccctggcccagaagccaggcgtctacaccaaagtcagtgacttccgggagtggatcttccaggccataaaggtgaaagttgggtccagatgggagccagggtggggacgtttgggtgtctaatgggggaagggaggcagagatttgttttaggaaacctacgctcaggcctagaagagggccccccttgggaacagatggactttgaagggttcctggggaagggaagccagtggtgggacgtggaagcctctcagacctcgggagcccccagctgtctttccccagactcactccgaagccagcggcatggtgacccagctctgaccggtggcttctcgctgcgcagcctccagggcccgaggtgat

SEQ ID NO: 1311 - DNA, 327 bp, Homo sapiens
tgtgtacatgcgcctacgttgtgataatcacatcaagtcttacgaaaaggaaaaggccagcctgccaggagtgaataaagctttgggcaaatatggccctgccgatgtggaagacactacaggaagtggagctacagatagcacagatgatgatgacattgacctctttggatctgatgatgaggaggaaagtgaagaagcaaagaggctactggaagaacgtcttgcacaatatgaatcatagaaagccaaaaacctgcacttgttgccaagtcttccatcttactagatgtgaaaccttgggatgatgagacagatatggcgaaa

SEQ ID NO: 1312 - DNA, 580 bp, Homo sapiens
ggggcccaatggagcatcctacgcaaggacatcccctccttcgagcgctacatggcccagctcaaatgctactactttgattacaaggagcagctccccgagtcagcctatatgcaccagctcttgggcctcaacctcctcttcctgctgtcccagaaccgggtggctgagttccacacggagttggagcggctgcctgccaaggacatacagaccaatgtctacatcaagcacccagtgtccctggagcaatacctgatggagggcagctacaacaaagtgttcccggccaagggtaacatccccgccgagagctacaccttcttcattgacatcctgctcgacactatcagggatgagatcgctgggtgcatcgagaaggcctacgagaaaatccttttcactgaggccacccggatcctcttcttcaacacacccaaaaagatgacagactacgccaagaacgaggggtgggtcctgggccccaacaactactacagttttgccagccagcagcagaagccggaagaaccaccattccctccacagaactggccaaacaggtcatcgagtatgcccg

SEQ ID NO: 1313 - DNA, 498 bp, Homo sapiens
tccttatttatttaacttcacccgagttcctctgggtttctaagcagttatggtgatgacttagcgtcaagacatttgctgaactcagcacattcgggaccaatatatagtgggtacatcaagttcatctgacaaaatggggcagaagagaaaggactcagtgtgtgatccggtttctttttgctcgcccctgttttttgtagaatctcttcatgcttgacatacctaccagtattattcccgacgacacatatacatatgagaatataccttatttatttttgtgtaggtgtctgccttcacaaatgtcattgtctactcctagaagaaccaaatacctcaatttttgtttttgagtactgtactatcctgtaaatatatcttaagcaggtttgttttcagcactgatggaaaataccagtgttgggtttttttttagttgccacagttgtatgtttgctgattatttatgacccgaaaaatatatttcttctccta

SEQ ID NO: 1314 - DNA, 559 bp, Homo sapiens
gggtctgtaaatttcaattctgaaccttaagctggaggttctcggaacttcagtatgtaagtgcttagacaagttactgagttgctcccggatgtgctgtgagagccattgtaagtgtgactttaaaaaaatatgtacatctctcagatctcattagagcctcatagaaatggaacatgtccttgaaaaccatgaattggaaaatgcatacgttttgagcttgtgtttggggactagctctctgggtcccagtggtaaacttagcccattaatggctgatgctttaaagaaatataaaagcccctaggctagtctcttcttccctccccccatctgcatagcaggtaccaatcttcatcaaagcttttgaaccaagtctcagattgcctttgatcagaagcctggtttgtcccccagtgcagaaatgtaggaactgtgtgagagaaagagaaagagggagagaaggagggaagaaagaggagagagagaaaaagaaagggaggaggagcaggagagagaagcctgtctcgcctactatagaattttcttctctcctctc

SEQ ID NO: 1315 - DNA, 478 bp, Homo sapiens
aagctagaaaacatcaccaacccctggagcccaagacaccgcgtggtccagccaactctggagcagacgcagtactcctgggagcgccaggcggccttccgcttcaaaaggaagctgcctaagtacctgctctttaccagcccccaggagaacccctggggccacaagcgcagctaccgcctgcagatccactccatggccgaccaggtgctgcccccaggctggcaggaggagcaggccatcacctgggcaaggtaccccctggcagtgaccaagtaccgggagtcggagctgtgcagcagcagcatctaccaccagaacgacccctggcacccgcccgtggtctttgagcagtttcttcacaacaacgagaacattgaaaatgaggacctggtggcctgggtgacggtgggcttcctgcacatcccccactcagaggacattcccaacacagccacacctgggaactccgtgggct

SEQ ID NO: 1316 - DNA, 401 bp, Homo sapiens
ttcaagctgaactatcacaattcttaatcagttacaatttacaaacagataagtttaaaataaacaatttacaaaatttttgaagcataccttgacatcttgttttgcagttaaacttatctgttaacagctgcctgctgttttctgctcccaaatgaaaggaagcaactcttctgataacgaaaagatacctgtctgaggcaaacgaaacattggcacacagcacagcctcctcaatccactggatcccaactcatctctcatttatttcggcttcttttattccaggattaaggtagggaaacattttcatttcttttcgcttttattctgcttttgtaaaagcagtattttgagagggacattgcctcttcattgaatttctcatcaattcattattt

SEQ ID NO: 1317 - DNA, 498 bp, Homo sapiens
gggtggggctgacgtcaggagccaagatggcggcggcggtcgcactctccttgaggcgccggttgccggccacaacccttggcggagcctgcctgcaggccccccgaggagcccagacagctgcagccacagctccccgtatcaagaaatttgccatctatcgatgggacccagacaaggctggagacaaacctcatatgcagacttatgaagttgaccttaataaatgtggccccatggtattggatgctttaatcaagattaagaatgaagttgactctactttgaccttccgaagatcatgcagagaaggcatctgtggctcttgtgcaatgaacatcaatggaggcaacactctatcttgcacccgaaggattgacaccaacctcaataaggtctcaaaaatctaccctcttccacacatgtatgtgataaaggatcttgttcccgatttgagcaacttctatgcacagtacaaatccattgagccttatttga

SEQ ID NO: 1318 - DNA, 644 bp, Homo sapiens
tacggccgggtggcctatgtctcctttggacctcatgccggaaaattggtcgcgattgtagatgttattgatcagaacagggctttggtcgatggaccttgcactcaagtgaggagacaggccatgcctttcaagtgcatgcagctcactgatttcatcctcaagtttccgcacagtgcccaccagaagtatgtccgacaagcctggcagaaggcagacatcaatacaaaatgggcagccacacgatgggccaagaagattgaagccagagaaaggaaagccaagatgacagattttgatcgttttaaagttatgaaggcaaagaaaatgaggaacagaataatcaagaatgaagttaagaagcttcaaaaggcagctctcctgaaagcttctcccaaaaaaagcacctggtactaagggtactgctgctgctgccgctgctgctgctgctgctaaagttccagcaaaaaagatcaccgccgcgagtaaaaaggctccagcccagaaggttcctgcccagaaagccacaggccagaaagcagcgcctgctccaaaagctcagaagggtcaaaaagctccagcccagaaagcacctgctccaaaggcatctggcaagaaagcataagtggcaatcataaaaagta

SEQ ID NO: 1319 - DNA, 524 bp, Homo sapiens
ctcagtgttttatatatgtagtatacagttaaaatatacttgttgccggtactggcagctgatattttctctcttttttcatggattaaccttgcttgagggctttaacaattgtattactttttcaaagaactaagctttagcttcattgatttttttctatttaattgggttttgctcttctctttagcattggaaacatagaaatgctttctgatttctttgggtagatttacgtattcagcttcttgagatggaagtttagatcactgatccttcagcttgttttcttttttgtatacatagattttaggacgatatattttcccttgagttctgctttagctgcagctcttatgttttgatatgcctctctttattatccttcagttaaaaatatctttcaattcattgatatataaaaatatgtgcctagtttttaacatctggagattttctagttttgaaaaaaacataagccaggcatggtggctcacacctgtatccccagcactttgggaggc

SEQ ID NO: 1320 - DNA, 476 bp, Homo sapiens
gaggaggtcctgcccgatcctgtgttggagcagctcaaatcagccttctcatctgcggaaaccacagaattgagtggcaaatgtgtggtggctttggcaacagatcccaatatcctgagcctgagtggtaaggtgctgccatcctgtgaccttgctcgacgctatggccttcgggatgtggacggccgccccgtccaagactatttgtctttgagctctgttctctcacacgtgtccggcctgggctggctggcctcctacctgccctccttcctccgtgtgcccaagtggattattgccctctacactagcaagttctaaccctcctggtctgacactacgtctctgcttgtcttctcatttggacttggtggttcgtcctgtctcagtgaaacagcagcctttcttgtttacccatacccttgatatgaagagaagccctctgctgtgtgtccgtggtgagttctggggtgcgc

SEQ ID NO: 1321 - DNA, 549 bp, Homo sapiens
aatgaaggtcatcgaaaaccgggccatgaaggatgaggagaagatggaactgcaggagatgcagctgaaggaggccaagcacatcgctgaggattcagaccgcaaatatgaagaggtggccaggaagctggtgatcctggaaggagagctggagcgctcggaggagagggctgaggtggccgagagtaaatgtggggacctagaggaggagctgaaaattgttaccaacaacttgaaatccctggaggcccaggcggacaagtattccaccaaagaagataaatatgaagaggagatcaaactgttggaggagaagctgaaggaggctgagacccgagcagagtttgccgagaggtctgtggcaaagttggagaaaaccatcgatgacctagaagatgaagtctatgcccagaagatgaagtacaaggccattagcgaggaactggacaacgcactcaatgacatcacctccctctgagccccacccagcgtggccacctcagctctcttctctcctctcctttccattctctctatggggaggggagc

SEQ ID NO: 1322 - DNA, 565 bp, Homo sapiens
ggggcttcctgagctgacagcattcgggccgagatgtctcgctccgtggccttagctgtgctcgcgctactctctctttctggcctggaggctatccagcgtactccaaagattcaggtttactcacgtcatccagcagagaatggaaagtcaaatttcctgaattgctatgtgtctgggtttcatccatccgacattgaagttgacttactgaagaatggagagagaattgaaaaagtggagcattcagacttgtctttcagcaaggactggtctttctatctcttgtactacactgaattcacccccactgaaaaagatgagtatgcctgccgtgtgaaccatgtgactttgacacagcccaagatagttaagtgggatcgagacatgtaagcagcatcatggaggtttgaagatgccgcatttggattggatgaattccaaattctgcttgcttgctttttaatattgatatgcttatacacttacactttatgcacaaaatgtagggttataataatgttaacatggacatgatcttctttataattctactttgagtgct

SEQ ID NO: 1323 - DNA, 565 bp, Homo sapiens
acaaaccctactcaggtttctagcctggcagagctgatcactaaacatatattccaccttcctctctcatagtcctttctcaccttaaataagcttggtaacaaaaaggcgcaattcacatcaaaaaccgagtaaagtaaacatcttctgaagtgagataaaagaagatgcagaaatcaaaattattccccaaaatcatgttttgctgtcttctctctaatatttaagaaaagatccaatgaaaaccaaaattctttattccccacagctttgcagggtaaaaaaaatatttccctaatgaaaactaattcccaataaagacaaaatactgtctcaattgcataggataaacacctattgctacttatgggaacaaagagtgaatctcacagagagaaggattaagaaaaagtttccctggctgggggcttcccaaatagaggaagctccttcacaaatcttcaaaattctaagtatagcactgagcatttttacatagaataggtaagaaaaagcatctcatctgtctctgaactctaaaagcttacctatacctttcataata

SEQ ID NO: 1324 - DNA, 265 bp, Homo sapiens
tacggccgggtgaggtttcccgtgttgagtcaaattaagccgcaggctccactcctggtggtgcttgcctgtaatcacagctactcaggagactgaggcaggagaatcgcttgaaccagggagtcagaggttgcagtgagctgatcgcaccacttcattccagcctggtgacagagcaagaccctggctcattaaaaaaaaaaaaaaaaattaaaataattttgtcaaaattggggggggaaactttttaaattttaggaaaatg

SEQ ID NO: 1325 - DNA, 490 bp, Homo sapiens
cccgaggtacttttacccatttccagttccacctttactttatcaagtggaactttctgtgggaggacagcaatttaatggcaaaggaaagacaagacaggctgcgaaacacgatgctgctgccaaagcgttgaggatcctgcagaatgagcccctgccagagaggctggaggtgagaatccagaatttttctatttttcatctgtaatgtcaaggagaagagaattgacagaggaagacatttctgatgattaacaagtcagaagatgaacacaaaaagacagatagatggcagcactccagactgtaatgatgatggtgagattgtctaagcaaaatcgcagactgtgagtcttcagatgctagcatagatgaatttccccaaactcaagaatcagctagtgattatttatctgatgtatggaaaggaaatgtggtatattctcatctagtcattcaacagaaaggacttcatcatgcaacatttttc

SEQ ID NO: 1326 - DNA, 436 bp, Homo sapiens
tgtacctggaaataacgaaaaatattttatatggtgatttgtcgcattaatgtctatcttatatcaaattgtgattatcataattcgaaaacagccattaaataaatgctgagcatctcagcttatgtattaggatggacgaaagcagtatcacacataatccatattctcaagtagcctctactctagccagcagatgtgtgctcagagtgaaatgattcaagaagagcaattgcatgcagggactgtatggccaaatggctcataaatgacactgataacaagtggctgttttgatctaatatagttctcatcatctccaacttccccccgcccttcatggattcttcttggttttagtagctctgcaagcataaacaacctctgaagtatcttgacaaaacgattatatctgcttcaagttctttattaatct

SEQ ID NO: 1327 - DNA, 603 bp, Homo sapiens
gttgagccgggtagggaaagcagcctaaagcccgggacaggcacacaggcccaggtgtgtaggccacagcagccgcagtcctgaaaggctgcaacacccaaacccccaggagagaccaggcccaggacgcctcgcctgttcttgttccacctgctagaattctgtttactactgaaccaattttccagagcagtcgcggccaaatggaaggacgatgttattaaattatgcggccgcgaattagttcgcgcgcagattgccatttgcggcatgagcacctggagcaaaaggtctctgagccaggaagatgctcctcagacacctagaccagtggcagaaattgtaccatccttcatcaacaaagatacagaaactataattatcatgttggaattcattgctaatttgccaccggagctgaaggcagccctatctgagaggcaaccatcattaccagagctacagcagtatgtacctgcattaagggattccaatcttagctttgaagaatttaagaaacttattcgcaataggcaaagtgaagccgcagacagcaatccttcagaattaaaatacttaggcttggatactcattctcaaaaa

SEQ ID NO: 1328 - DNA, 493 bp, Homo sapiens
aatgataaaattgtactacgagatgcactgggactcaacgtgaccttttcaagtgggatggagtcttgccctgtctccaaggctggagcccaatggtgtgatcttggctcactgcaacctccacctcccaggttcaaacgtttctcctgcctcagcctcccaagtaactgggattacagtgactgtcatgtggcatgggtctctgcccaagctcgtaatgagactatagcaaggcggctgtgggacgtcagttgtgacctgctgggcctcccaatagactaacaggcagtgccagttggacccaagagaagactgcagcagactacacagtacttcttgtcaaaatgattctccttcaaggttttcaaaacctttagcacaaagagagcaaaaccttccagccttgcctgcttggtgtccagttaaaactcagtgtactgccagattcgtctaaatgtctgtcatgtccagatttactttgcttctgttattg

SEQ ID NO: 1329 - DNA, 519 bp, Homo sapiens
gggaaggtgaacagtgtggcccgccatgttcttctccgcggcgctccgggcccgggcggctggcctcaccgcccactggggaagacatgtaaggaatttgcataagacagttatgcaaaatggagctggaggagctttatttgtacacagagatactcctgagaataaccctgatactccatttgatttcacaccagaaaactataagaggatagaggcaattgtaaaaaactatccagaaggccataaagcagcagctgttcttccagtcctggatttagcccaaaggcagaatgggtggttgcccatctctgctatgaacaaggttgcagaagttttacaagtacctccaatgagagtatatgaagtagcaactttttatacaatgtataatcgaaagccagttggaaagtatcacattcaggtctgcactactacaccctgcatgcttcgaaactctgacagcatactggaggccattcagaaaaagcttggaataaaggttggggagactacacc

SEQ ID NO: 1330 - DNA, 441 bp, Homo sapiens
ttttttttttttttttttttttttacaagaacctttattggaaaaatgtccaacaagtgatatcactagcagctgaaggggctgccaggtgagagggggagcacctgaggctccatggaagacattggagtagtgcagtgcagcatctgcctctagggtcagacaattccttttatttgctggggtaagaggagtacccacagaaacacccctctctgagggccagaggcaagatgtggggcagctggggatgctcagagtcctgatacaggtgaaatggggcccccatttgggacctaatggagtagggtacaactagtgactctcccctggaccggggaatggaaggagatatcccatctgatatccactccccaggtccaggggcacagactctgaacagacctaccttctggctctgctcacagtggaaagaggatg

SEQ ID NO: 1331 - DNA, 348 bp, Homo sapiens
ttttttttttttttttttttttttcttataagataggcctttcctgatgccaaataagggcaatgatcagcttccccattcctggagccaggacctgccacatcatttgcagtgcaaaatgcaaatgagagccccttgttcaaagagcaagataaaagtgccatcccaggcgctcaaaatacaaaggttcctcctttcttctatggtctgtcaattggttaaggcattttaatttgctacttaatgtcatgcttgctgggcactggaatactcatgcggtgagtgtaggatcccacgggtatctggaggctcgccctgcaatttagcatgtgcaaggagctccccacc

SEQ ID NO: 1332 - DNA, 527 bp, Homo sapiens
ttctttttttttttttttttttttctatagaacattcaactttatttcaaatataccaattctaaaatttatcaatatacccattacgatgctttctgagtgacataccacacaaatgcaatacggattctctaaagaatcctcttaggctacttcactcaaagtctctgcagctgcctgcactgtgaaggctgcaacataaatctgactcttcacttctccccaggccttggaagggtccactttgctttcaatatcaaacagagcatcataaattcctgggaatgactcccctgcatacttgttgtggctgcttggagcatacatgacatgcctataaaaaggcctgtctggtaaccctaatggatcaataaatgctctttccacaaacatgagttgatcattcatcattcttaatactattgggtagcttttgtcaaagtcctggagtctctcactgaacttggaagcaatttctgaaaaattctttactgcagaaaaaagtgaatcaaatgatacactgtacg

SEQ ID NO: 1333 - DNA, 467 bp, Homo sapiens
ccatttccaggaatgcctcagtgcaagacagcaccaacaccccactgggctcaacgttcctacaaacagagggtgggaggacaggtccctacaaagctgtggcctttgacctgatcccctgcagtgacctgcccagcctggatgccattggggatgtatccaaggcctcacagatcctgaatgcctacctggtcagggtgggtgccaacgggacctgcctgtgggatcccaacttccagggcctctgtaacgcacccctgtcggcagccacggagtacaggttcaagtatgtcctggtcaatatgtccacgggcttggtagaggaccagaccctgtggtcggaccccatccgcaccaaccagctcaccccatactcgacgatcggcacgtggccaggccggcggagcggaggcatgatcgtcatcacttccatcctgggctccctgcccttctttctacttgtgggt

SEQ ID NO: 1334 - DNA, 577 bp, Homo sapiens
tttttttttttttttttttttttggactaaaaaattttattgaactggtcaattttctttgccaatattactgtattcttatttctagtaatagaagtgtgaaaaagcatcaaggaaacttaaattgcattctcatactgactgcatacaataattctgaaaacagcggaagttatatatatcccccataagtaaaacatgagtaacacaacaaatgaaaaacgaataggagacaattcaaataatggcgacctgttattctcatctagttaagtactattattttctaacaggaatttgctatttcaaatatattatctgagatgtctatatatttatattttgagatactatacaaatttgagccaatgacatagaattttacaaatcaagaagcttattctggggccatttcttttgacgttttctctaaactactaaagaggcattaatgatacataaattacattatctacatttacagcatttaaaatgtgttcagcatgaaatattagctacaggggaagctaaataaattaaacatggaataaagatttgtccttaaaaataatctaca

SEQ ID NO: 1335 - DNA, 545 bp, Homo sapiens
ttttttttctcttttttttttttttgtgggaaagctgtttactgcgttctcccgctgtgtgtaattgggttcagtgtggctgaaacacagctttgccccaggctttggcacttccagcctcaggagaggcgctgaaccccagcaaaggaatgtgttccctgtgggcagccggtgcccctggtcactgcagttgcccaaggctgatatttccctgggatccagctggagatgttgggctgggaggccctgtggtcactcatactgcaggagagagaagaagggtacaggtgccagcttctccctgcccttaagcgaggtcagctccaccaggctcacgcactccaggacctcagcctgcaggcggcccagcagctcacaggcagcgttcatggttccaccagtggccagcagatcgtccacgacgaccaccctctgtcctggctccagggcgtctttctgaatctccagctcagccttcccgtactccagggaataggaggcccacagagtggggcctggcagcttcccccgctttcggatgagca

SEQ ID NO: 1336 - DNA, 625 bp, Homo sapiens
gccggcgtcggctgcgtctccggcgtttgaattgcgcttccgccatctttccagcctcagtcggacgggcgcggagacgcttctggaaggaacgccgcgatggctgcgcagggagagccccaggtccagttcaaacttgtattggttggtgatggtggtactggaaaaacgaccttcgtgaaacgtcatttgactggtgaatttgagaagaagtatgtagccaccttgggtgttgaggttcatcccctagtgttccacaccaacagaggacctattaagttcaatgtatgggacacagccggccaggagaaattcggtggactgagagatggctattatatccaagcccagtgtgccatcataatgtttgatgtaacatcgagagttacttacaagagtgtgcctaactggtatagagatctggtacgagtgtgtgaaaacatccccattgtgttgtgtggcaacaaagtggatattaaggacaggaaagtgaaggcgaaacccattgtcttccaccgaaagaagaatcttcagtactacgacatttctgccaaaagtaactacaactttgaaaagcccttcctctggcttgctaggaagctcattggagaccctaacttggaat

SEQ ID NO: 1337 - DNA, 624 bp, Homo sapiens
tttaccctgtataaacatctttctcttcccagtatttctaagcatgtgacaatgaatatgcaaaggaagcgcagcagtccaccaggtgtgggatatgtgtggcacaattcaagacaatgattaaacctccacttgatgttgcaaaagagattttgaaaaatttgctttcaccacaccagcctaaataataaagaaccagccaccaggtttcagtggaaagtattgcctcagggaatgcttaatagttcaactatttgtcagctcaagctctgcaaccagttagagacaagttttcagactgttacatcgttcactatgttgatattttgtgtgctgcagaaacgagagacaaattaattgaccgttacacatttctgcagacagaggttgccaacgcgggactgacaataacatctgataagattcaagcctctactcctttccgttacttgggaatgcaggtagaggaaaggaaaattaaaccacaaaaaaatagaaataagaaaagacacattaaaagcattaaatgagtttcaaaagttgctaggagatactaattggatttggagatattaattggatttggccaactctaggcattcctacttatgccatgtcaaattt

SEQ ID NO: 1338 - DNA, 121 bp, Homo sapiens
gtggctgggggtaaggaccctgacagggcctcaggaggagttccggaaagccaaggccagctccacaggcagcttcacagcacctgatcccggcctgaagcgcaagtcccctaatgacgta

SEQ ID NO: 1339 - DNA, 628 bp, Homo sapiens
aaaatcataatgcatgactaaaaactccttggatttatttcccattttaaaatttttagcggtaagttcagatttataatctttctctagacttccatggtctgaatgttgcctgctgaagtagcaacctaaaaagtatcccctgcttatgcttctccagttggccctccatgtccaaaggcttcgcatctgtgattcagcccactgtgggtcaaaaatatttggggaaaaaaatggatggttgcgcctttgctgaacatgtacaaacttttttttgtcattaaacaatatagtataacaactatttacaaagcatttacattgtattagctattataggtaatctagagatgatttaaagtgtatggtaggatgtgcacaggttatatacaaatactacaccattttctataagggacttgaacatcatggactttagtatcctagggggttcttggaacccatcacccataggggcaccataggacaactatagtaccgtgtttatttcctattaattcaggttccgtttagagtctaaaactaaaacctaatcatttagtcacagtgtaaaaacaaatggaaataacagctcaaatcttcaaaatattactatagcattatgttt

SEQ ID NO: 1340 - DNA, 608 bp, Homo sapiens
tacggccgggatagagtctggaaaaaataaaaacagaatttgagaaccttggaccactcctgtccctgtagctcagtcatcaaagcagaagtctggctttgctctattaagattggaaatgtacactaccaaacactcagtccactgttgagccccagtgctggaagggaggaaggcctttcttctgtgttaattgcgtagaggctacaggggttagcctggactaaaggcatccttgtcttttgagctattcacctcagtagaaaaggatctaagggaagatcactgtagtttagttctgttgacctgtgcacctaccccttggaaatgtctgctggtatttctaattccacaggtcatcagatgcctgcttgataatatataaacaataaaaacaaccttcacttcttcctattgtaatcgtgtgccatggatctgatctgtaccatgaccctacataaggctggatggcaccccaggctgagggccccaatgtatgtgtggctgtgggtgtgggtgggagtgtgtctgctgagtaaggaacacgattttcaagattctaaagctcaattcaagtgacacattaatgataaactcagatctgatca

SEQ ID NO: 1341 - DNA, 638 bp, Homo sapiens
ttgcagtggctctgaccaatctggaagatacagaaaatgccaagagagcctacgcagaagcagtccacctggataagtgtaaccctttagtaaacctgaactatgctgtgctgctgtacaaccagggcgagaagaagaacgccctggcccaatatcaggagatggagaagaaagtcagcctactcaaggacaatagctctctggaatttgactctgagatggtggagatggctcagaagttgggagctgctctccaggttggggaggcactggtctggaccaaaccagttaaagatcccaaatcaaagcaccagaccacttcaaccagcaaacctgccagtttccagcagcctctgggctctaatcaagctctaggacaggcaatgtcttcagcagctgcatacaggacgctcccctcaggtgctggaggaacatcccagttcacaaagcccccatctcttcctctggagccagagcctgcggtggaatcaagtccaactgaaacatcagaacaaataagagagaaataagaatagaatgaatgaccccaaaatagggttttcttgggcgaggatgtgctggatcaggaaaggtgacatgacacaggcagagcagagtggcacccaccacagaataca

SEQ ID NO: 1342 - DNA, 520 bp, Homo sapiens
aaccgagaggctgagactaacccagaaacatccaattctcaaactgaagctcgcactctcgcctccagcatgaaagtctctgccgcccttctgtgcctgctgctcatagcagccaccttcattccccaagggctcgctcggccagatgcaatcaatgccccagtcacctgctgctataacttcaccaataggaagatctcagtgcagaggcccgcgagctatagaagaatcaccagcagcaagtgtcccaaagaagctgtgatcttcaagaccattgtggccaaggagatctgtgctgaccccaagcagaagtgggttcaggattccatggaccacctggacaagcaaacccaaactccgaagacttgaacactcactccacaacccaagaatctgcagctaacttgttttcccctagctttccccagacaccttgttttattttattataatgaattttgtttgttgatgtgaaacattatgccttaagtaatgttaattcttatttaagttattgatg

SEQ ID NO: 1343 - DNA, 399 bp, Homo sapiens
tatcgtcagacatgagaataataaaaacggagtcgatcaggaaattatctttcctccaataaagacagatgtcatcacaatggatcccaaagacaattgttcaaaagatgcaaatgatacactactgctgcagctcacaaacacctctgcatattacatgtacctcctcctgctcctcaagagtgtggtctattttgccatcatcacctgctgtctgcttagaagaacggctttctgctgcaatggagagaaatcataacagacggtggcacaaggaggccatcttttcctcatcggttattgtccctagaagcgtcttctgaggatctagttgggctttctttctgggtttgggccatttcagttctcatgtgtgtactattctatcattattgataa

SEQ ID NO: 1344 - DNA, 520 bp, Homo sapiens
ccggggagtttaaaagagtttgtatatatttaaatgaataactttttatactctttgttacatgtttgtatcagtatttagtggaaaaccatttgagttgtcttgggttagaatttttctttttgtactgtttccttaaaacagagttcttagtaacaggggcagttcctgaattcaaataaaccattttgtatgtttggattttgaatgggttaactaattacaggctaaaataatgccttttttagtgtttttaatttttagaattcactacataaattgtaagtaattgtgggtctcaaaaacactaggaacttttaagtgtcttaacacttcctcgatgtgcctgccctgagggagtgagttcacatttgagacagctgcactccactgtggacgtgcctttgtcttcaggccatgccgaagggtgtttaaagcagtcttgcaggtcgctcctttcccagccgtggataaaaactgaagctaggaatctaataaggaatgctgatttcctcagttc

SEQ ID NO: 1345 - DNA, 549 bp, Homo sapiens
  misc_feature 344: n = A,T,C or G
tacggccgggcctcatgggcagtggcaaagaagatacactggcaaagatgtactcattctgggaggtggagacggaggcatattgtgtgaaatagtcaaactaaaaccaaagatggtcactatggtagagattgaccaaatggtgattgatgggtgtaagaaatacatgcgaaaaacgtgtggcgatgtcttagacaatcttaaaggagactgctatcaggttctaatagaagactgtatcccggtactgaagaggtacgccaaagaagggagagaatttgattatgtgattaatgatttgacagctgttccaatctccacgtctccagaagaagattccacantgggagtttctcagactgattcttgacctctcaatgaaagtgttgaagcaggatgggaaatattttacacaggggaactgtgtcaatctgacagaagcactgtcgctctatgaagaacagctggggcgcctgtattgtcctgtggaattttcaaaggagatcgtctgtgtcccttcatacttggaattatcttcaatttggatat

SEQ ID NO: 1346 - DNA, 466 bp, Homo sapiens
attatgtgattaatgatttgacagccgttccaatctccacgtctccagaagagattccacatgggagtttctcagactgattcttgacctctcaatgaaagtgttgaaacaggatgggaaatattttacacaggggaactgtgtcaatctgacagaagcactgtcgctctatgaagaacagctggggcgcctgtattgtcctgtggaattttcaaaggagatcgtctgtgtcccttcatacttggaattgtgggtattttacactgtttggaagaaagctaaaccctgaagatcagtagcccctaatcacatgtgctgcaaatagccttcctgacctccatatgctgtacatgacatcaaaatgagtcaggcaattgattgtgaattccttaaagttttcctttttttaataattatttttaatttaaaaaagcaaatggaaaatgtatattttgatgagcttagg

SEQ ID NO: 1347 - DNA, 588 bp, Homo sapiens
ggcaaaaaatcaaggtatttggtcccggaacaaagcttatcattacagataaacaacttgatgcagatgtttcccccaagcccactatttttcttccttcaattgctgaaacaaagctccagaaggctggaacatacctttgtcttcttgagaaatttttccctgatgttattaagatacattggcaagaaaagaagagcaacacgattctgggatcccaggaggggaacaccatgaagactaacgacacatacatgaaatttagctggttaacggtgccagaaaagtcactggacaaagaacacagatgtatcgtcagacatgagaataataaaaacggagttgatcaagaaattatctttcctccaataaagacagatgtcatcacaatggatcccaaagacaattgttcaaaagatgcaaatgatacactactgctgcagctcacaaacacctctgcatattacatgtacctcctcctgctcctcaagagtgtggtctattttgccatcatcacctgctgtctgcttagaagaacggctttctgctgcaatggagagaaatcataacagacggtggcacaaggag

SEQ ID NO: 1348 - DNA, 665 bp, Homo sapiens
ggcaaaaaaatcaaggtatttggtcccggaacaaagcttatcattacagataaacaacttgatgcagatgtttcccccaagcccactatttttcttccttcaattgctgaaacaaagctccagaaggctggaacatacctttgtcttcttgagaaatttttccctgatgttattaagatacattggcaagaaaagaagagcaacacgattctgggatcccaggaggggaacaccatgaagactaacgacacatacatgaaatttagctggttaacggtgccagaaaagtcactgtacaaagaacacagatgtatcgtcagacatgagaataataaaaacggagttgatcaagaaattatctttcctccaataaagacagatgtcatcacaatggatcccaaagacaattgttcaaaagatgcaaatgatacactactgctgcagctcacaaacacctctgcatattacatgtacctcctcctgctcctcaagagtgtggtctattttgccatcatcatctgctgtctgcttagaagaacggctttctgctgcaatggagagaaatcataacagacggtggcacaaggaggccatcttttcctcatcggttattgtccctagaagcgtcttctgaggatctagttgggctttctttctgggtttgg

SEQ ID NO: 1349 - DNA, 555 bp, Homo sapiens
acaaaatataaataatagtgtatgcaagttaatgtacattatacatgcgtgtaagggacataaatggaggggtgtgaactttggttaggcaaagtttactggaggaggggtttttgagtcaaatttggaaggatgaacttgttagatagtcagagttggaaacaaaacactccaagaatagggatataagcattgctagtctggaatagtctattccttgtgaaaatataaatttaattttcaggaatccagtatattccaaacatcacatatttagcatgagaaaaattgatttgtgattgtgtatatgagtcattgttaatgggagacaagctgaactgccacatgccaccaaatgaacctttacttcaatcaaaaaggagggtatgattggttcaattatattaacagaacatcatgggcatttctctatgatggtcattcaaggtagtaggtctctttcaactgagtgcaacattgagagtaatgatttggttcagggcaactacaaataatcacttactaagccttatataaagccattatttttatatc

SEQ ID NO: 1350 - DNA, 612 bp, Homo sapiens
aggcggaggcggataagaaggccgctgaggacaagtgcaagcaggtggaggaggagctgacgcacctccagaagaaactaaaagggacagaggacgagctggataaatattccgaggacctgaaggacgcgcaggagaagctggagctcacggagaagaaggcctccgacgctgaaggtgatgtggccgccctcaaccgacgcatccagctcgttgaggaggagttggacagggctcaggaacgactggccacggccctgcagaagctggaggaggcagaaaaagctgcagatgaaagataccaagaacatggaggccaagaaactctccaaggaccggatgaagaagtacatggcaagaaggaaatggcagaaaacgggcaatgctgtgagagccattggaagactgtcctctatggcaatgatctcagggctcagtggcaggaaatcctcaacagggtcaccaaccagcccgctcaatgcagaaaaactagaatctgaagaagatgtgtcccaagctttccttgaggctgttgctgaggaaaagcctcatgtaaaaccctatttctctaagaccattcgcgatttagaagttgtggagggaagtgctgct

SEQ ID NO: 1351 - DNA, 606 bp, Homo sapiens
gttggggcagggcaagtgtgtcctctctgtgttaggtgattagggaagagtttggagagagtgccatttgggctgagatttgatcatgaagagccagttgtgtgaatatcattgatgagcatgagggccaaggaagcaccgggaagtcccaaggcagggaccggcttggaaaggaacaccaagaaggccagtaaaagaaagaaagccaagaaggccagtaaaagaagagccccaagaaggggctcgctagtgtccagtcttgtaaagtttcattctgagtgaattagaaagccactggagggtttatgcaggaaaaggaggtgggtagctggggttctgtaagttaacacataaaataatttattttgactcatctgcaagtgtgtgttctaggtaatttcgctttaaaatggtactgtgattcctctgaagtcatttattatgcaaattaaggacagcttgtcagaacctctgggtttcttgtgtcttgcattactagctgcaattcgtatttttcccatatttaaacattttctttttagttatgttctgtgatatatggaagggaaatgttcatgtagttcagtctatgtctttccctttctg

SEQ ID NO: 1352 - DNA, 583 bp, Homo sapiens
gcaatataatgtgataagttctttaaaagagtaagagcaacgtgctttgggagcagagaagagggagaaagcagcatcttgcctggatgagctaggggacacagaagagaagcccactatctcatttaatctttacaactctcttgcaaggttccctggttgtgaaaatacatgagataaatcatgaaggccactatcatcctccttctgcttgcacaagtttcctgggctggaccgtttcaacagagaggcttatttgactttatgctagaagatgaggcttctgggataggcccagaagttcctgatgaccgcgacttcgagccctccctaggcccagtgtgccccttccgctgtcaatgccatcttcgagtggtccagtgttctgatttgggtctggacaaagtgccaaaggatcttccccctgacacaactctgctagacctgcaaaacaacaaaataaccgaaatcaaagatggagactttaagaacctgaagaaccttcacgcattgattcttgtcaacaataaaattagcaaagttagtcctggagcatttacacctttggtgaagttggaacgac

SEQ ID NO: 1353 - DNA, 601 bp, Homo sapiens
ttttctagccatcattccttccctagggacatcttcatcaggagcagggatgggggtattttttctgtcccacgaaggggaggggagagcagaggtggttggattctggtgaaaccccatacaagttccccgcagcccttcccgtctgtgcctttccccgttggcgggcgtttcatggagtgggaaggggcagagccatgagagtgagctttctggctcactgaggagggtactgttggccccatagagagaagatgggatttcccagatgctctggaaaacctgtcacctttaaaatctcaggattaatcctagtttctggtctccgctccttgtacatcatctcattttgattcagggcagtttaatgggtggtatcgtgtctattctataggtgcgcagactgaggcttagagaaaggtttagagcttcggttctagagtcagatgggacttaagtcccagctctacctcttaattgctgtgaccttgagcaagtggtttagcctccgtgtgcctcagtgtctggtacacagtgggcactcaggaagtgtgggccctttaggtcaaaggagcctgagtacaaagttccccgtgagcct

SEQ ID NO: 1354 - DNA, 620 bp, Homo sapiens
ctgaccgagtgagcctgcggaacctgcgcggctactacaaccagagcgaggccaggtctcacatcatccagaggatgtatggctgcgacgtggggcccgacgggcgcctcctccgcgggtatgaccagtacgcctacgacggcaaggattacatcgccctgaacgaggatctgcgctcctggaccgccgcggacacggcggctcagatcgcccagcgcaagtgggaggcggcccgtgaggcggagcagctgagagcctacctggagggcctgtgcgtggagtggctccgcagatacctgaagaatgggaaggagacgctgcagcgcgcggaacacccaaagacacacgtgacccaccatcccgtctctgaccatgaggccaccctgaggtgctgggccctgggcttctaccctgcggggatcacactgacctggcagtgggatggggaggaccaaactcaggacactgagcttgtggagaccaggccagcaggagatggaaccttccagaagtgggcagctgtggtggtgccttctggagaagagcagagatacacgtgccatgtgcagcacgaggggctgccggagcccctcaccctgagatgggagccgtcttcccag

SEQ ID NO: 1355 - DNA, 590 bp, Homo sapiens
acatatctttgagatgattggattgtgtttagactaataacttcaaccttcaagataggtgactgactagatccctgtttatttatctgatcatctgaaggctttgaagaagattgtcatcctcataagaagcaccatgtctttattccctcacctggactgtccatccccttctctccctgataaaaaccatagtgtccttcaagacccagcttggatgtcacctgggtgatgccgtccctgactcccactgagcgacccatttaggcctcattcctgcatcagtctttatgtacttcagttacaaaatcatcacatcttagtgtgattgtttcccactccctgactaaattgtgaggcctttagagatgaggactatatctgtctacctttttatatccagttcccagtatgctgcttgacatgtcataggtagttagtaaattctttctctgtgaacacacaaatggaaggatggcccattcttttaggagttcatatgagcttgctaactctgagtcagaatgacccgtgaactgaaacattcagacgacaccaccactaaaaaccatggggattcaattcttttg

SEQ ID NO: 1356 - DNA, 590 bp, Homo sapiens
cgacacccagcctgcggggtcgtctggcgcggtttgggaacccgcggagcctgtgctgaagcccaataaacctctcattctagctaaccgcgtcggggagcggcgccgggagaagggcggtgagcagtcggagtcaggacggccccggagcgaaagccggagcatgagcaggggcgggtgggtaggagggcaggaaggtgggtcttcttgtgactgaaggtcccccggatctgcccctccagaggcgacttgcatcacggagatgtcggtgatgatggcttgctggaagcagaatgaattccgcgacgatgcgtgcagaaaagagatccagggcttcctcgattgtgccgcgagggctcaggtgaccgatggctcctggggtgctttctcaggaaaagaatgggggagatagaagtaatgattctccctgccttttgctaggaaaggccctttcattcatttgggaggtatattattcacgccaaagtgggaaaggttacagttttgaaggctgtgagatcttgacggatttattcattgctctgaactttcgagttactgtacgtaaaatgaggctaaccgataccacc

SEQ ID NO: 1357 - DNA, 587 bp, Homo sapiens
atggcattcagcatagtgtagcgccacctaacggctgtgggtggagagttcccggctgagacaagacctgccggtgctttgaagtgaatggttccttgagccacagatattcaaggtaggcaaatagagagtgtttttctttatatgtgtctcccagctaataaagctagattaaatggatagaattaagatttcaccactttgcaactcttgatgaaaataatagattagacagtggtcttcaacagctgccgaaagtattaggtgcaaagctgataggaaaagcggtgtaatggtagggcaaggatagaaaacagctaatcttctaattagcagaagagacagtccagggacagatccgtacctcagcgtcatctgacttacaacaaagatgccattgcaacgcagcactgcagtgggtggggaagactgcctggacacgttggtctccctcactccatgtacagaatcccttctagatagatggtagaccaaaaggggaaagtaaaataacaaagcttctagaagaaacataggagaatatcttcacgaccgcgggtagatttgttaaacaggacacagaacaa

SEQ ID NO: 1358 - DNA, 499 bp, Homo sapiens
cttcagcgcctgtagcacagaagggccaaggagctgcagtcctcgaccagcaggaggtttgctcctcagcccactcgctgcatccagatcagctcacccctctcccttccctgcccaccaggactctgatagcccctggcagccacagcccattttgccaagatgtctagagtagccaaatatcgccggcaggtgagtgaagaccccgacatcgacagcctgctggagaccctgtctcccgaggagatggaggagctggagaaggagctggacgtggtggacccagacgggagtgttcccgtggggctgcggcagagaaaccagacggagaaacagtccacgggtgtgtacaaccgggaggccatgctcaacttctgtgaaaaggagaccaagaaacttatgcagagggagatgtccatggatgaaagcaagcaagtggagaccaagacagatgccaagaatggagaggaaaggggcagagatgccagcaaaaaagccc

SEQ ID NO: 1359 - DNA, 606 bp, Homo sapiens
tgcctccgtttccctggccgctcacgctgacctccgcaagttggcagtcaacatggtccccttcccacgtctccatttctttatgcctggctttgcccctctcaccagccgtggaagccagcagtatcgagctctcacagtgccggaactcacccagcaggtcttcgatgccaagaacatgatggctgcctgtgacccccgccacggccgatacctcaccgtggctgctgtcttccgtggtcggatgtccatgaaggaggtcgatgagcagatgcttaacgtgcagaacaagaacagcagctactttgtggaatggatccccaacaatgtcaagacagccgtctgtgacatcccacctcgtggcctcaagatggcagtcaccttcattggcaatagcacagccatccaggagctcttcaagcgcatctcggagcagttcactgccatgttccgccggaaggccttcctccactggtacacaggcgagggcatggacgagatggagttcaccgaggctgagagcaacatgaacgacctcgtctctgagtatcagcagtaccaggatgccaccgcagaagaggaggaggatttcggtgaggaggccga

SEQ ID NO: 1360 - DNA, 431 bp, Homo sapiens
tgtccagggcacaggacagggaagggcgagcctcaaggaatgaatctgcaagagggtgggagcaggtgggaggtcctcctgggggctcctgtcatactcctggggcggccaccactgtgtcacagttccctctcagactgtaaggtgggatgtctcccctcagcatggctgccacttctggaactgtacgaactcctgtgtcagctgaggacacggggcctgagtgctgttgctactgcattgatgtgttcctcgaatcaaacctagagaaatgagctgggtatggaagcacatggcatttaccttctctttcccccacttttccccagaaactccatgttgccaatgtgctggaagatgaccccggctacctacctcacgtctacagcgaggaaggggagtgtggaggggccccatccctcagctctctg

SEQ ID NO: 1361 - DNA, 493 bp, Homo sapiens
aaatcgactgcaatttgggaatttccaatgagtttgtggtgctcctggacttacgcaccaaggaggtggtgttcaactgctactgcggggatgtcattggctggactccagactcctccacactcaaaatcttctatggacgaggagaccacatcttcctacaggcgacagagggttctgtggaggacataagggagatagtgcagagactgaaggtaagggagagagcccggcgatagggcggcgatttgtatggtttcggcctcaggaaccactgaaatacttccctagcccagtcagttaggctaagacacgcactggcccggagagaatcacagttgtcacttacaaactagacatcttgtgggttctgtagctaggttcttcctctggaaggtttgtgccagagatctgtggatcttcatgctattacctcggaaagacaagagatacttattaaccttggacactgatagaaagtataaatttaagc

SEQ ID NO: 1362 - DNA, 95 bp, Homo sapiens
aactcctcgtgacaggcctttctggggtctgatcgccctttgtttccttacacttgggcctgttatcagaagaactctgaatccggaaatacctt

SEQ ID NO: 1363 - DNA, 639 bp, Homo sapiens
ttgatgttaatctgtgtttcctagtcttgagaaatggattttaggctgggttctagagagctggggtgatagtgggctgtgctggtggaggtgaagatgtagagtgttctagaggtgactaacattttaagctaaagattgttggcaaatagaagatgaaagaataggaaataattccaagatcttcaactcttctgcattacaatatgtaaccaaatgatcttaattgtctagtcaaccaaagtttacaaaaaataaattctgccataactgtgactcaaatatatgcgaatgcataaaatatgggtaagaaagtgaatttgaggcttgaacacaggtaattaagaggatcttataagaattgccaagacttgatggctaaggactcaggtttagaatataataaggaaaggtcttctgcttctggctatgacagagttgctagaatcagatgaattcatccactgagaataactataaaacttgagaacaactataaaacttggacaaaatacaaagcaaaacaaaacaaaatctgaaagctctgtagaacaaccagggcagccaggacctcagggaccaagatcctggagagaaggaaaacatattgaagtgagtactgctctgagtacagctatt

SEQ ID NO: 1364 - DNA, 632 bp, Homo sapiens
aatacaactacttaaaaaatatagtcaataggttactaagatattgcttagcgttaagtttttaacgtaattttaatagcttaagattttaagagaaaatatgaagacttagaagagtagcatgaggaaggaaaagataaaaggtttctaaaacatgacggaggttgagatgaagcttcttcatggagtaaaaaatgtatttaaaagaaaattgagagaaaggactacagagccccgaattaataccaatagaagggcaatgcttttagattaaaatgaaggtgacttaaacagcttaaagtttagtttaaaagttgtaggtgattaaaataatttgaaggcgatcttttaaaaagagattaaaccgaaggtgattaaaagaccttgaaatccatgacgcagggagaattgcgtcatttaaagcctagttaacgcatttactaaacgcagacgaaaatggaaagattaattgggagtggtaggatgaaacaatttggagaagatagaagtttgaagtggaaaactggaagacagaagtacgggaaggcgaagaaaagaatagagaagatagggaaattggaagataaaaacatacttttagaagaaaaaagataaatttaaacctgaaaagt

SEQ ID NO: 1365 - DNA, 427 bp, Homo sapiens
tacggccgggtgtggtagctcatgcctgtaatcctggcactttgggaagccaagatgggtggatcacctgaggtcaggggtttgaaagcagcctggacaatatggtgaaaccaccgtctcttctaaaagtacaaaatgagcaaggtgtggtggtgcatgcctgtaatcccagctacttgggagactgacgcaggggaatcatttgaacctgggaggcgaaggttccagcaagccgagatcacaccactgcactcctgcctgggatacaagagtgaaactgtctcaaaaaaaaaaaaaaggggacccaaatttttggaaggcccaaaaatttttcccccggttttagggaaaaattgacccccccggtttaatttttttccgaaaaaaaattttcttaaccccggggggggggccctttaaaaaaaaa

SEQ ID NO: 1366 - DNA, 633 bp, Homo sapiens
tgccgaagcccctcaccctgagatgggagccatcttcccagtccaccatccccatcgtgggcattgttgctggcctggctgtcctagcagttgtggtcatcggagctgtggtcgctactgtgatgtgtaggaggaagagctcaggtggaaaaggagggagctactctcaggctgcgtccagcgacagtgcccagggctctgatgtgtctctcacagcttgaaaagcctgagacagctgtcttgtgagggactgagatgcaggatttcttcacgcctcccctttgtgacttcaagagcctctggcatctctttctgcaaaggcacctgaatgtgtctgcgtccctgttagcataatgtgaggaggtggagagacagcccacccttgtgtccactgtgacccctgttcccatgctgatctgtgtttcctccccagtcatctttcttgttccaaagaggtggggctggatgtctccatctctgtctcaactttatgtgcactgagctgcaacttcttacttccctactgaaaataagaatctgaatataaatttgttttctcaaatatttgctatgagaggttgatggattaattaaataagtcaattcctggaatttgaaagagcaaataaagac

SEQ ID NO: 1367 - DNA, 643 bp, Homo sapiens
catggggtaataatggactgacaacttgaatacttcacctcttagactctaagtttttggttctcttggactttgtgctgcattagatactaatttgatttaaaaaaataaaactttcttaaaagatgacagtcctgttcgtcttgatgccttactaaatgctgtccccaattttttccaaggatgatctggatgattatcttcatggcatatgtagatgcctgtatagttattcatagatagttgtaccatatgataggaaggtcataggaagacctttcactggagtaaaatggtcaaaataagagatgaacaagataatgggagaagtgaagataggtaagtataaggttgaataggcaaatgttaaccagaattaaagaaaataataaaaagtgtgagctttacaggtgatgagaagaaacaatttagcaataaaggagcaaaaggaagagaaagaaccaaactaactctaaactgtcatatgtatccagggtggtaaattccaaaacatttgcaaaattggatgaaaaagagattaatagtgtgtgtgtttataaaaaaatatagacaagaatggtcttcccatgttaaatttcaaagatgcaaatatttgacaaaacattagaataataaaacactg

SEQ ID NO: 1368 - DNA, 476 bp, Homo sapiens
gactgggcttttctgcatcactctgataaaggagaagtggctgaatgaggacatcatgctcaggaccctcaaggtcacattccagaaggagtcccgttctgtgtaccagctacagtatatgtcctggccagaccgtggggtccccggcagtcctgaccacatgctcgccatggtggaggaagcccgtcgcctccagggatctggccctgaacccctctgtgtccactgcaggttttggaaatgggcttcaggagggtctggtgaggcagaggggacagagcatggaggggagtacagggcatggggctagtcttgtagtctgagtgcctattttgagaacccttgctcaccctccatggactgtaattgtgagcacttgttcagcacagactcagctggggaataagcacacagctcttgctcaacaaaatgtaagtgattaaaaaggttttccttgtcccaaaaaaaaaaaaaaa

SEQ ID NO: 1369 - DNA, 103 bp, Homo sapiens
taggatataccagggtgtgatccaagctatccagaaatcagatgaaggccacccattcagggcatatctggaatctgaagttgctatatctgaggagttggtt

SEQ ID NO: 1370 - DNA, 204 bp, Homo sapiens
atgatttatctaacttggggaacaaaaataaaccagattaaccacaaccatgccttactttatcaaatgtataaggagtaaatatgaatcttatatgacaaaatgtttcattcattataacaaatttccaataatcctgtcaattatatttctaaattttcccccaaattccaagcagagtatgtaaattggaagttaacttat

SEQ ID NO: 1371 - DNA, 358 bp, Homo sapiens
tttttttttttttttttttttttttgcgcggcaggatgctggtttatttactgtaggatctccagggccatcaaagccccctcgtgggatagggagactatttacacagccagggaggagggcagccaggaggcagagaccgggtcccgtatttccctctgcccgaatgaggaggggaggggtgtcctgggtcctgcagctgtagtcttggggttcagatggaaacttcatactcccgcgtatccccagcttcatacagcgggttgctgaagtccgactccacggtgatggggctgtaggagtgggagcccgagaagccgaaaagggactttccctgaagcctgggaagggagaggac

SEQ ID NO: 1372 - DNA, 449 bp, Homo sapiens
tttttttttttttttttttttttttggactcataaagtgctctttattggcatctgaaaaagaagtgcctcagccttcaaggctgggacagaagttggggaggagctgctctgccccaggctcaataccaatagaccttcttgtatttccgggtctccttgatccccatggcctccttcacctcctcctgcagtgtctttagacagggcacatgggttctttctaaagcatcttccactgatgtgtctttggggccgtcaatccacgtttcagggacgatgccatcagctctgggaaattcgggtttagggataattctccctgatcgtgtggagactcgtacccgctctcctgcttcagtaaatctccactcgatctcagtgggtttcctgtccataggatccacaagtttgacctggcggtggagcaagggggcttcactagggatc

SEQ ID NO: 1373 - DNA, 529 bp, Homo sapiens
tttttttttttttttttttttttttttcgggggtttagagaaatagtccttttaatatgacttagaaactgcttttctctggctttgtttcactcttcttcctcttccccttccccttcaccttcctccatcgtttccacaatgagctctgctgtgcaggtggcttctccaagactgttgacagccttgcaggtgtacttggcatcgtcatccccgcaaacatcactaataattaaagagcagttcccgtcctcatcgtagtctatctggaagtggcgggactccctgattgactggtcatctttgaaccagacaacctcggggtctgggtatccttcaatcttgcagtcaaatctagcagcacttccctccacaacttctaaatcgcgaatggtcttagagaaatagggttttacatgaggcttttcctcagcaacagcctcaaggaaagcttgggacacatcttcttcagattctagtttttctgcattgagcgggctggttggtgaccctgttgaggatttcctgc

SEQ ID NO: 1374 - DNA, 257 bp, Homo sapiens
gagggcttgctgtgcggagggcctgctatggtgtgctgcggttcatcatggagagtggggccaaaggctgcgaggttgtggtgtctgggaaactccgaggacagagggctaaatccatgaagtttgtggatggcctgatgatccacagcggagaccctgttaactactacgttgacactgctgtgcgccacgtgttgctcaaacagggtgtgctgggcatcaaggtgaagatcatgctgctctgggacccaactggt

SEQ ID NO: 1375 - DNA, 581 bp, Homo sapiens
ataaaaaagactgcacatttattacaaaaggcacctgggaagtcatcgggatagaagctctaaccagtgattatctatactacattagtaatgaatataaaggaatgccaggaggaaggaatctttataaaatccaacttagtgactatacaaaagtgacatgcctcagttgtgagctgaatccggaaaggtgtcagtactattctgtgtcattcagtaaagaggcgaagtattatcagctgagatgttccggtcctggtctgcccctctataccctacacagcagcgtgaatgataaagggctgagagtcctggaagacaattcagctttggataaaatgctgcagaatgtccagatgccctccaaaaaactggacttcattattttgaatgaaacaaaattttggtatcagatgatcttgcctcctcattttgataaatccaagaaatatcctctactattagatgtgtatgcaggcccatgtagtcaaaaagcagacactgtcttcagactgaactgggccacttaccttgcaagcacagaaaacattatagtagctagctttgatggcagaggaagt

SEQ ID NO: 1376 - DNA, 581 bp, Homo sapiens
gtgatgccactgttacaatatctcatcgatatactcccaaagagcagttgaagaaacatacaattcttgcagatattgtaatatctgctgcaggtattccaaatctgatcacagcagatatgatcaaggaaggagcagcagtcattgatgtgggaataaatagagttcacgatcctgtaactgccaaacccaagttggttggagatgtggattttgaaggagtcagacaaaaagctgggtatatcactccagttcctggaggtgttggccccatgacagtggcaatgctaatgaagaataccattattgctgcaaaaaaggtgctgaggcttgaagagcgagaagtgctgaagtctaaagagcttggggtagccactaattaactactgtgtcttctgtgtcacaaacagcactccaggccagctcaagaagcaaagcaggccaatagaaatgcaatatttttaatttattctactgaaatggtttaaaatgatgccttgtatttattgaaagcttaaatgggtgggtgtttctgcacatacctctgcagtacctcaccagggagcattccagtatcatgc

SEQ ID NO: 1377 - DNA, 600 bp, Homo sapiens
agggcatcgacttctacacgtccatcaccagggcgaggttcgaggagctgtgctccgacctgttccgaagcaccctggagcccgtggagaaggctctgcgcgacgccaagctggacaaggcccagattcacgacctggtcctggtcgggggctccacccgcatccccaaggtgcagaagctgctgcaggacttcttcaacgggcgcgacctgaacaagagcatcaaccccgacgaggctgtggcctacggggcggcggtgcaggcggccatcctgatgggggacaagtccgagaacgtgcaggacctgctgctgctggacgtggctcccctgtcgctggggctggagacggccggaggcgtgatgactgccctgatcaagcgcaactccaccatccccaccaagcagacgcagatcttcaccacctactccgacaaccaacccggggtgctgatccaggtgtacgagggcgagagggccatgacgaaagacaacaatctgttggggcgcttcgagctgtgcggcatccctccggccccaggggcgtgccccagatcgaggtgaccttcgacatcgatgccaacggcatcctgaacgtcac

SEQ ID NO: 1378 - DNA, 557 bp, Homo sapiens
cggaagctggagcgcatcgcgcgcctggaggacaaggtgaagacgctcaaggccgagaacgcggggctgtcgagtaccgccggcctcctccgggagcaggtggcccagctcaaacagaaggtcatgacccacgtcagcaacggctgtcagctgctgcttggggtcaagggacacgccttctgaacgtcccctgcccctttacggacaccccctcgcttggacggctgggcacacgcctcccactggggtccagggagcaggcggtgggcacccaccctgggacctaggggcgccgcaaaccacactggactccggccctcctaccctgcgcccagtccttccacctcgacgtttacaagcccccccttccacttttttttgtatgttttttttctgctggaaacagactcgattcatattgaatataatatatttgtgtatttaacagggaggggaagagggggcgatcgcggcggagctggccccgccgcctggtactcaagcccgcggggacattgggaaaggggacccccgccccctgccctcccctctctgca

SEQ ID NO: 1379 - DNA, 481 bp, Homo sapiens
atatggatcgatatggtggccgggatcgctatgatgaccgaggcagcagagactatgatagaggctatgattcccggataggcagtggcagaagagcatttggcagtgggtatcgcagggatgatgactacagatgatgcggggaccgctatgaagaccgatatgacagacgggatgatcggtcgtggagctccagggatgattactctcgggatgattataggcgtgatggtagaggtcccccccaaagacccaaactgaatctaaagcctcggagtactcctaaggaagatgattcctctgctagtacctcccagtccactcgagctgcttctatctttggaggggcaaagcctgttgacacagctgctagagaaagagaagtagaagaacggctacagaaggaacaagaaaagttgcagcgtcagctggatgaggcaaaactagaacgacggcctcgggagagacacccaagctggcg

SEQ ID NO: 1380 - DNA, 585 bp, Homo sapiens
tattattttgagggaaaagaaaatttcaagcttttcaccattattctttttaaactatcagaaatatttatcacacatactatctattttcttgggctcttgttacaatgtagtttacctttacttttcaaatggtccttagatcaaattatttgattttgtactccacaaagacacatattattccttgcttttatagaattttgagactttggcccacacaaatttcttagaagacaataaaccaggtaaaaacactaacttgcaattttaggtgtcttttttatttctcttacatttgcatccgtagcaaccatttaaccttgtagaccttatgaggccctcaataatactgtatttctaaaattagacaacataccccccaaactcatgtttctgtttccctactttctctcttactttaaaattgtagtattcccaagagttcagtggtggcaaatgttaataaaataagttagtacattttggaggttcttatatcctttgtagggtaagctgatagtgtttagatttctgttcccattattccagtagtgtattaaattatttaagataaataattac

SEQ ID NO: 1381 - DNA, 596 bp, Homo sapiens
atgtgaaaatgaaatcattttaagacagtggaatttttggtggtttttctctccaaaattttctttaatactattgcttactcatcttttcagaaatgattttaaatatgtataaactttccatgcccttccctgcactatgtacagaaatagaatctttaatgtggatcacaaataacacaataatcagaaattagagatggtgttgaatctcagcattggtaatgagaataggctttatggatagatattccactttatcctgagatacacagctacagtatactttctgggaggagtatgcctataagcatccttggctggaacctgaattgggtttacaagcttacatttagataaaagcctttttatttgagatgaaacccatacaggcagggtagaaaggagtggcctgggtgagaatgtctaatgtttgggttttctcaaagcgtcattcctcctttcctcttattctggctagcttttccacagtgtcatgtaaagaggcagcattttctagaagatgcaagtcatttgaagtagtcatttggttttctcctcatttcactttcagcctgcctttaaaaatgtagctg

SEQ ID NO: 1382 - DNA, 592 bp, Homo sapiens
tacggccgggatcttcggcaagaactcacgtctccaacaaccaagctccccaacaatggactcttgtggctgacttcactcaccatgctcacactgcctccttgtcagcagtagctgtaaatagtcgttttgtggtcactgggagcgaagatgaaacaattcacatttatgacatgaaaaagaagattgagcatggggctctagtgcatcacagtggtacaataacttgcctgaaattctatggcaacaggcatttaatcagtggagcggaagatggactcatctgtatctgggatgcaaagaaatgggaatgcctgaagtcaattaaagctcacaaaggacaggtgaccttcctttctattcacccatctggcaagttggccctgtcggttggtacagataaaactttaagaacgtggaatcttgtagaaggaagatcagcattcataaaaaatataaaacaaaatgctcacatagtagaatggtccccaagaggagagcagtatgtagttatcatacagaataaaatagacatctatcagcttgacactgcatccattagtggcaccatcacaaatgaaaagagaatttc

SEQ ID NO: 1383 - DNA, 568 bp, Homo sapiens
cattcgggccgagatgtctcgctccgtggccttgctgtgctcgcgctactctttctttctggcctggaggctatccagcgtactccaaagattcaggtttactcacgtcatccagcagagaatggaaagtcaaatttcctgaattgctatgtgtctgggtttcatccatccgacattgaagttgacttactgaagaatggagagagaattgaaaaagtggagcattcagacttgtctttcagcaaggactggtctttctatctcttgtactacactgaattcacccccactgaaaaagatgagtatgcctgccgtgtgaaccatgtgactttgtcacagcccaagatagttaagtgggatcgagacatgtaagcagcatcatggaggtttgaagatgccgcatttggattggatgaattccaaattctgcttgcttgctttttaatattgatatgcttatacacttacactttatgcacaaaatgtagggttataataatgctaacatggacatgatcttctttataattctactttgagtgctgtctccatgtttgatgtatctgag

SEQ ID NO: 1384 - DNA, 638 bp, Homo sapiens
gtgacaggcctcgccggaggagctgggccctgaatcaccctgctccccggccggctgtcggcgctgggggagggggtcccgggggtcgactcaccgatctgcccgatgaactcgatcttgatgccctggtgctccagccgcttgttggggttcttgagggcaaggctcaccttcccggagaccgtctccccgtcgtagaagaagaaatatttctccttcttcccgtcctccgtcttgtgctcggcccgcttcctactctctgcatcgttcagaaagatttccacctccacgctctgcccgaagccgaagaagctcatcgcaccgccgggccgggcgggtctcggaacgactcggcgcgcgcgcgggagcgagctttgaaagttgagcacggcggcggcgagccggtgccctgggatcatggtggcgttgcggggccttggtagcggcctgcagccctggtgtccgctggatcttatactcgaatgggttgacacagtgtgggaactggatttcacagagactgagcctttggatcccagcatcgaagcagagatcatagagactggattggctgcatttacaaaactctatgaaagccttttaccctttgctactggagaacatggatctatggagag

SEQ ID NO: 1385 - DNA, 474 bp, Homo sapiens
cgcctcctccgcgggcatgaccagtccgcctacgacggcaaggattacatcgccctgaacgaggacctgagctcctggaccgcggcggacacggcggctcagatcacccagcgcaagtgggaggcggcccgtgaggcggagcagtggagagcctacctggagggcctgtgcgtggagtggctccgcagatacctggagaacgggaaggagacgctgcagcgcgcggaccccccaaagacacatgtgacccaccaccccatctctgaccatgaggccaccctgaggtgctgggccctgggcttctaccctgcggagatcacactgacctggcagcgggatggcgaggaccaaactcaggacaccgagcttgtggagaccagaccagcaggagatagaaccttccagaagtgggcagctgtggtggtgccttctggagaagagcagagatacacatgccatgtacagcatgagggg

SEQ ID NO: 1386 - DNA, 383 bp, Homo sapiens
atgggtacagttaggaaagtttttttcttacaccgtgactgagggaaacattgcttgtctttgagaaattgactgacatacctggaagagaacaccattttatctcaggttagtgaaggatcagtgcaggtccctgactcttattttcccagaggccatggagctgagattgagactagccttgtggtttcacactaaagagtttccttgtgatgggcaacatgcatgacctaatgtcttgcaaaatccaatagaagtattacagcttccttctctggctcaagggctgagttaagtgaaaggaaaaacagcacaatggtgaccactgataaaggctttattaggtatatctgaggaagtgggtcacatgaaatgtaaaaagg

SEQ ID NO: 1387 - DNA, 433 bp, Homo sapiens
gatataaatgggttaatggtctatttttcagtttttaccacaaatcatgtgtctcactttttgtcttcgctttttaaagaactggttcatgaaattagtgttagttcataaattgtttaagaagttccttttccattgaattagattgctgtaaaagggagaaaaagggaagcttcccataagaatagtttgaaaacaaattgacttgttcatttccatattatctgcttgatgatatggagccagtgtcaatttttctgttagtgaatgttttggactagatgttcccctccccaaaatttatatgatgaagcccttattaatgtgatggtatctggagatggggctcctcccaccatcccatcctggaacatataagccagaaagaaagtagtctccccaaacagaccatgctgacaccttgagtttgaac

SEQ ID NO: 1388 - DNA, 527 bp, Homo sapiens
gggaggtgacagtgtggcccgccatgttcttctccgcggcgctccgggcccgggcggctggcctcaccgcccactggggaagacatgtaaggaatttgcataagacagttatgcaaaatggagctggaggagctttatttgtgcacagagatactcctgagaataaccctgatactccatttgatttcacaccagaaaactataagaggatagaggcaattgtaaaaaactatccaggaggccataaagcagcagctgttcttccagtcctggatttagcccaaaggcagaaatgggtggttgcccatctctgctatgaacaaggttgcagaagttttacaagtacctccaatgagagtatatgaagtagcaactttttatacaatgtataatcgaaagccagttggaaagtatcacattcaggtctgcactactacaccctgcatgcttcgaaactctgacagcatactggaggccattcagaaaaagcttggaataaaggttggggagactacacctgacaaact

SEQ ID NO: 1389 - DNA, 451 bp, Homo sapiens
gaagtcgacgaggctctagttttccggcccgagtggacccagcgttatttggtggtggagcctccggagggcgatggggccctgtgcctggtctgtcgccgcctcatcgtagctacccgcgaacgcgacgtcaggcgccactacgaggctgagcacgaatactaccagcggtatatggcggacggcgagcgcgcggccctggtggagcgtctgcgtcagggcgacttgcccgtggcctccttcactcctgaagagagagctgctcgtgcaggcctcgggctctgccgcctcttggccttgaagggtcgcggctggggtgagggggactttgtataccagtgcatggaggtgttgctgagagaggtactgcccgagcatgtaagcgtcctgcaaggcgttgacttatctccagatatcacaaggcagaggatcctgagcattgacaggaatc

SEQ ID NO: 1390 - DNA, 537 bp, Homo sapiens
aaaaggatataaaatttgaaaagagaaacctaattggctatttaatccaaaacaactttttttttccttcaatggaatcaggaagcttgtcaatcactcatgtgttttagagtaattacttttaaaatggtgcatttgtgcttctgaactattttgaagagtcacttctgtttacctcaagtatcaattcatcctccatacatttgaattcaagttgttttttgtcaaatttacagttgtcaattgatcttcaagctgcagggtgcctaaaaatgggccgttgtctgtagccctggcatgtgcacacggacatttgccaccactgcaagcaaaagtctggagaagttcaccaacgacaagaacgattagggaaaatatgctgctgtgggttaacaactcagaaagtccctgatccacatttggctgtttactaaagcttgtgattaactttttggcagtgtgtactatgctctattgctatatatgctatctataaatgtagatgttaaggataagtaattctaaatttattattct

SEQ ID NO: 1391 - DNA, 528 bp, Homo sapiens
aatcagaatgaatatggtgactgggacgcctgtacattgctttgacttaaaaattgaagtccattattctgaccgaaagttaatctgatgattaattggttaaacatactatcgttgctaattagcataattattatttacaataaagtgagctaaatagctacaactaaaatatatttaaattactgtgatattgtgatgctaaagatgtgttgaaattaatatcttgaatttctcaaccctgcctaaatgcctctgagagtaattagtataattaaaagtcactagagaaagtgaatgactctaataacaggataacaaattcttttcaagtcagatggtttccagttctttgctttcaacaaaattaatggtggcccatgaattgtcagctgatgaaggaacactatttggtttttggcatgcaactcggaaagaaaccaaacgattgattgacatgcttacaacaaaactactagcattctcacctatttatgtaaaaccatttctcagcacttgtatctgtga

SEQ ID NO: 1392 - DNA, 151 bp, Homo sapiens
caggttttatgggttcttcgaacctttagggagaaggacccattggggcctttttattataagggaaaaaaaggaagtttattttatcagggggactaaggccccccggttgggggcccctggcccaaaattaaaaataaatttggagggt

SEQ ID NO: 1393 - DNA, 658 bp, Homo sapiens
cgccccatgtgtatgttgctatatatccatacactcctcggaaagaggatgaactagagctgagaaaagggagatgtttttagtgtttgagcgctgccaggatggctggttcaaagggacatccatgcataccagcaagataggggttttccctggcaattatgtggcaccagtcacaagggcggtgacaaatgcttcccaagctaaagtccctatgtctacagctggccagacaagtcggggagtgaccatggtcagtccttccacggcaggagggcctgcccagaagctccagggaaatggcgtggctgggagtcccagtgttgtccccgcagctgtggtatcagcagctcacatccagacaagtcctcaggctaaggtcttgttgcacatgacggggcaaatgacagtcaaccaggcccgcaatgctgtgaggacagttgcagcgcacaaccaggagcgccccacggcagcagtgacacccatccaggtacagaatgccgccggcctcagccctgcatctgtgggcctgtcccatcactcgctggcctccccacaacctgcgcctctgatgccaggctcagccacgcacactgctgccatcagtatcagtcgagccagtgcccctctggcctgtgcagcagctgctccactgact

SEQ ID NO: 1394 - DNA, 561 bp, Homo sapiens
ctgaggcaggaaactcacttgaacccgggaggtggaggttgcagtgagcccagaatgtgtcattgcattccagcctgggtaaccaagcgcgactctgtctcaaaaaaagaaaaaaaagcaatatactgtgtaatcgttgacagcataattcactattatgtagatcggagagcagaggattctgaatgcatgaacatatcattaacatttcaatacattactcataattactgatgaactaaagagaaaccaagaaattatggtgatagttatatcgacctggagaaatgtagacacaaaagaaccgtaagatgagaaatgtgttaacacagtctataagggcatgcaagaataaaaataggggagaaaacaggagagtttttcaagagctttctggtcatgtaagtcaacttgtatcggttaatttttaaaaggtttatttacatgcaataaactgcacatacttcaattgtacattttggtaattcttggcatttgtagctctataaaaccagcaacatattaaaatagcaaacatatccattacctttaccaccaaag

SEQ ID NO: 1395 - DNA, 561 bp, Homo sapiens
gtcaggatggtgtcacatttttatggaaatggagatatttgtgatataactgacaaaccaagacaggtgactgtaaaactaaagtgcaaagaatcagattcacctcatgctgttactgtatatatgctagagcctcgctcctgtcaatatattcttggggttgaatctccagtgatctgtaaaatcttagatacagcagatgaaaatggacttctttctctccccaactaaaggatattaaagttaggggaaagaaaagatcattgaaagtcatgataatttctgtcccactgtgtctcactatagagttctcagccattggacctcttctaaaggatggtataaaatgactctcaaccactttgtgaatacatatgtgtatataagaggttattgataaacttctgaggcagacatttgtctcgctttttttcatttttgttgtgtcttataaactgactgtttttctttgcttggatactgtgattccaaaataaatctcatccaagcaagttagagtccagcctaatcaaatgtcataattgttgtacctattgaaag

SEQ ID NO: 1396 - DNA, 556 bp, Homo sapiens
attagcagctacttaaattggtatcagcagaaaccaggaaagcccctaaactcctgatctatgctgcatctagtttgcaaagtggggccccatcaaggttcagtggcagtggatctgggacagatttcactctcaccatcagtggtctgcaacctgaagattttgcaacttacttctgtcaacagagtcacacttccatgtgcagttttggccaggggaccaagctggagatgaagcgaactgtggctgcaccatctgtcttcatcttcccgccatctgatgagcagttgaaatctggaactgcctctgttgtgtgcctgctgaataacttctatcccagagaggccagagtacagtggaaggtggataacgccctccaatcgggtaactcccaggagagtgtcacagagcaggacagcaaggacagcacctacagcctcagcagcaccctgacgctgagcaaagcagactacgagaaacacaaagtctacgcctgcgaagtcacccatcagggcctgagctcgcccgtcacaaagagcttcaacaggggagagtg

SEQ ID NO: 1397 - DNA, 530 bp, Homo sapiens
tgtgttaatgttttctagcatgtactctggtttcaacagacacaaatttatatgttaacccagttttcttgccgttctgtaagtgttttattcttagtgtgatttttttccattgggatgtttttgattgaacttgttcattttgttttgcttgggaggaaaataaacaattttacttttttcctttaggagcattatgagcattatgtcagaatagaatagaattggggttcgatcttaacaggccagaaatgcctgggtttttttggtttgtttttgtttttgtttttttatcaaatcctgcctgactgtctgcttgttttgcctaccatcgtgacatctccatggctgtaccaccttgtcgggtagcttatcagactgatgttgactgttgaatctcatggcaacaccagtcgatgggctgtctgacattttggtatctttcatctgaccatccatatccaatgttctcatttaaacattacccagcatcattgtttataatcagaaactctggtccttctgtctgg

SEQ ID NO: 1398 - DNA, 541 bp, Homo sapiens
acccctaccaactccctattgtagtaaacttggaaccttggaaatgaccaggccaagactcaagcctccccagttctactgacctttgtccttaggtgtgaggtccagggttgctaggaaaagaaatcagcagacacaggtgtagaccagagtgtttcttaaatggtgtaattttgtcctctctgtgtcctggggaatactggccatgcctggagacatatcactcaatttctctgaggacacagataggatggggtgtctgtgttatttgtgggatacagagatgaaagaggggtgggatccacactgagagagtggagagtgacatgtgctggacactgtccatgaagcactgagcagaagctggaggcacaacgcaccagacactcacagcaaggatggagctgaaaacataacccactctgtcctggaggcactgggaagcctagagaaggctgtgagccaaggagggagggtcttcctttggcatgggatggggatgaagtaaggagagggactggaccccctggaagctgattca

SEQ ID NO: 1399 - DNA, 637 bp, Homo sapiens
gggtgggcctatatagatgttgaggccgagacgcatccagagctttcgtgaccggggactgttctgaagcaggcctcgtggatgacgtatccgacctgtcagccgctgagatgctgacacttcacaattggctttcattctatgagaagaattatgtgtgtgttgggagggtgacaggacggttctacggagaggatgggctgcccaccccggcactgacccaggtagaagctgcgatcaccagaggcttggaggccaacaaactacagctgcaagagaagcagacattcccgccgtgcaacgcggagtggagctcagccaggggcagccggctctggtgctcccagaagagtggaggtgtgagcagagactggattggcgtccccaggaagctgtataagccaggtgctaaggagccccgctgcgtgtgtgtgagaaccaccggcccccctagtggccagatgccggacaaccctccacacagaaatcgtggggacctggaccacccaaacttggcagagtacacaggctgcccaccgctagccatcacatgctcctttccactctaagccgtagcctcttctgttaataacacacagagagctctgccaagcacctgagtaggcccttgacactt

SEQ ID NO: 1400 - DNA, 367 bp, Homo sapiens
taccaaattgttggcaaacttgatgtaaccttatatggtggttttagtcccttcttatggttggcagaagggcactgaactgttgggtgaaggttagttagcaagtaagattataaggaagacacaaaagacagtggcaaagagggttgattaaatctataagtttttatgtgaggactttgtaagtcagcataaaaatgaaaagttgtttctcagttgtttttgcttttaactttgcccccagcgtttaaagggagtgatctgctttacaggatactatgcaatgcttgttttccaactatgttgaataaatattaatatttatcagcaaatactcctttccaacttccttttttttttttttttt

SEQ ID NO: 1401 - DNA, 605 bp, Homo sapiens
tttttttttttttttttttttttttgcaggtgatctaaaaatactgtttatttacagtacatccctcttaggggcaagtctctgactggttctggacctgccacagttcacttggccatgtcgatcaggctctgcagtgaggtgggcacccacgtcttctcgccctggacaaagaccactccccggtcgatgtagatcacaatgcggccaaaggtgtagagctgcttcccttcgtgtcgcttcccaatgacgggcatgaagacaatgttgtgctcctcagccttggtctcaatgaggtccttaaagttcatgggcacagagctagcggccacgccaatgcccctctgagccatgttctcagcctcccgcctctcctgcatggcctcgtactggaagtccttcctccgctccgtgtgggtgagataggcaatgttctcccgtgctcctggctgcatgtaggcaccaacgttggaggacaccgcccggttcatgatatcaagtgcctcattaaatttgtccttgacagatggatgtgccagcacttggtctgagaacatcgacttccaacccaggtaccacttggtgatctcctcataatttgggct

SEQ ID NO: 1402 - DNA, 593 bp, Homo sapiens
ttttttttttttttttttttttggggatagaaataaaaccactttactgtttagaataaaggacacactataaaaagtgaacattatgcaacattacaagacaatatacattcacggaatataaaattcataaataacatggaggaaaactgtaaacagtgctacgaaatttagcaacaaatacattccttctagacagggttcgagatctcttgttggtttctctccatcacttctgggtttcaggacagcagactggctaaagggaaaggcggatgctgggagaatctaagaagcctctacccccaaagcaaaaactattctccaagttctccccttcctctcgcctccaaagagccaatttggaagttgttgtcacatccacctcccctactttccattttgttttgcttttgccatcagatttttataatgtttgtctctcataaaaatactctagtgacatgttaaccttaggtagccagaagccaaacacttgggtgccatcttggggtagtccagattgtcaattgtcacatgcaagacagaggtctggggcatggaagggtagtgtctcctgggggccacagttt

SEQ ID NO: 1403 - DNA, 458 bp, Homo sapiens
tgcggccgccatgttttttttttttttttttgcgaattcactgtttatttgtgcaaagaaaaaaagatatgctgctactgcaatttagccactgctctgtttggtggccagcctcttatctctctcttcagcaacagtaagtcgaatgccctttcccctgggcagggaaatccaaggtttattgccattgccaatgacaaaaatgttggaaagcctcgtggcaaagctgttgccattggcatccttcacatgcaccacatcaaaagaaccaggatgtctttccctgttggtgatcacaccaacacgaccgaggttggctccaccaatcaccatacacaaattgcctgtatcaaatttgataaagttgattatcttgccagtccctaaatcaatctgcacagtatcgttcaccttgatgacaggatctgggtagcggatggttcgagcatcatgagtca

SEQ ID NO: 1404 - DNA, 514 bp, Homo sapiens
aactctcaaataccccattgagcacggcatcatcaccaactgggatgacatggagaagatctggcaccactccttctacaatgagctgcgtgtagcacctggagagcaccccaccctgctcacagaggctcccctaaatcccaaggccaacagggagaagatgacccagatcatgtttgaaaccttcaatgtccctgccatgtacgtcgccattcaagctgtgctctccctctatgcctctggccgcacgacaggcatcgtcctggattcaggtgatggcgtcacccacaatgtccccatctatgaaggctatgccctgccccatgccatcatgcgcctggacttggctggccgtgacctcgcggactacctcatgaagatcctcacagagagaggctattcctttgtgaccacagctgagagagaaattgtgcgagacatcaaggagaagctgtgctatgtggccctggattttgagaatgagatggccacagcagcttcctcttcccccctg

SEQ ID NO: 1405 - DNA, 594 bp, Homo sapiens
tttttttttttttttttttttttacccttgtgtgtgtttattgattctttttaagattgaaacagactattacaacaatatttgagatttcacagagaactgcgtgcttttgttattaaaagacttttgttgaaaaatttgacctttacctcttatgaacgaaagaaatatagaggtttcaagcatctttgccagcacagagtcattcacaacaaccttctagatgcttattttccaccttttcctacagaaggtaatattcagttaccagaaggccatctccaccactgaatgattcaaagcttcagagctcaaaagtgatcagaactcacaaattagcataattagtccaaagcttgatttaaatgtttgaagaacagcaaacatcaaataatataataccaaatagaatattatagtctctatgaggtaataactcatcagctacaaccacctaaaactgaaattttctgtacttagtttctattagtacaacaccttcattcttaatgcttcttagggcatcacaggttttagaaattaatgtatttttagcattccacagtaatgatcactttcaaaaactgcaatata

SEQ ID NO: 1406 - DNA, 479 bp, Homo sapiens
atttaatttgtaaacattgtgcaaattttaatagcttaaattatatatacggcgctgaaaaaaatttgcatgatcaattgatgaggctggtgtgataggatccttgtgtttgactgctttttcttgctgaggatgtagacttgagaatggcctggaatctctaagaagtaagagtttattgaaaaagtaaaacagtaaaataaaagtggaagcaatctcagagactagtgtaaaaaaatgtgtgtttgtgtataaatttaaaaaataaaagaaaaactttaaaaagagacaactgcaagagcagttacctttaatgatacaaaacaaatttcttacaggtgttaatttatcagcttattaggcaattactgaaacagataattacagtttaagcttaagagatatagttacacaggcaggtcttggttcaagtgcctgtctcattaccctttataagacaatattgctccttgaacctc

SEQ ID NO: 1407 - DNA, 169 bp, Homo sapiens
ttatactatattggttaatgacaaaaaaaagtttgtacatgttcagcaaaggcgcaaccatccatttttttccccaaatatttttgacccacagggggctgaatcacagatgcaaagcctatggacatggagggccaactggaaaagcataagcaggggatacttttta

SEQ ID NO: 1408 - DNA, 514 bp, Homo sapiens
ttttttttttttttttttttttttttacgagcaagtatggtttattacggacaaatggtagaaaaatgttactaatatccatagataagttccttaagtcatgtagagagactgttattaaaagtttgctgcatttttctattgaatcaagaactagctaccagttacagtgccttctaaacacacagttagctttgctttatcaataaccaaataataaactaggtcccaatggttttgtccacatctagattgttcaggtgatcaggaactcttttatttgtgtgctttagcttttagtccttggttatatctccaaatacgaaaaagctgagaggctcctgctgcccccacaaagaaattaacagcaaacagactccaattttttggaataattacaagtgagtatcttgaccaaataaaccctgtagccatcaaaacagcagattgagctgtgctaagtttttctgcaggtctggccatatcagccaatccagcacacaccaacccccat

SEQ ID NO: 1409 - DNA, 562 bp, Homo sapiens
tttttttttttttttttttttttctgctgtctccccaattctctttgtataatttctatgaagagataagctgaggtctgtcctgctgtattcccaggacccagcactgaacctaggaacagagcagagattctcaaaaagtatctcctgaataaaaagtgtttgtggtggtggcacctctagcagtcaggaactccctctttgcctctgagttttgatcctcaggcagtatttatgctggttaatgagtaattcttctctgggtttatggttcagagtagaataggagacctcaggcagcctggcaacctctggcctcgtgggaaatgccttccagtggaattgcggcaaatttcaactctaacccagggatatcgatctaggcctcattcccacacccagctctgctgccagaagcgttccaaggcttctcaggccccaagatcccactgctctcttcttcccctaatgctccaagaccctctcccagccaggccccaaaggctgtgcccccgactccaggttgctttcaagctgaagccacaccagaggaaagagctga

SEQ ID NO: 1410 - DNA, 563 bp, Homo sapiens
taggcttttatttttctctatgttctgcagtaactaaggaaaatcatggtaaatgtcaatcttcacacaacagcagacacaaagggtttcagaaacgtcagatatgaagaaatcccccatccttcttcaacattttactgggtatttcaacttcaaaagaacagcttatttctataagtgctgtacaagatcatagattatgatggaacgacttcattttagaacgttagcaaaactgttatactaaatgtcaatgacaggaaacaaagaaaaaaatttgttcaattatatttttaaacatattgttattctcaacaaacggaattttaaaacgaatacaattttccattatcaaaagcaaacactctatttcgcagttgaacaatgatcactgatcacaaatatcaaatacagtgtcccccgcccccaatcgacatcattttcaacttaggaccctggcatctactccttggggtacctgtgaccctcttttacacccccaagggtctgcctcagatctacttaaggggcggaataacccctagcacctgaattgaggatag

SEQ ID NO: 1411 - DNA, 627 bp, Homo sapiens
ttgaggggaagactgttaaccccatccacgccaccagaattagctctttcccttttggtttgcaagcactgcctgtaaagtcctcgcatgagaggccagcctgctagggaaatccaggaatctgcaacaaaaacgatgacagtctgaaatactctctggtgccaacctccaaattctcgtctgtcacttcagacccccactagttgacagagcagcagaatttcaactccagtagacttgaatgtgcctctgggcaaagaagcagagctaacgaggaaagggatttaaagagtttttcttgggcgtttgtcaaacctttattccctgtctgtgtgcagaggggattcaacttcaatttttctgcagtggctctgagtccagccccttacttaaagatctggaaagcatgaagactgggctttttttcctatgtctcttgggaactgcagctgcaatcccgacaagtgcaagattattatctgatcattccaaaccaactgctgaaacggtagcacccgacagcactgcaatccccagtttaagggctgaagatgaagaaaatgaaaaagaaacagcagtatccacagaagacgattcccaccataaggctgaaaaatcatcagtact

SEQ ID NO: 1412 - DNA, 616 bp, Homo sapiens
gtgtggcccgccatgttcttctccgcggcgctccgggcccgggcggctggcctcaccgcccactggggaagacatgtaaggaatttgcataagaccgctatgcaaaatggagctggaggagctttatttgtgcacagagatactcctgagaataaccctgatactccatttgatttcacaccagaaaactataagaggatagaggcaattgtaaaaaactatccagaaggccataaagcagcagctgttcttccagtcctggatttagcccaaaggcagaatgggtggttgcccatctctgctatgaacaaggttgcagaagttttacaagtacctccaatgagagtatatgaagtagcaactttttatacaatgtataatcgaaagccagttggaaagtatcacattcaggtctgcactactacgccctgcatgcttcgaaactctgacagcatactggaggccattcagaaaaagcttggaataaaggttggggagactacacctgacaaacttttcactcttatagaagtgaatgtttaggggcctgtgtgaacgcaccaatggttcaaataaatgacaattactatgaggatttgacagctaaggatattgg

SEQ ID NO: 1413 - DNA, 252 bp, Homo sapiens
gacacgagggcccagtaatcagggctgtagtctttattatgcactagtgcatgtggctttgggcaaataactctgcttgtctggactccagttccttcactcccccaagtcacaaggttagccagaatgacctccagtcattctgattctgtgtctcatgatcagagtcacaggaatatttttattgagttgacaaaacgagaggatgaagggctgcaaggttctgtatgcacatgtgggtgcgtgtgcacc

SEQ ID NO: 1414 - DNA, 396 bp, Homo sapiens
ggcggcggaacagcttgggacccgaaacgcctcggcttttctgcggacccgcgcccggccgctgccgccggacgcttgagaagaggcagagtcttgctttgttgtccaggctggtcttgaacttctgagctcaagtgatcctcccgccttggcctcccaaagtgctgagactacagagagagaatgctaacgagctgtgaaatgaccaaagatctggcagcagaagggaaaagaaaaaataatggaatattttctgtctacaattggttgaatctgtggatgtggaaactgcagatacagatggagagccgactatactagctttttgtttcatttttcacttctggtgtgtgtgtgtgtgtgtgtgtgtgtgtgtgtgtgtatctgtgtgggtgt

SEQ ID NO: 1415 - DNA, 617 bp, Homo sapiens
catggggcgcgcgcgcgacgccatcctggatgcgctggagaacctgaccgccgaggagctcaagaagttcaagctgaagctgctgtcggtgccgctgcgtgagggctacgggcgcatcccgcggggcgcgctgctgtccatggacgccttggacctcaccgacaagctggtcagcttctacctggagacctacggcgccgagctcaccgctaacgtgctgcgcgacatgggcctgcaggagatggccgggcagctgcaggcggccacgcaccaggactctggagccgcgccagctgggatccaggcccctcctcagtcggcagccaagccaggcctgcactttatagaccagcaccgggctgcgcttatcgcgagggtcacaaacgttgagtggctgctggatgctctgtacgggaaggtcctgacggatgagcagtaccaggcagtgcgggccgagcccaccaacccaagcaagatgcggaagctcttcagtttcacaccagcctggaactggacctgcaaggacttgctcctccaggccctaagggagtcccagtcctacctggtggaggacctggagcggagctgaggctccttcccagcaacactccggtcag

SEQ ID NO: 1416 - DNA, 480 bp, Homo sapiens
atttgaacttagctgtaattctaaactgacctttccccgtactaacgtttggtttccccgtgtggcatgttttctgagcgttcctactttaaagcatggaacatgcaggtgatttgggaagtgtagaaagacctgagaaaacgagcctgtttcagaggaacatcgtcacaacgaatacttctggaagcttaacaaaactaaccctgctgtcctttttattgtttttaattaatatttttgttttaattgatagcaaaatagtttatgggtttggaaacttgcatgaaaatattttagccccctcagatgttcctgcagtgctgaaattcatcctacagaagtaaccgcaaaactctagagggggagttgagcaggcgccagggctgtcatcaacatggatatgacatttcacaacagtgactagttgaatcccttgtagcgtagtagttgtctgctctttgtccatgtgttaatgaggac

SEQ ID NO: 1417 - DNA, 605 bp, Homo sapiens
tacggccgggatcgctatgatgaccgaggcagcagagactatgatagaggctatgattcccggataggcagtggcagaagagcatttggcagtgggtatcgcagggatgatgactacagaggaggcggggaccgctatgaagaccgatatgacagacggaatgatcggtcgtggagctccagagatgattactcttgggatgattataggcgtgatgatagaggtcccccccaaagacccaaactgaatctaaagcctcggagtactcctaaggaagatgattcctctgctagtacctcccagtccactcgagctgcttctatctttggaggggcaaagcctgttgacacagctgctagagaaagagaagtagaagaacggctacagaaggaacaagagaagttgcagcgtcagctggatgagccaaaactagaacgacggcctcgggagagacacccaagctggcgaagtgaagaaactcaggaacgggaacggtcgaggacaggaagtgagtcatcacaaactgggacctccaccacatctagcagaaatgcacgaaggagagagagtgagaagtctctagaaaatgaaacactcaataagga

SEQ ID NO: 1418 - DNA, 488 bp, Homo sapiens
cgggcactacatcgacagtacatctcactacaggtgggtcctccgatggattatttcaactgccacaatccattaaggggaggaggaggatggaagaaaccaagtgcttcatttttaactgaagcaaggtagggagttttattttactataaacagcacaaccgttaaatgtcttcattaagcaaactcacttttgagcccattttctgaccaacagtcctcaaagttcaaaatggaaataccctcccaacaaagcctgtttttttaaagacattgcaccactgaaatctcagcagctcaaccttcctgggtaatccagatactctggttactaagctggttacactggactctttctacaatctctgggagctcttcgaggtggttgtcacctgtcctctgtttcatttccagttcttcttttccctgacctgccttcagattctcctttaacttctacccttgacctgccttctgttttcaaatag

SEQ ID NO: 1419 - DNA, 558 bp, Homo sapiens
aaacggaagtggaagtgtcgttaatgcctccctgcttccataatgattgcggcgagtttgtgaatcagccctacttgttgtactccgttcacatgaaaagcaccaagccatccctgtcccccagcaaaccccagtcctcgctggtgattcccacatcgctattctgcaagacatttccattccatttcatgtttgacaaagatgtgacaattctgcaatttggcaatggcatcagaaggctgatgaacaggagagactttcaaggaaagcctaattttgaagaatactttgaaattctgactccaaaaatcaaccagacgtttagcgggatcatgactatgttgaatatgcagtttgttgtacgagtgaggagatgggacaactctgtgaagaaatcttcaagggttatggacctcaaaggccaaatgatctacattgttgaatccagtgcaatcttgtttttggggtcaccctgtgtggacagattagaagattttacaggacgagggctctacctctcagacatcccaattcacaatgcactgagggatgtggtct

SEQ ID NO: 1420 - DNA, 589 bp, Homo sapiens
agtaataggagctcccagctctaataaaacagctgtctctaacttattttatttccatcatgtcagagcaggtgaagagccagaagtgaagagtgactagtacaaattataaaaagccactagactcttcactgttagctttttaaaacattaggctcccatccctatggaggaacaactctccagtgcctggatcccctctgtctacaaatataagattttctgggcctaaaggatagatcaaagtcaaaaatagcaatgcctccctatccctcacacatccagacatcatgaattttacatagtactcttgttgagttctgtagagccttctgatgtctctaaagcactaccgattctttggagttgtcacatcagataagacatatctctaattccatccataaatccagttctactatggctgagttctggtcaaagaaagaaagtttagaagctgagacacaaggggttgggagctgatgaaactcacaaatgatggtaggaagaagctctcgacaatacccgttggcaaggagtctgcctccatgctgcagtgttcgagtggattgtaggtgcaagatggaaa

SEQ ID NO: 1421 - DNA, 605 bp, Homo sapiens
ggcaaaaaatcaaggtatttggtcccggaacaaagcttatcattacagataaacaacttgatgcagatgtttcccccaagcccactatttttcttccttcaattgctgaaacaaagctccagaaggctggaacatacctttgtcttcttgagaaatttttccctgatgttattaagatacattggcaagaaaagaagagcaacacgattctgggatcccaggaggggaacaccatgaagactaacgacacatacatgaaatttagctggttaacggtgccagaaaagtcactggacaaagaacacagatgtatcgtcagacatgagaataataaaaacggagttgatcaagaaattatctttcctccaataaagacagatgtcatcacaatggatcccaaagacaattgttcaaaagatgcaaatgatacacaactgctgcagctcacaaacacctctgcatattacatgtacctcctcctgctcctcaagagtgtggtctattttgccatcatcacctgctgtctgcttagaagaacggctttctgctgcaatggagagaaatcataacagacggtggcacaaggaggccatcttttcctcatc

SEQ ID NO: 1422 - DNA, 613 bp, Homo sapiens
cctggaccatcccatgggcctccgcccgcgccgccccgaggatgagtggtgatgtcctctagccacccctagcagcgtcggctctccctggacgtgcggccgcggactgggacttggctttctccggataagcggcggcaccggcgtcagcgatgaccgtgcagagactcgtggccgcggccgtgctggtggccctggtctcactcatcctcaacaacgtggcggccttcacctccaactgggtgtgccagacgctggaggatgggcgcaggcgcagcgtggggccgtggaggtcctgctggctggtggacaggacccggggagggccgagccctggggccagagccggccaggtggacgcacatgactgtgaggcgctgggctggggctccgaggcagccggcttccaggagtcccgaggcaccgtcaaactgcagttcgacatgatgcgcgcctgcaacctggtagccacggccgcgctcaccgcaggccagctcaccttcctcctggggctggtgggcctgcccctgctgtcacccgacgccccgtgctgggaggaggccatggccgctgcattccaactggcgagttttgtcctggtcatcgggctcgt

SEQ ID NO: 1423 - DNA, 341 bp, Homo sapiens
cgcaaaacaaattgcaatataatgtgataagttctttaaaagaggtaagagcaacgtgctttgggagcagagaagagggagaaagcagcatcttgcctggatgagccaggggacacagaagagaagcccactatctcatttaatctttacaactctcttgcaagggtccctggttgtgaaaatacatgagataaatcatgaaggccactatcatcctccttctgcttgcacaagtttcctgggctggaccgtttcaacagagaggcttatttgactttatgctagaagatgaggcttctgggataggcccacaagttcctgatgaccgcgacttctagccc

SEQ ID NO: 1424 - DNA, 621 bp, Homo sapiens
  misc_feature 522: n = A,T,C or G
ttctagacactaaccaaggccaaccttgcaagcaggcctttctaagtatagcagcctcaggccttctgtggtaacctttttattgcacagtggataataatgtgaagctcagttttggtcttgttaagtgtaaagattcccaggacttgcagttggagtaggatagttggcagttgtcagcatgaacctggaacatgtaatatcagaaaattttgtagttagaagtgggaataggtaagaaggcctagggagggcatgtaaatccagaaagattcagcacacagatggaggcattagaagtgaagagactgttttttcttctaagatgatatggaagtaataaggtattttaaatatatatgtgtatatgtatataaagttataataagtttgaaggtagatggtaaggaagttggtggtgttggcatcctggttttgttgttgttgtttttaaacatgggagacagtgtcatcggatgaggggtagaagaagacaagaatgtcgtagagcatttaacttgnggaatggggcaaaggagatgacagagcttaatcaagtgaaagaattgcttgcagagtgaaggacctgaccttgtttctaacctctaatgctcttatctt

SEQ ID NO: 1425 - DNA, 558 bp, Homo sapiens
gctacttcccctatcatagaagagcttatcacctttcatgatcacgccctcataatcattttccttatctgcttcctagtcctgtatgcccttttcctaacactcacaacaaaactaactaatactaacatctcagacgctcaggaaatagaaaccgtctgaactatcctgcccgccatcatcctagtcctcatcgccctcccatccctacgcatcctttacataacagacgaggtcaacgatccctcccttaccatcaaatcaattggccaccaatggtactgaacctacgagtacaccgactacggcggactaatcttcaactcctacatacttcccccattattcctagaaccaggcgacctgcgactccttgacgttgacaatcgagtagtactcccgattgaagcccccattcgtataataattacatcacaagacgtcttgcactcatgagctgtccccacattaggcttaaaaacagatgcaattcccggacgtctaaaccaaaccactttcaccgctacacgaccggggtatactacggtcaatgctctg

SEQ ID NO: 1426 - DNA, 605 bp, Homo sapiens
ttatcattacagataaacaacttgatgcagatgtttcccccaagcccactatttttcttccttcaattgctgaaacaaagctccagaaggctggaacatacctttgtcttcttgagaaatttttccctgatgttattaagatacattggcaagaaaagaagagcaacacgattctgggatcccaggaggggaacaccatgaagactaacgacacatacatgaaatttagctggttaacggtgccagaaaagtcactggacaaagaacacagatgtatcgtcagacatgagaataataaaaacggagttgatcaagaaattatctttcctccaataaagacagatgtcatcacaatggatcccaaagacaattgttcaaaagatgcaaatgatacactactgctgcagctcacaaacacctctgcatattacatgtacctcctcctgctcctcaagagtgtgatctattttgccatcatcacctgctgtctgcttagaagaacggctttctgctgcaatggagagaaatataacagacggtggcacaaggaggccatcttttcctcatcggttattgtccctagaagcgtcttctgaggatctagt

SEQ ID NO: 1427 - DNA, 578 bp, Homo sapiens
tctggttagaccccaatgagaccaatgaaatcgccaatgccaactcccgtcagcagatccggaagctcatcaaaggtgggctgatcatccgcaagcctgtgacggtccattcccgggctcgatgccggaaaaacaccttggcccgccggaagggcaggcacatgggcataggtaagcggaagggtacagccaatgcccgaatgccagagaaggtcacatggatgaggagaatgaggattttgcgccggctgctcagaagataccgtgaatctaagaagatcgatcgccacatgtatcacagcctgtacctggaggtgaaggggaatgtgttcaaaaacaagcggattctcatggaacacatccacaagctgaaggcagacaaggcccgcaagaagctcctggctgaccaggctgaggcccgcaggtctaagaccaaggaagcacgcaagcgccgtgaagagcgcctccaggccaagaaggaggagatcatcaagactttatccaaggaggaagagaccaagaaataaaacctcccactttgtctgtacatactggcctctgtgattacatagatcagc

SEQ ID NO: 1428 - DNA, 566 bp, Homo sapiens
gccgcctgcatctgtatccagcgccaggtcccgccagtcccagctgcgcgcgccccccagtcccgcacccgttcggcccaggctaagttagccctcaccatgccggtcaaaggaggcaccaagtgcatcaaatacctgctgttcggatttaacttcatcttccggcttgccgggattgctgtccttgccattggactatggctccgattcgactctcagaccaggagcatcttcgagcaagaaactaataataataattccagcttctacacaggagtctatattctgatcggagccggcgccctcatgatgctggtgggcttcctgggctgctgcggggctgtgcaggagtcccagtgcatgctgggactgttcttcggcttcctcttggtgatattcgccattgaaatagctgcggccatctggggatattcccacaaggatgaggtgattaaggaagtccaggagttttacaaggacacctacaacaagctgaaaaccaaggatgagccccagcgggaaacgctgaaagccatccactatgcgttgaactgctgtggtttggc

SEQ ID NO: 1429 - DNA, 369 bp, Homo sapiens
atgcacaaaatgaagggactagttaaggattaactagccctttaaggattaactagttaaggattaatagcaaaagatattaaatatgctaacatagctatggaggaattgagggcaagcacccaggactgatgaggtcttaacaaaaaccagtgtggcaaaaaaaagaaaaaaaaaaaaaaaaaaaaaaaattcttaaaaccaaccacccaaaaaaacaattttttttttcaaaaaattttttttggggccggatttgggaaatttgggcaaattaaaaaatttttgggggggtttttttaatttgttttaaaaaaaaaaaaaggttgggcccaaattttggtttttttttggaaaattttttaaaaa

SEQ ID NO: 1430 - DNA, 545 bp, Homo sapiens
agccggagaccagcctacagccgcctgcatctgtatccagcgccaggtcccgccagtcccagctgcgcgcgccccccagtcccgcacccgttcggcccaggctaagttagccctcaccatgccggtcaaaggaggcaccaagtgcatcaaatacctgctgttcggatttaacttcatcttctggcttgccgggattgctgtccttgccattggactatggctccgattcgactctcagaccaagagcatcttcgagcaagaaactaataataataattccagcttctgcacaggagtctatattctgatcggagccggcgccctcatgatgctggtgggcttcctgggctgctgcggggctgtgcaggagtcccagtgcatgctgggactgttcttcggcttcctcttggtgatattcgccattgaaatagctgcggccatctggggatattcccacaaggatgaggtgattaaggaagtccaggagttttacaaggacacctacaacaagctgaaaaccaaggatgagccccagcgggaaacgc

SEQ ID NO: 1431 - DNA, 561 bp, Homo sapiens
tgtctgcctttccaggacattcttcttggtattccttacctgaagcctggttcccacagctcttccgtgtcatcttcatccccttcctttaatcaaaggctgaaatctctgcctgacctggcagcctggctccctctgggtcatatggtgcagactgtgaccagcaccaggcaggcagtcctgtctgcgtgtggaggagcagccgtgactgcccgtggctctgctgccgcccactccctgccttgtgagtggcctgctgcctcacctcccgcaggccgccacacttattgcaggtcagtgatcctttggagtttgaatttcacaaagctttttttatcttcagttcctaaaatataatctgataattaatggtttgtggaatccattatgaagtgcaattagatagatgtaggttcctgccgtttggagagaatgactagcatttatcttcttttccttccatgccaaaggttggagtctgctggtgcggtgtttacacaccaggcagggctgtctgccaccctgtgtggcttgaccccctgtggaggggagtgcctggtt

SEQ ID NO: 1432 - DNA, 581 bp, Homo sapiens
  misc_feature 457, 527: n = A,T,C or G
ggccgggggtggaaaaaggtaacctcaagttaaaagcccaagaggggaagccccattgcagccgcaaccctgtccttgtcagaggaattggcaggtattcccgatctgccatgtattccagaaaggccatgtacaagaggaagtactcagccgctaaatccaaggttgaaaagaaaaagaaggagaaggttctcgcaactgttacaaaaccagttggtggtgacaagaacggcggtacccgggtggttaaacttcgcaaaatgcctagatattatcctactgaagatgtgcctcgaaagctgttgagccacggcaaaaaacccttcagtcagcacgtgagaaaactgcgagccagcattacccccgggaccattctgatcatcctcactggacgccacaggggcaagagggtggttttcctgaagcagctggctagtggcttattacttgtgactgnacctctggtcctcaatcgagttcctctacgaagaacacaccagaaatttgtcattgccacttcaaccaanatcgatatcagcaatgtaaaaatcccaaaacatcttactgatgcttacttcaag

SEQ ID NO: 1433 - DNA, 634 bp, Homo sapiens
aacgggcacagatcatctgggaatgtgcaggggaccaccgtgtggctgaggccctcaagaggctgcgcaggaagaggcccccaaggcagaaacccctgggccactcgctacaccactgcagccgcctcagaatcctggagccccactctgcactggccaacccacagagtgccacagagacagcctccagtgagcagtatctgcactctaggaagaaaagtgccaggatccgccggaactggaggaagtcaggccccacaagctacctccaccagatcagacactgatccagggaaagagccaggaatggcagtgtcttccctcttgccaaaaggcctggggaggtgaaggaagagagactttaggcaagcagcccaaaggggtaaatgaaaacaagaggctgctgccactgacctgctccattcagaacaagactggatgcttctgttgagctctccattatgtgggacccattcctcaccaaaatgaggagagacagtgactgttcctgccacagtccttcccagtctaacactattcctgggctgcatgatattcccctgggagcaaagtgacaggcacttagatgcagcatttcaccactcatgctactaatcatctacctgctactact

SEQ ID NO: 1434 - DNA, 335 bp, Homo sapiens
tttttttttttttttttttttttttttcttcacgtgacttttatcaccatacaatttgtggcatttcctcattttctacattgtaggatcaagagtgtaaataaatgtatatcgatgtcttcaagaatatatcattcctttttcactagaacccattcaaaatataagtcaagaatcttaatatcaacaaatatatcaagcaaactggaaggcagaataactaccataatttagtataagtacccaaagttttataaatcaaaagccctaatgataaccatttttagaattcaatcatcactgtagaatcagagtctgtaattcttttcttgatt

SEQ ID NO: 1435 - DNA, 474 bp, Homo sapiens
ttttttttttttttttttttttttagtttaacttttccttttttgctgtctagtcatcctcgtcggtcttctgcttcttggtatcgacatcgtcatcctcatcatcttcagctgcccgcttgcccgtagctgactcagcttcctcatcttcatctccatcctcttcctcaccatcaccttcttcttcctcctcctcttcctccccaccttcttcctcttcttcgtctacctcattgtcagcctcctgctccccattttcctcattagcattcccgttagcaggggcgtctcttccattttctgcctcttccacaacttccttcttctcctttaagtccttggtggtgatttcggagctggtgtctacggctgcgtctgacatggtggggcacgccggtgatccgatgcaggggattaaaaagaaagcgagagttcagggactctggcgataaagctgccggagtccgcggcggc

SEQ ID NO: 1436 - DNA, 579 bp, Homo sapiens
gagaccagcctacagccgcctgcatctgtatccagcgccaggtcccgccagtcccagctgcgcgcgccccccagtcccgcacccgttcggcccaggctaagttagccctcaccatgccggtcaaaggaggcaccaagtgcatcaaatacctgctgttcggatttaacttcatcttctggcttgccgggattgctgtccttgccattggactatggctccgattcgactctcagaccaagagcatcttcgagcaagaaactaataataataattccagcttctacacaggagtctatattctgatcggagccggcgccctcatgatgctggtgggcttcctgggctgctgcggggctgtgcaggagtcccagtgcatgctgggactgttcttcggcctcctcttggtgatattcgccattgaaatagctgcggccatctggggatattcccacaaggatgaggtgattaaggaagtccaggagttttacaaggacacctacaacaagctgaaaaccaaggatgagccccagcgggaaacgctgaaagccatccactatgcgttgaactgctgtggtttgg

SEQ ID NO: 1437 - DNA, 638 bp, Homo sapiens
atggtctcgatctcccgaccttgtgatccacccgcctcagcctcccaaagtgttgggattacaggtgtgaaccactgtgcccggcctgtgtacaactttttaaatagggaatatgatagcttcgcatggtggtgtgcacctatagcccccactgcctggaaagctggggtgggagaatcgcttgagtccaggagtttgaggttgcagtgatccacgatcgtaccactacactccagcctgggcaacagagcaagaccctgtctcaaagcataaaatggaataacatatcaaatgaaacagggaaaatgaagctgacaatttatggaagccagggcttgtcacagtctctactgttattatgcattacctgggaatttatataagcccttaataataatgccaatgaacatctcatgtgtgctcacaatgttctggcactattataagtgcttcacaggttttatgtgttcttcgtaactttatggagtaggtaccatttgtgtctctttattataagtgagagaaatgaagtttatattatcaaggggactaaagtcacacggcttgtgggcactgtgccaagatttaaaattaaatttgatggttgaatacagttacttaatgaccatgttatattg

SEQ ID NO: 1438 - DNA, 280 bp, Homo sapiens
ttttttttttttttttttggacaggaaacacatttattgagagcacagtggggtgcgccaagccctgtgctttggaaccgcatcacagcgcccctcacaacagccctgtgaggtaggtgaaggagcccacttcccacatgcagacactgaaggctcaacagctcccctaggcctcagggttcctgcggggtgggcaggggtccagcccacgggtctgaccccaggtcagcggcgtccatcagtcagagggcgggtctctactcaaggggaggccccgggt

SEQ ID NO: 1439 - DNA, 626 bp, Homo sapiens
tttttttttttttttttttctgcatctcaatagaactagctttatttacttatttatttatttaaacaaaagaaatggtttaaaagcaaatgcatatatgtaccaagggatggacatgacctggtacttacaaaggagctgctgtgtcataatggaaacagcatattaggagaaaaatagtatttcgtgtgctgtctgcttgagtaatcaatctggagatgcaagttaaccgaaggtgctctgccaagccatcagcgtgagaaaaaaaaaccaccagaagttgcctccagataacgatgtagtggcagcatgataactggcatcaactcacggtcttctcattttccccattttctataattttcctcttctttcatctatttttttcttgaagatgttatttcggtaaaactgaagctctttgatgctttcactaatgtcatcaagtgccctatgagaagcagccttctttggtgcaaattcatattcttctggataccagcgtctgcacagttctttaacagtgctcacatcaattattctataatgaagatgtttcatgaactggggcatgaatttgtcaagaaacttcttatcttcatgaactgaatttcctgcaagtggac

SEQ ID NO: 1440 - DNA, 616 bp, Homo sapiens
ttttttttttttttttatttttaaccacaaccatgccttactttatcaaatgtataagaagtaaatatgaatcttatatgacaaaatgtttcattcattataacaaatttccaataatcctgtcaattatatttctaaattttcccccaaattctaagcagagtatgtaaattggaagttaacttatgcacgcttaactatcttaacaagctttgagtgcaagagattgaagagttcaaatctgaccaagatgttgatgttggataagagaattctctgctccccacctctaagttgccagccctctataaacctacctgtggagcaacctgctcagatacatcaaacatggagacagcactcaaagtagaattataaagaagatcatgtccatgttaacattattataaccctacattttgtgcataaagtgtaagtgtataagcatatcaatattaaaaagcaagcaagcagaatttggaattcatccaatccaaatgcggcatcttcaaacctccatgatgctgcttacatgtctcgatcccacttaactatcttgggctgtgacaaagtcacatggttcacacggcaggcatactcatctttttcagtgggg

SEQ ID NO: 1441 - DNA, 544 bp, Homo sapiens
  misc_feature 263, 316: n = A,T,C or G
attctgaaaacaacaacaacaaaagtccattcatattttttaacaattgtataagtgcccaagtaattcactacagcctaaagccttgcctttgtaatttgacttctgacatgttggcaatcaaagcatgcacttgtaacaatgaaaaagaaaaagcattttatattactactcaataaaatgtgcatgaacttacagaattctcatccttccactgagtccgctgaagggatttatgtgcacaaccaccatgtgtcttctangtgctggcccaccaccacacatcacaggctgatttccacaggcttcttcctangggcctcgtgatctgaggggtggtgcctacttccactgtaagaaagaatcttggtggatttgtgtctcaaatcagataagagaagcctgtttaaagagcagatgccatcttctggcttcctcaaggagccagttaaaaaaccagagcattcctttgtattgaaaaataaaattaatttgttatcaggttgtttcagttgtattggatgccctatctatctgctaaagc

SEQ ID NO: 1442 - DNA, 493 bp, Homo sapiens
ttttttttttttttttttttttttttatttataggaaactttattttcattgatatttcacttaacataatttcaaagtcagtctgtggtctaagatgagcaaaagaacagatattgtaaatctcctaaaagactttttttcacactgctcctcagagcagggaatagggtttcagagccctgaaagctgacacctaacattatacccttgagatttacctacagatacagaaagaaaagataacatcaatatacaagaatcaagccctatgagggtcttattaagctcttgtgttacatactcgccacctctgtaggtttgtaatcatgactgattttccacctctctgccaagtttggtgtctttttttttaggtaaaatgtcagatgcaaaaatgctgcacttatttctcttaatatattgaaaatagtggaagatgcagatttttaattcttcatcagtctaagctggaacatgacttctgctaatggg

SEQ ID NO: 1443 - DNA, 505 bp, Homo sapiens
gaggaagactggacaaagggggtcacacattccttccatacggttgagcctctacctgcctggtgctggtcacagttcagcttcttcatgatggtggatcccaatggcaatgaatccagtgctacatacttcatcctaataggcctccctggtttagaagaggctcagttctggttggccttcccattgtgctccctctaccttattgctgtgctaggtaacttgacaatcatctacattgtgcggactgagcacagcctgcatgagcccatgtatatatttctttgcatgctttcaggcattgacatcctcatctccacctcatccatgcccaaaatgctggccatcttctggttcaattccactaccatccagttagatgcttgtctgctacagatgtttgccatccactccttatctggcatggaatccacagtgctgctggccatggcttttgaccgctatgtggccatctgtcacccactgcgccatgccacagtactta

SEQ ID NO: 1444 - DNA, 504 bp, Homo sapiens
tttttttttttttttttttttgaaatttaaaataaaattttattttatcttatactcaagttcagacaatagcatgtggtgtacattcaaaatttttgacaggtacagagcacattaaaaaatgaagacatgatcaaggagatgtaagagacaaatagacaacaacattctccctgaatctggaaaaaagcaagcaataagatcacgaaaggcggctgtaaaacaggattattctgcatgtgttgcccacaactagggcaaggttatctctcatcacaagtacaaagccattgatgttagtgtgtaacagagagaaaacagaggatttgtacagctgaggaaataaatggcagatgttacacaggaagcaatataacatggtcattaagtaactgtattcaaccatcaaatttaattttaaatcttggcacagtgcccacaagccgtgtgactttagtccccttgataatataaacttcatttctctcacttataataaagaga

SEQ ID NO: 1445 - DNA, 602 bp, Homo sapiens
caggggctatatgtgccacctttcaggttggggccaaggaagtgatgtcagtgtgacagaagggagagttagacctccagacgtcagcctccctcccatggggtacattttcaatctgagtgttgttgccttagctgtgctggtattagcttgattggttggtccgctggttatgaggtgtagggaggcagtttttgtttagtttttaggactttgcctcttcctttgtccttagcataatttctaggcagagcatccacgaagtcggttttcattgccagctcaagagcgacaatcatttacgagttcctatgttatgttaggtgccttatgtatattatcccaaatccactgcatggtttaaatacaggcactggaatataaatgaaaaaggtcattacagtcactgactttctgcaggaccttaaacatttctctttccacaagtttccccttaatcatgtgtcaaacctcccttcctgacgggaatgttgtgctataatgaatctgcataacgcttgggattctaggaggaaggaaggttccatggacatgtaagtacagcatattcccctcagtcttctaggagggcagagtgaatc

SEQ ID NO: 1446 - DNA, 635 bp, Homo sapiens
tcaggaggcgtctctccgagggtgtgggctgtgatggggccctgtgcacccatccaggctgcccagaccaggagagcacaggtcagccggacacatgatgacccagcctggcagctgcccgtgaccagtggctctggagccctcccaaggagaatgcagagagacgatggcgccacgccacgcccatccctccagaagcttccacggctcacacaggaggtgcagactgtaaagccggctttatccacctttacagcctcgtcctagacactcagtgtcaacagactcgaatgcctaaggtgcatacaatggaataggattaatctgtgaaaaggaagaaattctgacacatgctccggcgtggaggaaccttgaggacgacgctgagtgaaagaagccagacacgaaaggacagatacggcaagactcgacttatgtgaggtccctagaggagtcggattcatagagactgaaaggatggcgggcaccaggggcggtggagaggggaaatggggagttactgtttaatggggacagagtttcagttttacaagatgaaaagggtcctggagctggatgggggtgacggccgcacaacagcatgaatggactgaacgccactgaaaactgaactc

SEQ ID NO: 1447 - DNA, 399 bp, Homo sapiens
agtggagtgaggggtaacatagataacgaccgagtacggtggagctccataagctaaagcttgccgaactaaagcaagactgtcttgctcgtggttaggagaccaagggaataaagcaagatcttatccacagactccaggcatatcttagaagaacatgctgaagaggaggcaaatgaagaagatgtactgggagatgaaacagaggaagaagaaacaaagcccattgagctccctgtcaaagaggaagaaccccctgaaaaaactgttgatgtggcagcagagaagaaagtggtgaaaattacatctgaaataccacacactgatagaatgcataagacggctgaacgattcaatgtacctgtgagcttggagagtaagaaagctgctcgggcagct

SEQ ID NO: 1448 - DNA, 563 bp, Homo sapiens
tagatgcaaagcaggattcaaaagaacatctttgcgttttctaccggctccccatcatcgtactagggaggaagaagcgggtgagaaacaaaacttctttccattgtcctgcccgtttctgcggacttgttctgaggccgaggcacctctaagatactgatggctctgcagaggacccattcattgcttctgcttttgctgctgaccctgctggggctggggctggtccagccctcctatggccaggatggcatgtaccagcgattcctgcggcaacacgtgcaccctgaggagacaggtggcagtgatcgctactgcaacttgatgatgcaaagacggaagatgactttgtatcactgcaagcgcttcaacaccttcatccatgaagatatctggaacattcgtagtatctgcagcaccaccaatatccaatgcaagaacggcaagatgaactgccatgagggtgtagtgaaggtcacagattgcagggacacaggaagttccagggcacccaactgcagatatcgggccatagcgagcactagacgtgttgtcattgcctg

SEQ ID NO: 1449 - DNA, 561 bp, Homo sapiens
tacggccgggtcgctgcggctgggctggaggtcaaggatgcattccaggaaagttctataaaaatataccatcaactccaacctgatatttgacctagccatggaaaacctcattggctcctcactggatcagaccataaaaatgatccaggaatgaaaatctaagataaattcccaccacttcaagatgttcttatacaagtcaacagtctagcagatcagccagtctctttcatcatcaagcagacgtactcaagaaagaggaatagtgaagtgaaatatacagaagcatgttcaagttcatctgttgaatctggaattgtgaatagtgacaatattgagaaaaatactgactccaatctgcaaacttcaacttcatttgagccacatttcaaaaagaaaaaaaagaaaaatttgaaacattaagggaaaacagttgggtaaaagatccatttgcttttcgaaaccctgaatcaataattgagctaaacttggtgcctgaagaagagaatgaattattgcagcttagttcttcatatacattgaagaatgattatgaaa

SEQ ID NO: 1450 - DNA, 389 bp, Homo sapiens
aaacatccaattctcaaactgaagctcgcactctcgcctccagcatgaaagtccctgccgcccttctgtgcctgccgctcatagcagccaccttcattccccaagggctcgctcggccagatgcaatcaatgccccagtcacctgctgctataacttcaccaataggaagatctcagtgcagaggctcgcgagctatagaagaatcaccagcagcaagtgtcccaaagaagctgtgatcttcaagaccattgtggccaaggagatctgtgctgaccccaagcagaagtgggttcaggattccatggaccacctggacaagcaaacccaaactccgaagacttgaacactcactccacaacccaagaatctgcagctaacttattttccc

SEQ ID NO: 1451 - DNA, 490 bp, Homo sapiens
tacccgagtttttgattctcaacatgtccgagactgctcctgccgctcccgctgccgcgcctcctgcggagaaggcccctgtaaagaagaaggcggccaaaaaggctgggggtacgcctcgtaaggcgtccggtcccccggtgtcagagctcatcaccaaggctgtggccgcctctaaagatcgtagcggagtttctctggctgctctgaaaaaagcgttggctgccgccggctatgatgtggagaaaaacaacagccgtatcaaacttggtctcaagagcctggtgagcaagggcactctggtgcaaacgaaaggcaccggtgcttctggctcctttaaactcaacaagaaggcagcctccggggaagccaagcccgaggttaaaaaggcgggcggaaccaaacctaagaagccagttggggcagccaagaagcccaagaaggcggctggcggcgcaactccgaagaagagcgctaagaaaacaccgaa

SEQ ID NO: 1452 - DNA, 654 bp, Homo sapiens
  misc_feature 520, 602: n = A,T,C or G
tgaatcttttggttggtgattttgatgatagccacaaagcaagcagggtaatgctgatgcttcaagtcttggaaccacacttcgagaatcactgttataatgtacagcagaactgcatgatcagctgtatggtagccttgaaaaccaacaggccacaatcacagtgaaaacctcaggttggcagccactggagggtacaaaatgagtttggatctccttcaatgccccattcccagagaactgtcattatttgacctgctggtagttccctaaaggacgtgcaaggatgtttttatttgactggacacttgaagcttgccctgtatgaacagcccccatcttcccatgcttgtcaaaaatcagaggcaactaacactgcggcttcctgagagtctcactctgtcacccaggctggagagcaattgcacaaacacttggctcactgcagcctcaacttcttgtcctcaagtgatcctcccaccttagcctcctaagtagctgggaccacagtggagacggngtttcaccatgttggccagtctgctttcctcctagcctcaagtgagccgcctgcctcgaagatgctttatttataagcgctntggacacactttaataaatgctctattgtatacagttgaactctatataaca

SEQ ID NO: 1453 - DNA, 399 bp, Homo sapiens
agatccaagcaaaaatccctggattgaaacgcaaagctgaatgaaaacgcccaaaataattagtaggagttcatctttaaaggggatattcatttgattatacgggggagggtcagggaagaacgaaccttgacgttgcagtgcagtttcacagatcgttgttagatctttatttttagccatgcactgttgtgaggaaaaattacctgtcttgactgccatgtgttcatcatcttaagtattgtaagctgctatgtatggatttaaaccgtaatcatacctttttcctatctgaggcactggtggaataaaaaacctgtatattttactttgttgcagatagtcttgccgcatcttggcaagttgcagagatggtggagctagaaaaaaaaaaaaaaa

SEQ ID NO: 1454 - DNA, 534 bp, Homo sapiens
  misc_feature 459: n = A,T,C or G
gaagatgacccagatcatgtttgaaaccttcaatgtccctgccatgtacgtcgccattcaagctgtgctctccctctatgcctctggccgcacgacaggcatcgtcctggattcaggtgatggcgtcacccacaacgtccccatctatgaaggctatgccctgccccatgccatcatgcgcctggacttggctggccgtgacctcacggactacctcatgaagatcctcacagagagaggctattcctttgtgaccacagctgagagagaaattgtgcgagacatcaaggagaagctgtgctatgtggccctggattttgagaatgagatggccacagcagcttcctcttcctccctggagaagagctatgagctgccagatgggcaggttatcaccattggcaatgagcgcttccgctgccctgagaccctcttccagccttcctttattggcatggnagtccgctggaattcatgagacaacctacaattccatcatgaagtgtgacattgacatccgtaaggacttatatg

SEQ ID NO: 1455 - DNA, 536 bp, Homo sapiens
gtactccaggcgagaggcggacgcgagtcgtcgtggcaggaaagtgactagctccccttcgttgtcagccagggacgagaacacagccacgctcccacccggctgccaacgatccctcggcggcgatgtcggccgccggtgcccgaggcttgcgggccacctaccatcggctcctcgataaagtggagctgatgctgcccgagaaattgaggccgttgtacaaccatccagcaggtcccagaacagtttttttctgggctccaattatgaaatgggggttggtgtgtgctggattggctgatatggccagacctgcagaaaaacttagcacagctcaatctgctgttttgatggctacagggtttatttggtcaagatactcacttgtaattattccaaaaaattggagtctgtttgctgttaatttctttgtgggggcagcaggagcctctcagctttttcgtatttggagatataaccaagaactaaaagctaaagcacacaaataaaagagttcctgatcacctgaacaatct

SEQ ID NO: 1456 - DNA, 469 bp, Homo sapiens
aaaaaaaaaaaattagtcggccgggggggggcatgcctgtaatcccacctactggggaggctgaggcaggaaaaatcgcttgaacctgggaggcaaaggttgcagggacccgggattgccccattgtactccaccctgggggaaaaagggaaactttgtcttaaaaaaaaaatgggggctgaaaaaaatggaggaattctgctctttgctctttaggggggccaaccctgcaaagttggggcctaatatttcacctgccctggtgaaacagtttactggccctttgttcccagccttttccttttaagtccatcgcccacacagcattggggagggggagccacttgaaacaaaagtcaacaacgggttgtagttcataaacccaaagctgttggcgccccctgtatctggaaggccattatgacccactactttttttttttcctaccccttttaaaactcagttcag

SEQ ID NO: 1457 - DNA, 531 bp, Homo sapiens
cttaactgtttcacgttcactattttaggttaattttcttgggaaatcaatttgaatattcccccctgtccttttgcattaaaggacgaaaatatatgttgagagtttgacagactttttaaatatgcctctttcccaattttatgtatttttggttctgcgcacacagatttatcaatgaagtacatttgcctctggctttatcacaaggaaaaaggaatcaaacattgaacacaaatgtgttccaaaccagtcttgtccatcttgtcacttttatgtgactgctcctctgaaccagaaggggcacgatagaaggccataggaatgaaagtaaatcattcaggtgaagtgagaaattcttccatatacagagtgaaaatgtgtgatttcattcctgccttcctttaaacgttgtcttgatctctgcctagtagtagttgagccctcagtcgcccaaacatgaggagagacccaactccagcagtcagaatttagtatttacatttgccttcccaagttgagaatagaatg

SEQ ID NO: 1458 - DNA, 528 bp, Homo sapiens
gtgttgcagcgcccgaacattggatgcttgacaaactaacgggtgtatttgcacctcgtccatcgacaggtccccacaagctgagggaatgtcttcctctgatcgtcttcctcaggaatagactcaagtatgcgttgactggagatgaggtaaagaagatatgtatgcaacgtttcatcaaaattgatggcaaggttcgagtggatgtcacataccctgccggattcatggatgtcatcagcatcgagaagacaggtgaacatttccgcctggtctatgacaccaagggccgttttgctgttcaccgcatcacagtggaagaggcaaagtacaagttgtgcaaagtgaggaagattactgtgggagtgaagggaatccctcacctggtgactcatgatgctcgaaccatccgctacccagatcctgtcatcaaggtgaacgatactgtgcagattgatttagggactggcaagataatcaactttatcaaatttgatacaggcaatttgtgtatggtgattggtggag

SEQ ID NO: 1459 - DNA, 440 bp, Homo sapiens
tatattctgcatattttctcagtcatgataaacaggaacacttgaccagatcttctaccccacacagcatagataacatctcaaactcggtaaactgttattctaatagatttttttttttgagacagggtcccaccctgtcactcaggctggagcacaggggggggatcacagctcactgcagcctcgacctcctggactcaggggatcctcccaccccagcctaatgagtagccgggaccacaggcatgcgccaccacatccagctaattttttttgttgtttttggagagatgaggtctccctgtgttgcccagcctgttctcaaactctgggcttatcctcgggtctagcaattctcccgtctcaagggggttgggattacaggcatgtgccatcatgcccaaccataattctaatatattttaaaatatgattca

SEQ ID NO: 1460 - DNA, 489 bp, Homo sapiens
gacaaagcgttaggagaagaagagaggcagggaagacaagccaggcacgatggccaccttcccaccagcaaccagcgccccccagcagcccccaggcccggaggacgaggactccagcctggatgaatctgacctctatagcctggcccattcctacctcggaggtggaggccggaaaggtcgcaccaagagagaagctgctgccaacaccaaccgccccagccctggcgggcacgagaggaaactggtgaccaagctgcagaattcagagaggaagaagcgaggggcacggcgctgagacagagctggagatgaggccagaccatggacactacacccagcaatagagacgggactgcggaggaaggaggacccaggacaggatccaggccggcttgccacaccccccacccctaggacttattcccgctgactgagtctctgaggggctaccaggaaagcgcctccaaccctagcaaaagtgcaaga

SEQ ID NO: 1461 - DNA, 624 bp, Homo sapiens
tgataaaggatctactgaggaaggtgcaaggctagagaaagccaaaaatgctgtggtgaagattcctgaagaaacagaggaacccatcaggcctagaccacctcgacccaaacccacacaccagcctcctcagacaaaatggtacaccccaattaagggtcgtcttgatgctctctgggctttgttgaggcggcagtatgaccgggtttctttgatgcgacctcaggaaggagatgagggccggtgcataaacttctcccgagttccatctcagtaaaagggaagcaggaagaccaagaaggtacgaagatggcacattttcacatagctgattttcaaccaaatgaaaaaaatcaagtgcatttcagaagcttttggaagagcagcttaattcctctcagtcgggaaatgttttctctgccttctgctttgcttgcaccaaacatttctaaacacttgttctgccatctacatgggaggtgatgaaactcagtggtaactcatgatttatgacattgaaaataaagaggaacattgacctgcagactatggtttgtacaagaaagtttgtttgaatgtgtagaagaggaaaaagcaacaacagcaacaacacgaagatgatac

SEQ ID NO: 1462 - DNA, 623 bp, Homo sapiens
caatttaaaaacagtattgtctaatccatttattatatgtttataatgctatatattttttaatgtaaaaacatttgtaaattattagcctgtgccaaattgtacttgaattattttcagtctgccaagaatgtttcattctgtacttttaattaaaagactgtatatgaaaacccagaaaatatgaaatgtaggatatggaaatgatacagttctttaaaccaattatgtgtaaaaattcacttttttgaaacagcaagacagtatctcatgtgatattgtccctataatctaatttctataatttaatggaacttatggcctgtacatggtttactcctgtaatcccagcactttgggaggtcgaggtgggaggattgcttgagttcaggagttcaagaccagcctgggcaacatagtaaaaccccatctctacaaaaagaaggaagttagcgagcatggtggtgcatgcttgtagtcccagctacttcagagactgagcctgggaggtcgaggctgtggtgagctgtgtttgcaccttggcagtccacctgggcaacagagtgaaaccctgtctcaggtgggggttggagggagacagtaatggggctgggcgtgatggt

SEQ ID NO: 1463 - DNA, 543 bp, Homo sapiens
acctagggccaccagttcttgagcctttgtggattctcagattgcctctcaactttccctacttctggcttggaattcaactttttcaattctgctaaatttgttaccacttatctatctgctttttagcttgcaaaacattgttgcagttatatattttcctattctttgtctttgttaagctaattaagccattaaaaaagcatgttattaaatttacatatgtaaaaaaatttgtgatataaatatatgtctcatatatcatatattcatatatgaatatatgtcttatatatcatatattcatatatgaatatatattttttaatcccttggagctgggtgtggtatctcttgcctgtaatcccaatgctttgggaggccaaagtgaaaagatcatttgaggccaggagtttgagaccagctcgggcaacgtagtgagaccctatctctataaaatattttttaaaaattagctgggcacggtggtgcccacctgtggttctggctgcttgggaggctgaggtggcaagattgcttgag

SEQ ID NO: 1464 - DNA, 432 bp, Homo sapiens
tacggccgggcgcggtggctcacgcctgtaatcccagcacttcgggaggccaaggtgggcagatcacgaggtcaggagattgagaccatcctggctaacacagtgaaaccccgtctctactaaaaatacaaaaaattagccaggcatggtggcgggcgcctgtagtcccagctacttgggaggctgaggcaggagaatggtgtgaactcgagaggcggagcttgcagtgagctgatatcgcgccactgcactccagcctgggcgacagagcaagacttcatctcaaaaaaaaaaaaaaaaattatttgtttttaaaaaaaaaaccatgaggggtttaatttaaggcggggccaaatccaggggttaaaaaagtatattttggtttgggtctaaggcctttaatcaaaattgttttaaaaaaaaaaaaaaaaa

SEQ ID NO: 1465 - DNA, 530 bp, Homo sapiens
gattggaaataacaagtttcaggtcctgactttcctctgaatatgagctgaggaagaagtcatcttcatgggtcattctgctgcctcctccatcactgatagcatcgtgcacacctccagtcatgcgcctagcactgggactttggtgccactgcctcctccatcactgacaacatcgtgcccacctccatgcatgcgcccagcactgggactttgactagtgccgcctcctctatcattgccagtatcgtgcactcctccacgcatgtgcccaacactgggactttgtctgaggctgcctcctccgtcattgccagtatcatgcacacctccatattgtgcccagcactgggactttgtctgatgctgcctcctccgtcattgccagtatcatgcacacctccatattgtgcatacctccagtcatgcacccaacactgggactttcactgatgctactgcctccctcctgcaaagcacccatgtctgggaaaggcagagcctcagtaggatgaccatggaagctaata

SEQ ID NO: 1466 - DNA, 432 bp, Homo sapiens
cacttaaagcgtgttgcagcgccgaagcattggatgcttgacaaactaacgggtgtatttgcacctcgtccatcgacaggtccccacaagctgagggaatgtcttcctctgatcgtcttcctcaggaatagactcaagtatgcgttgactggagatgaggtaaagaagatatgtatgcaacgtttcatcaaaattgatggcaaggttcgagtggatgtcacataccctgctggattcatggatgtcatcagcatcgagaagacaggtgaacatttccgcctggtctatgacaccaagggccgttttgctgttcaccgcatcacagtggaagaggcaaagtacaagttgtgcaaagtgaggaagattactgtgggagtgaagggaatccctcacctggtgactcatgatgctcgaaccatccgctacccagat

SEQ ID NO: 1467 - DNA, 558 bp, Homo sapiens
ttttttttttttttttttttttttttttcgggacagagtaagactgtctcaaaaagaaaaaaaaagaaaaaagagtgttagggtcatgaaacacaaggtaagactgaggacctatcaatacaatgaaagagactgaagcgacatgagatctaaatgcaatacatgatcctagtttgtatagccgtcctctaaaagatattaaagtagtaacttataaatcttggaataggcccagatagttactttctgatataaagagaaaatataagaaacgtctactactttccattttgaaattttgcccactctaatgctgtaaacagacctaacagatcccagcactgctatactgagtaacgttggtttatcctctataaacatgatttgggaaaagtggtctgcctggaaaagctttgattattatataatcatacgagttagaattttgagaatactttatactttttcccctttatttgtacattggggagagaaattgcttttaagaatgaattattaagtctgtagaaagaaatataatatgaatgtaatgacaac

SEQ ID NO: 1468 - DNA, 338 bp, Homo sapiens
acatacgagactgtaaagatgtgacagtgtacattatatgacaatgcacattagccagcaagtcttttataggtggtttcagcagcaacgataaataatgcagaattcagctccagcactttatttcaaaagaaatttcctgcctccctccaagatgcagggtgaggaggtagcttggggttgctattggagaagtattcagtttgctactttgtgtcaccccttgccattcttttatccccagctaattattatctgcatataatataatctgctagaccataaattgacagctttcaggacagatgccttgaaagttcttagggaggttaaacaaa

SEQ ID NO: 1469 - DNA, 438 bp, Homo sapiens
aggcaactcagtcagtctctcggtgatcaggtctccacagacttcagaacaattttttattttatttttttagagatggagatctcacttcagaacaacatttttgggatatcagctttgctccctgtggattttattggtcctattgcacatggcttcactctttgtctggacctgccctggaaggcagggagagctccctccttttgagtaggtcacctgggaataagtgtcttccaaactggtttttctgctcagtcggagactgccatatttccatgtagaagttaggtcagggagaagcacccacagtcttggaaatccccaagtaacctgttgaaacgtgtattgccataggcaggagctatgaccaaaactgtggctacagatcagaaggcaatttagcgtagttccacacttacatgggtggaaaccttc

SEQ ID NO: 1470 - DNA, 422 bp, Homo sapiens
ttttttttttttttttttttttttgggacggagtctcgctctgtcgcccaggctggagtacagtggcagatctcatctcactgcaagctccgcctcctgggttcatgattctcccgcctcagcctcctgagtacctgggaccacaggcacccgccaccacacccgggtaatttgtatttttagtagagacggggtttcacaatgttagccaggatggtctcgatctcctgacctcgtgatctgcccacctcggcctcccaaagcacagggattataggcgtgggcgtgagccaccgcacccaatgcaggtttcaatttcatttctacccacagagttactcaagccagttgcagctgggtgtggtatcgcacacctgtggtcccagctactcaggaggctgagatgggaggattgctggaac

SEQ ID NO: 1471 - DNA, 524 bp, Homo sapiens
aatagcagcgtgcctatattttttgagctttttgtggaaactgtctacccagttccagaaggaattacttgtggagttgtcacttttttaagtaatatgtttatgggagtacttttattttttctcacattttatcatacagagttgacttggttcaactggtgccttcccgggtcgtgtttgctcagtctcctcctcattctgtgcttcagggaatcctatgacagactctatcttgatgtggttgtctccgtttaatagcacagacttgaaggagtttaaaaggaggctggaaatcaatactgcacactgcacatttgctcagaattgcacatctaacaggaaaagagggagaagaaagaaacttcattcagaggttttgttaggttacagattatcacattaatttaattactactaggtaataataatgggagacttgagtgataataggggattttaaaactctacagatggcatacctgtgcctgcttctggggttggaagtgtgacttcttacacat

SEQ ID NO: 1472 - DNA, 508 bp, Homo sapiens
gcggctggggaaggtgaacagtgtggcccgccacgttcttctccgcggcgctccgggcccgggcggctggcctcaccgcccactggggaagacatgtaaggaatttgcataagacagttatgcaaaatggagctggaggaactttatttgtgcacagagatactcctgagaataaccctgatactccatttgatttcacaccagaaaactataagaggatagaggcaattgtaaaaaactatccagaaggccataaagcagcagctgttcttccagtcctggatttagcccaaaggcagaatgggtggttgcccatctctgctatgaacaaggttgcagaagttttacaagtacctccaatgagagtatatgaagttgcaactttttatacaatgtataatcgaaagccagttggaaagtatcacattcaggtctgcactactacaccctgcatgcttcgaaactctgacagcatactggaggccattcagaaaaagcttggaataaa

SEQ ID NO: 1473 - DNA, 545 bp, Homo sapiens
tttttttttttttttttttttttttttactttttttttttttttttttttttttttacgagcaagtatggtttattacggacaaatggtagaaaaatgttactaatatccatagataagttccttaagtcatgtagagagactgttattaaaagtttgctgcatttttctattgaatcaagaactagctaccagttacagtgccttctaaacacacagttagctttgctttatcaataaccaaataataaactaggtcccaatggttttgtccacatctaaattgttcaggtgatcaggaactcttttatttgggtgccttagcttttagttcttggttatatctccaaatacgaaaaagctgagaggctcctgctgcccccacaaagaaattaacagcaaacagactccaattttttggaataattacaagtgagtatcttgactaaataaaccctgtagccatcaaaacagcagattgagctgtgctaagtttttctgcaggtctggccatatcagccaatccagcacacaccaacccccatt

SEQ ID NO: 1474 - DNA, 562 bp, Homo sapiens
aagaagaaggattactgtggctgcatgatcattgaagatgaagatgctccaatttcaataaccttggatgacaccaagccagatgggtcactgcctgccatcatgggcttcattcttgcccggaaagctgatcgacttgctaagctacataaggaaataaggaagaagaaaatctgtgagctctatgccaaagtgctgggatcccaagaagctttacatccagtgcattatgaagagaagaactggtgtgaggagcagtactctaggggctgctacacggcctacttccctcctgggatcatgactcaatatggaagggtgattcgtcaacccgtgggcaggattttctttgcgggcacagagactgccacaaagtggagcggctacatggaaggggcagttgaggctggagaacgagcagctagggaggtcttaaatggtctcgggaaggtgaccgagaaagacatctgggtacaagaacctgaatcaaaggacgttccagcggtagaaatcacccacaccttctgggaaaggaacctgccctctgtttctggcctgctga

SEQ ID NO: 1475 - DNA, 646 bp, Homo sapiens
tttttttttttttttttttttttcattggattggtttaaaaattatcctggatccaggaaagtgatgccttttcttattctccttttatcatcaaaacaaacagccaatatgtctctagaaacattgcgttctaaactggaagtgctgacaagccttcatcccagaccctgagtggcagattttcatgaaaatcagcttctgggccagttaagtcttcatgaagttatcttttcataactcagccctcattcccctctgggtcagtagcagtggaaccaggaaacccaagggccagatttccttcctcaatgaaggcactccaggaagaaggggagttcctggcacctgcctgccaaactctgctctacttgctgaactttgctcagcatgaacagggcattctggctacaagttcccccaaactatcccagattgtatctttaaggcacaccaattcctctgcttaaggacttctgttcacaatgaattgtattagttattcttaacattcaaaagagaaagttctgcatcagagcccacccatgtccagccattgtgccctgagatcccaagactgtggggatgagggcagagcccattaacatcagggattctggtcactggggtcacacttgagcatgattt

SEQ ID NO: 1476 - DNA, 524 bp, Homo sapiens
cccgagggtcgccttttgttcggagtggcacgattgtccgttcccagacattctcgcctggagcacgaagccagtatgtttgcagactttatcgtagtgacagcgacagttcaacgctgccccggaagtccccctttgtccgaaatactttggaaagacgaacccttcgctataagcagtcatgcaggtcttccctggctgagctcatggcccgcacctccctggacttggagctggatctccaggcgtcgagaacacggcagaggcagctgaatgaggagctctgcgccctccgtgagctgcggcagcggttggaggacgcccagctccgtggccagactgacctcccaccctgggtgcttcgggacgagcggctccgtggcctgctgcgggaggccgagcggcagacaagacagaccaaacttgactaccgtcatgagcaggcggctgagaagatgctgaagaaggcctccaaggagatctaccagctgcgtgggcagagccacaaagagcccatccaagtg

SEQ ID NO: 1477 - DNA, 687 bp, Homo sapiens
tagtcacttctgattctgacaatcaatcaatcaatggcctagagcactgactgttaacacaaacgtcgctagcaaagtagcaacagctttaagtctaaatacaaagctgttctgtgtgagaattttttaaaaggctacttgtataataacccttgtcatttttaatgtacaaaacgctattaagtggcttagaatttgaacatttgtggtctttatttactttgcttcgtgtgtgggcaaagcaacatcttccctaaatatatattaccaagaaaagcaagaagcagattaggtttttgacaaaacaaacaggccaaaagggggctgacctggagcagagcatggtgagaggcaaggcatgagagggcaagtttgttgtggacagatctgtgcctactttattactggagtaaaagaaaacaaagttcattgatgtcgaaggatatatacagtgttagaaattaggactgtttagaaaaacaggaatacaatggttgtttttatcatagtgtacacatttagcttgtggtaaatgactcacaaaactgattttaaaatcaagttaatgtgaattttgaaaattactacttaatcctaattcacaataacaatggcattaaggtttgacttgagttggttcttagtattatttatggtaaataggctcttaccacttgcaaataactg

SEQ ID NO: 1478 - DNA, 653 bp, Homo sapiens
gcagttgacaagcgactgtgacaggcctcgccggaggagctgggccctgaatcaccctgctccccggccggctgtcggcgctgggggagggggtcccgggggtcgactcaccgatctgcccgatgaactcgatcttgatgccctggtgctccagccgcttgttggggttcttgagggcaaggctcaccttcccggagaccgtctccccgtcgtagaagaggaaatatttctccttcttcccgtcctccgtcttgtgctcggcccgcttcctactctctgcatcgttcagaaggatttccacctccacgctctgcccgaagccgaagaagctcatcgcaccgccgggccgggcgggtctcggaacgactcggcgcgcgcgcgggagcgagctttgaaagttgagcacggcggcggcgagccggtgccctgggatcatggtggcgttgcggggccttggtagcggcctgcagccctggtgtccgccggatcttagactcgaatgggttgacacagtgtgggaactggatttcacagagactgagcctttggatcccagcatagaagcagagatcatagagactggattggctgcattcacaaaactctatgaaagccttttaccctttgctactggagaacatggatctatggag

SEQ ID NO: 1479 - DNA, 647 bp, Homo sapiens
agacgaaaatgaaccaattcaggagcgattcttcagacctcacttcttgcaggctcctggagatctgactgttcaagaaggaaaactctgcagaatggactgcaaagtcagtgggttaccaaccccagatctaagctggcaactagatggaaagcccgtacgccctgacagtgctcacaagatgctggtgcgtgagaacggggtgcactctctgatcatagagccagtcacgtcacgtgatgccggcatctacacatgtatagctaccaaccgagcaggacagaactcattcagcctggagcttgtggttgctgctaaagaagcacacaaaccccctgtgtttattgagaagctccaaaacacaggagttgctgatgggtacccagtgcggctggaatgtcgtgtattgggagtgccaccacctcagatattttggaagaaagaaaatgaatcactcactcacagcactgaccgagtgagcatgcaccaggacaaccacggctacatctgcccgctcattcagggagccacaaaagaagatgctgggtggtatactgtgtcagccaagaatgaagcagggattgtgtcctgtactgccaggctggacgtttacacccagtggcatcagcagtcacagagcaccaagc

SEQ ID NO: 1480 - DNA, 616 bp, Homo sapiens
cagtcatcaaagcgttccacgtttgaagttagcaactggcttaagttattgcccttattaaaattgctttctcaaaagtttgggttagtttcaaatgtgatattttggagggaagggaaagtaggtatctttcaggtcgtgataatgagctcctatgaaaggatgcaatataatgacccgcttttctagaaagttcataatcagctctggaacaagcacacttgattcctcactgtgcttcagaatgagattaagatcagatgttggaacgtgctatgctgtagcgtgtctggaaacaaagtacacaaacctggctacggtgatgagttagcttctgcttactacctgtgacaacccaagtgggtgacactagtgaaccttctccagtctgcaggctggcatagaaggctcttagattatattgggcagcttgcaatctgccgaagcagtgacttgcatttccacacttggcttgagcactcaacccagaaggcgaagatagcttttggttgtaggcggcttcctgtatgggatatccctcggtaagggtaaaggagcagaggcaaaggagaaaagcagaagttgcagctgatgcaggtatcctatgcccttgatg

SEQ ID NO: 1481 - DNA, 570 bp, Homo sapiens
tatcatctgaacctgaccgtgggaggtattcccttccatgagaaggacctcgtgcagcctataaaccctcgtctggatggctgcatgaggagctggaactggctgaacggagaagacaccaccatccaggaaacggtgaaagtgaacacgaggatgcagtgcttctcggtgacggagagaggctctttctaccccgggagcggcttcgccttctacagcctggactacatgcggacccctctggacgtcgggactgaatcaacctgggaagtagaagtcgtggctcacatccgcccagccgcagacacaggcgtgctgtttgcgctctgggcccccgacctccgtgccgtgcctctctctgtggcactggtagactatcactccacgaagaaactcaagaagcagctggtggtcctggccgtggagcatacggccttggccctaatggagatcaaggtctgcgacggccaagagcacgtggtcaccgtctcgctgagggacggtgaggccaccctggaggtggacggcaccaggggccagagcgaggtgagcgccgcgcagctgcaggag

SEQ ID NO: 1482 - DNA, 563 bp, Homo sapiens
aggcattgaggcagccagcgcaggggcttctgctgagggggcaggcggagcttgaggataccgcagataagttttcttctctttgaaagatagagattaatacaactacttaaaaaatatagtcaataggttactaagatattgcttagcgttaagtttttagcgtaattttaatagcttaagattttaagagaaaatatgaagacttagaagagtagcatgaggaaggaaaagataaaaggtttctaaaacatgacggaggttgagatgaagcttcttcatggagtaaaaaatgtatttaaaagaaaattgagagaaaggactacagagccccgaattaataccaatagaagggcaatgcttttagattaaaatgaaggtgacttaaacagcttaaagtttagtttaaaagttgtaggtgattaaaataatttgaaggcgatcttttaaaaagagattaaaccgaaggtgattaaaagaccttgaaatccatgacgcagggagaattgcgtcatttaaagcctagttaacgcatttactaaacgcagacgaaaatggaaaga

SEQ ID NO: 1483 - DNA, 167 bp, Homo sapiens
gacaagcgactgtgacaggcctcgccggaggagctgggccctgaatcaccctgctccccggccggctgtcggcgctgggggagggggtcccgggggtcgactcaccgatctgcccgatgaactcgatcttgatgccctggtgctccagccgcttgttggggttcttg

SEQ ID NO: 1484 - DNA, 80 bp, Homo sapiens
ctgcgcggacgccgtctcttcacagcgccgcgagcgccgacgcacgggttgctgctcggcctcctgaacccagtcccccg

SEQ ID NO: 1485 - DNA, 571 bp, Homo sapiens
gttccgggcgttaccatcgtccgtgcgcaccgcccggcgtccagatttggcaattcttcgctgaagtcatcatgagctttttccaactcctgatgaaaaggaaggaactcattcccttggtggtgttcatgactgtggcggcgggtggagcctcatctttcgctgtgtattctctttggaaaaccgatgtgatccttgatcgaaaaaaaaatccagaaccttgggaaactgtggaccctactgtacctcaaaagcttataacaatcaaccaacaatggaaacccattgaagagttgcaaaatgtccaaagggtgaccaaatgacgagccctcgcctctttcttctgaagagtactctataaatctagtggaaacatttctgcacaaactagattctggacaccagtgtgcggaaatgcttctgctacatttttagggtttgtctacattttttgggctctggataaggaattaaaggagtgcagcaataactgcactgtctaaaagtttgtgcttattttcttgtaaatttgaatattgcatattgaaatttttgttatgatctatgaatg

SEQ ID NO: 1486 - DNA, 641 bp, Homo sapiens
  misc_feature 520: n = A,T,C or G
agctggtatcagcagcgaccagggcaagcccctaaactcctgatctatgctgcatccactttgcaaagtggggtcccatcaaggttcagcggcagtggatctggcacagatttcactctcaccatcaccagcctgcagcctgaagattttgcaacttattactgtctacaagatgagacttaccctctcactttcggcggagggaccaaggtggagatcaaacgaactgtggctgcaccatctgtcttcatcttcccgccatctgatgagcagttgaaatctggaactgcctctgttgtgtgcctgctgaataacttctatcccagagaggccaaagtacagtggaaggtggataacgccctccaatcgggtaactcccaggagagtgtcacagagcaggacagcaaggacagcacctacagcctcagcagcaccctgacgctgagcaaagcagactacgagaaacacaaagtctacgcctgcgaagtcacccatcagggcctgagctcgcccgtcacanagagcttcacaggggagagtgttagagggagaagtgcccccacctgctcctcagttccagcctgaccccctcccatcctttggcctctgaccctttttccacaggggacctacccctattg

SEQ ID NO: 1487 - DNA, 554 bp, Homo sapiens
tcagaagcttggaccgcatcctagccgccgactcacacaaggcaggtgggtgaggaaatccagagttgccatggagaaaattccagtgtcagcattcttgctccttgtggccctctcctacactctggccagagataccacagtcaaacctggagccaaaaaggacacaaaggactctcgacccaaactgccccagaccctctccagaggttggggtgaccaactcatctggactcagacatatgaagaagctctatataaatccaagacaagcaacaaacccttgatgattattcatcacttggatgagtgcccacacagtcaagctttaaagaaagtgtttgctgaaaataaagaaatccagaaattggcagagcagtttgtcctcctcaatctggtttatgaaacaactgacaaacacctttctcctgatggccagtatgtccccaggattatgtttgttgacccatctctgacagttagagccgatatcactggaagatattcaaatcgtctctatgcttacgaacctgcagatacagctctgttgcttg

SEQ ID NO: 1488 - DNA, 549 bp, Homo sapiens
gtactccaggcgagaggcggacgcgagtcgtcgtggcaggaaagtgactagctccccttcgttgtcagccagggacgagaacacagccacgctcccacccggctgccaacgatccctcggcggcgatgtcggccgccggtgcccgaggcctgcgggccacctaccaccggctcctcgataaagtggagctgatgctgcccgagaaattgaggccgttgtacaaccatccagcaggtcccagaacagttttcttctgggctccaattatgaaatgggggttggtgtgtgctggattggctgatatggccagacctgcagaaaaacttagcacagctcaatctgctgttttgatggctacagggtttatttggtcaagatactcacttgtaattattccaaaaaattggagtctgtttgctgttaatttctttgtgggggcagcaggagcctctcagctttttcgtatttggagatataaccaagaactaaaagctaaagcacacaaataaaagagttcctgatcacctgaacaatctagatgtggacaaa

SEQ ID NO: 1489 - DNA, 539 bp, Homo sapiens
taacccagatcgctactaccccgcagttcccggacatgatcctctccgcctctcgagataagaccatcatcatgtggaaactgaccagggatgagaccaactatggaattccacagcgtgctctgcggggtcactcccactttgttagtgatgtggttatctcctcagatggccagtttgccctctcaggctcctgggatggaaccctgcgcctctgggatctcacaacgggcaccaccacgaggcgatttgtgggccataccaaggatgtgctgagtgtggccttctcctctgacaaccggcagattgtctctggatctcgagataaaaccatcaagctatggaataccctgggtgtgtgcaaatacactgtccaggatgagagccactcagagtgggtgtcttgtgtccgcttctcgcccaacagcagcaaccctatcatcgtctcctgtggctgggacaagctggtcaaggtatggaacctggctaactgcaagctgaagaccaaccacattggccacacaggctatctgaacacg

SEQ ID NO: 1490 - DNA, 536 bp, Homo sapiens
tcattgggctgcagatgggcaccaacaagtttgccagccagcagggcatgacggcctatggcacccggcgccacctctacgaccccaagctgggcacagaccagcctctggaccaggcgaccatcagcctgcagatgggcaccaacaaagtagccagccaggctggcatgactgcgccagggaccaagcggcagatcttcgagccggggctgggcatggagcactgcgacacgctcagtgtcagcctgcagatgggcagcaacaagggcgcctcgcagcggggcatgacggtgtatgggctgccacgccaggtctacgaccccaagtactgtctgactcccgagtacccagagctgggtgagcccgcccacaaccaccacgcacacaactactacaattccgcctagggccacaaggccttccctgttttccccccaagggaggctgctgctgctcttggctggacccagccaggcccagccgaccccctctccctgcatggcatcctccagcccctgtagaactcaacctctaca

SEQ ID NO: 1491 - DNA, 333 bp, Homo sapiens
atgttccctgtggccctgggggctccatggtcaaatatgtgagtgtcacatcctgtattttatggtgagtcacatgttacaccagtgcacaataggctctgacgtttcctgcaataaagaggtctgttgaactgggcccaatccggcatttttcatgcttacttgaccatgagacccatattttgagaaagaaatactgacatcccaggatggcagtgttctgttaaagatacttgggaaatgttggctcatgggattacccttaattattaactgtagtgtaagaaaccctgtgatatccagcatacctcctttccagcctctgtccctccc

SEQ ID NO: 1492 - DNA, 585 bp, Homo sapiens
caggttgatatctgtgcagaagaattggggaataatgcaaagcccgctgttactttgctaggaaacatacatgctgtcactaagcagcttttagaggaacttgataaaacaccatggcagtatcctccagagagcaagtggtggaaaactctgagagaaaaaatgaagagcaatgaagctgcatccaaggaactagcttctaaaaaatccctgcctatgaattattacacagtattctaccatgttcaagaacaactacctagagactgtttcgtggtaagtgaaggagcaaatactatggacattggacggactgtgcttcagaactaccttcctcgtcacaggcttgatgctggtactttcggaacaatgggagttggtttgggatttgctattgcagctgccgtggtggctaaagatagaagccctgggcaatggatcatctgtgtggaaggagacagtgcatttgggttttctggcatggaggtagaaaccatctgcaggtacaacttgccaatcatactgttggtagtgaataacaatggaatttaccaaggttttgatacagatacttggaaagaaatg

SEQ ID NO: 1493 - DNA, 580 bp, Homo sapiens
ggccacatcacttcccactggaaatctctgtggtctgcaagtgcttcccagcccagaacaggggtggattccccaacctcaacctcctttcttctctgctcccaaaccatgtcaggaccaccttcctctagagctcgggagcccggagggtcttcacccactcctactccagtatcagctggcacgggctccttcctgagagcaaaggtcaaggaccccctctgtgaaggctcagcagaggtgggatcccacgccccctcccggcccctccctgccctccattcagggagaaacctctccttcccgtgtgagaagggccagagggtccaggcatcccaagtccagcgtgaagggccacagcccctcttggctgccaagcacgcagatcccatggacatttggggaaagggctccttgggctgctggtgaacttctgtggccaccacctcctgctcctgacctccctgggagggtgctatcagttctgtcctggccctttcagttttataagttggtttccagcccccagtgtcctgacttctgtctgccacatgaggagggaggccctgcctgtgtggga

SEQ ID NO: 1494 - DNA, 577 bp, Homo sapiens
gactataaatatgactatcaggttttcagattatgaaactattatactagcttagtgtttttaatgccaaccaactgaagaaaacatgattcgggtgtttttttctatgtattcatagcaacaataacacaatgagttcgatgctgccatcaatactaatgttactaattctcatggtattttactcagtggatttgaatgtggccatagaatctttctccacacaatatgccagacagccacgtataatcccatgagatttggtattcaatataaaactttacttttttactcaagttatatatattgccaccaccagcagtttttcagctaataaagtatacttatgatttaagtcacttggttaatgtcctcatccctaaagaatatgttaaaacgaatgcttaacttatagtagaagagattttcaatggcagtaatgaaatttccaaaaatgaaatttaatcatgcctcatgcacttctgtagtatatgtaagttttatttatatatcttaacgtaagcatttaagttattaagttatgactagttaaaaggaaatagtagcatagttaatt

SEQ ID NO: 1495 - DNA, 313 bp, Homo sapiens
aattacatcttctttaaagccaaatgggagatgccctttgacccccaagatactcatcagtcaaggggcgtacttgagcaggaaaaagtgggtaatggtgcccatgatgagtttgcatcacctgactataccttacttccgggacgaggagctgtcctgcaccgtggtggagctgaagtacacaggcaatgccagcgcactcttcatcctccctgatcaagacaagatggaggaagtggaagccatgctgctcccagagaccctgaagcggtggagagactctctggagttcagagagataggtgagctctac

SEQ ID NO: 1496 - DNA, 444 bp, Homo sapiens
ggcgaaattccgtctcaaaaataaataaaaaacaaaacaaaacaaagactggatagcagcaccaaagtttagcgaaatgtagaccacaacagctatttaacaattaatcctgaatgatagtaattaagttacacagaaagagaatgccggtgctagtagaagaggaggaaagaaacagggagagtgagggagagaaagagagaagcaaggaacattatctacctatggcttccatctatctgattcactaaggtcaaaaaaattctctcatatcaactaagaaatctaatgaaaccaatcaacactagcttattcctagcatttagctgtgctgaatgctgtagagaaataggaggcgaagtttttctaatttatagtttgatgaaagcaaattagcatgtgtgaaatgtgtagaagacattataagatggcgggcaataattt

SEQ ID NO: 1497 - DNA, 487 bp, Homo sapiens
tttttttcttttttttcgaggcagaaatcactgttaatcttacaatgggtacaagatccttaaaattttttataagcagtatagcctgagattctaatcatgactcagccagcacaatattactgaaccccaaggttgggataccccctcatagcctctgccacatccctatccccaccaaaatgtggtgagaaatgttcccactatagacatagcccacataataaatctggccttcagggacatggagttgagaacagggactttacagtgtggtgagcctggctcaggacagtaggaggcagaggttaaggcaaggggttgcagccacccacccagatcagttttgcagggcaaggaaataaaacagagaaaacagtcatatattcaggcaacataaatgtgggaacaaaacaataaacacctttattacatgggtgaagacaaaacaaggatttatttgcctttgcgggccttgattttccta

SEQ ID NO: 1498 - DNA, 517 bp, Homo sapiens
ttttttttttttttttttttttttagaatatagatgctttatcactgtacttaatatggtgtcttgttcactatacttaaaaatgcaccactcataaatatttaattcagcaagccacaaccaagacttgattttatcaacaaaaacccctaaatataaacggcaaaaaagatagatataattattccagtttttttaaaacttaaaagatattccattgccgaattaagaagaagataagtgttatatggaaagaagggcattcaagcacactaaagaaacctgaggtaagcataatctgtacaaaattaaactgtcctttttggcattttaacaaatttgcaacgttcttttttttctttttctgtttttttttttttttaagactgcctaattcagtttatagccattgtctgacaagagtagcaaaacattatcaataaatagtccttagtttgtacatcattttgttaaaaatgtttgatgtcatccatttttagtgctgcgactgtaaacg

SEQ ID NO: 1499 - DNA, 164 bp, Homo sapiens
cttgacatgtctttgtctgtatttgccattaggtataatgctggcctcataaaatgaattaggcaatatttcctctgcttctgtctttcaaaagacatggaagaaaattggtataattccttccttaaatgtttagtagatgcaacggcctacagcattatgct

SEQ ID NO: 1500 - DNA, 543 bp, Homo sapiens
ttttttttttttttttttttttttttttttagacaaagagggatttattttatttacaagaattctggagaaggatggcggctggtattggcctggtgaaataatgatagggtcaatgactctgtgattctcttggcctttttgtcatggtagcaaagtggctgctgtggctccaggcatcacaccctcaatcaaggtaggaagaagaggcccagggaggtgttagccatgcctgtgtcttttattggaaaagctttcccagaagcccaggtagacttcctcttcaatttcattggccacacctgatcacatagccatcctaagctgcaaaggagactggaacagtgaaaatctggatttacagcctccacagttggagtggctggagatacagagttgggacgacccctgaaaagtgaaccaaggtcgtctgcacggctgccctggagggcgtggtgcttgaggtcccttctacctctggggcttcatggaatgacttgttgcccccatggagcacctctggggaccactgggtgaatcccc

SEQ ID NO: 1501 - DNA, 510 bp, Homo sapiens
ttttttttttttttttttttttttttttgggaatatatatttagggaagatgttgctttgcccacacacgaagcaaagtaaataaagaccacaaatgttcaaattctaagccacttaatagcgttttgtacattaaaaatgacaagggtaattatacaagtagccttttaaaaaattctcacacggaacagctttgtatttagacttaaagctgttgctactttgctagtgacgtttgtgttaacagtcagtgctctaggccattgattgattgattgtcagaatcagaagtgactacacaagagcattagccagacttttcagtgagaacaggtaacaggctggcaccagcacttggtacagcacgtggacaggacgacggaacccagagttctctgtctctccttcacagcagatggactcttctataggtggctgttaatttacacaaagttatattccagaatcaggaagccccgcagtcgccaacacttgaaggagaactatgtt

SEQ ID NO: 1502 - DNA, 555 bp, Homo sapiens
ttttttttttttttttttttttttttgaagaagtaagcctttttttccttgttttgcaaataaaactggctaagttggttgctttttggtgattagtcaaagagaccaaatcccatatcctcgtccgactcctccgactcttccttggcttcaaccttagctggggctgcagcagcagcaggagcagctgtggtggcagcagccacaggggcagcagccacaaaggcagatggatcagccaagaaggccttgaccttttcagcaagtgggaaggtgtaatccgtctccacagacaaggccaggactcgtttgtacccgttgatgatagaatggggtactgatgcaacagttgggtagccaatctgcagacagacactggcaacattgcggacaccctccaggaagcgagaatgcagagtttcctctgtgatatcaagcacttcagggttgtagatgctgccattgtcgaacacctgctggatgaccagcccaaaggagaagggggagatgttgagcatgttcagcagcgtggcttcgctggctcccactttgtct

SEQ ID NO: 1503 - DNA, 498 bp, Homo sapiens
ttttttttttttttttttttttagggttgttgttgggctttttttgtttgtttgttttggtttttggttttcttgccgtggtgcaaaactgtagaaagttgcttactcactggccttggttccattgaagtctgcgtctcgagtgtccgtttcctcctcagaaccatctgcatttcaataactctacgtcctccagaccttctagaaggaacgaaagaggtctcgtttcctcgcctggtgcatcaccgcgaagtttcctgtggggggggccctctgagcttgctcttgagtgcgttcacctcgcggcccatggcctcgttgctctccgtggcctcatccagctcccgctgcagcttcctgcggttggcgttgatgcgctgggactcctcctctgcctcctccagctgcctcttgagctgcttgaccctggcattgcctttctctgcctgctccttgtactgctcggccatcttgcgctcgtcctccacctgcagcaag

SEQ ID NO: 1504 - DNA, 556 bp, Homo sapiens
tttttttttttttttttttttttggatactgactttattgtcaaatgtggaaatattttgttaaacaatactgagatgatagtagtacttagggtaagcattaacaatattattcaaaatgttatatagagttcaactgtatacaatagagcatttattaaagtgtgtccaaagcgcttataaataaagcatcttcgaggcaggcggctcacttgaggttaggaggaaagcagactggccaacatggtgaaaccccgtctccactgtggtcccagctacttaggaggctaaggtgggaggatcacttgaggacaagaagttgaggctgcagtgagccaagtgtttgtgcaattgctctccagcctgggtgacagagtgagactctcaggaagccgcagtgttagttgcctctgatttttgacaagcatgggaagatgggggctgttcatacagggcaagcttcaagtgtccagtcaaataaaaacatccttgcacgtcctttagggaactaccagcaggtcaaataatgacagttctctgggaatggggcattgaa

SEQ ID NO: 1505 - DNA, 537 bp, Homo sapiens
ttttttttttttttttttttttttgaaatgcagaaatatttattttggtttccttcattgtttttggaaattttgttttggtttataaaacatagaaatagccaacacttaaagcaaacattcaaaaccccaaggtgacaaattattgactttttgtgcaattaagaatacatatatgaagttaggctaccaagtagtgttattacaatgacaattctttagtgcaagccctgttgtgcttgtatataatacatgtactctcacagaccccaaaacagctgctttaaatgtacaaatgacagctcaattcagtcaaatgtggcaaagactcacaataaagtgaactgctgttaatttcccaaattaactttaaaaaatccctggagaagtgaatcccaggaaatgaactttccagatttctacatcctagaattttggcttgtcaaacacatttcatagaaatcaggtagcattataagaacatttgcttattactgtccatttcaataagtactcaagtatatactcccttaatag

SEQ ID NO: 1506 - DNA, 535 bp, Homo sapiens
tttttttttttttttttttttttttttctcaacttgtctctttgaatccaaaaccacttcggaactgggggctggtgtctgggacttgctgttaccaagcacgtttcccttcccttgtggcacctctgtgtgtggcaggcctgctgcctgcagcctgggctgaggctcactgagggcttggagctgctgtctctggtcgttgttttcactcaggtctctggaagctacagctacattcccctttttggtgacctcttctattcgctcctcacactgttccttcacctccttcatctgattgatgcactggctcaggtcgtaggagaacttcctctccaggttggtctggttcttctgaaactggaggacatcctgctgcagcctgccgtaattcctctgcagggtctttaactggtcttgcagcactcggatgagcctctcacctgtggtgatgttattcaccaaaaccgccttttcgtcctggtacagcttgttgacgctctccagctggaagttgtggctggactggattttg

SEQ ID NO: 1507 - DNA, 342 bp, Homo sapiens
ttttttttttttttttttttttttttctttttttttttttttttttcacagtataacagctctttatttctgtgagttctactaggaaatcatcaaatctgagggttgtctggaggacttcaatacacctccccccatagtgaatcagcttccagggggtccagtccctctccttacttcatccccatcccatgccaaaggaagaccctccctccttggctcacagccttctctaggcttcccagtgcctccaggacagagtgggttatgttttcagttccatccttgctgtgagtgtctggtgcgttgtgcctccagcttctgctcagtgcttcatggaca

SEQ ID NO: 1508 - DNA, 481 bp, Homo sapiens
tttttttttttttttttttttttttttttttttggagacagggtcactgtcacccaggctggagtgcagtggtgcaatcatggcccactgcagcttcgacctcccaggctcaagtgatccttccacttcagcctctcaaaatgttgggactagaggcataagccaccatgccaggcccattcaattctttatatgcgtcttacatatgtctgtagctggaaaatatacctgaaagcacaacattcatatatacagtatagcaaaacatggctgaggaaaaatctcaaaaatcacagcgctatgaaaccatgatcaccaagttcataaggccccagaatggtgctacaattttaatgtttccctaaaatgtttggtctcatctccctctaaacgatttcagtcttcttcactctcctcaaacctctaaactctctggtagaaactgcattcttaatacattaaatgtcttgatatggaaact

SEQ ID NO: 1509 - DNA, 398 bp, Homo sapiens
ttttttttttttttttttttttttttgctcaagcacagtttatgcaacaaaatgtgattcagaatctaatttcacaaaataaatccagaggagagacttgagggaaaagggcaaagatgtaactcaataaagtccatagcatcacagaataagatgatggtgatggtttctaaccttgagaatgtctaagtgggttcttcagtttctaaaatttatttatctgttcttgaacccaagaaatcagaatagatcgtaacagaaaaaaaatgacctagctttcacctagacaagttagaaaatgcagaagtagcctggcagaagtacaaccatctgacctttgacaaaaccacagaaataagaaagaaaaggctcactatgcgatgaatggcactgggata

SEQ ID NO: 1510 - DNA, 645 bp, Homo sapiens
tacggccgggtcttttaaagaggccgggaatacacatgactcaggtgctcttttgaaacgactacaaaagtctccattttgatcaaaacgttttctccgaatgaatggctccgatgctttctctttcccatcttaagtccccgctctgtgcctcagaatagtctgtgtccaagaaaataagaatcacgtcatctagctgtggacactgagcaaaaaggagcagcatgctattaagatggttgagacacacgagtgaacaaagatgggacaaactgtgcttcgttcaagaggtttcatcaagacccctaccgccccccgtccttcagctctgtacagtaactttagctttacatagagctgagataaaaataaagctttcttacaaattacatttttttccagtgaattacttttgcagtaaaaatagctgctacataaatccctcctgatctctgaaaaggagttgcatatttccaaaaataatattcttattttaatcacacagaagaacgtggagcacaggaaggaaatggctggctggtcagggagaggtgagctgtcggagaaacacagtaaaactaaaaaataaaatccattttgtgtataaactgacttaaacgcatgcaaagaagtggaaaacatatg

SEQ ID NO: 1511 - DNA, 575 bp, Homo sapiens
tacggccgggcattgttgagggaggaattatgtcctatgtgtttgtagtaacagaatccacagctaagaaaagacaagctcaggagggaagtccttgggtagatgctaaagcgccttctctttgttctttgtgccggaagctataggtttctaattatgatggcaggagaagtgtccttatgaagtgtgtcgctgtgtataaaaatatctctatgttttgttattgctgtgttctttgtgtgatagatgttattaggagcacactctgtcctttccaaggacgtaatctgactgttttctgtttcctcttcttttttgctttgctttccaacctgatgatgtgctgctgtgttctgttgcaatgaaattccttcatctgtttcacatcgcaacaaaaaggtaaggaactgcaaaccgtattaacatgctgaaacagcaccaacttatataacatgcaaaaggagatgcattttaatcactgggaatttttttactttaagagaaaaagtgatggattgtgaggacctcaattctcgtattggtgtttggctgatggatttcacatctcctggggc

SEQ ID NO: 1512 - DNA, 424 bp, Homo sapiens
agcgggcagggaaagccgcgggaagggtactccaggcgagaggcggacgcgagtcgtcgtggcaggaaaagtgactagctccccttcgttgtcagccagggacgagaacacagccacgctcccacccggctgccaacgatccctcggcggcgatgtcggccgccggtgcccgaggcctgcgggccacctaccaccggctcctcgataaagtggagctgatgctgcccgagaaattgaggccggtgtacaaccatccagcaggtcccagaacagctgtcttctgggctccaattatgaaatgggggttggtgtgtgctggattggctgatatggccagacctgcacaaaaacttagcacagcccaatctgctgttttgatggctacagggtttatttggacaagatactcacttgtaattattcc

SEQ ID NO: 1513 - DNA, 561 bp, Homo sapiens
tctggagatggtgtcacccacaatgtccccatctatgagggctatgccttgccccatgccatcatgcgtctggatctggctggccgagatctcactgactacctcatgaagatcctgactgagcgtggctattccttcgttactactgctgagcgtgagattgtccgggacatcaaggagaaactgtgttatgtagctctggactttgaaaatgagatggccactgccgcatcctcatcctcccttgagaagagttacgagttgcctgatgggcaagtgatcaccatcggaaatgaacgtttccgctgcccagagaccctgttccagccatccttcatcgggatggagtctgctggcatccatgaaacctcctacaacagcatcatgaagtgtgatattgacatcaggaaggacctctatgctaacaatgtcctatcagggggcaccactatgtaccctggcattgccgaccgaatgcagaaggagatcacggccctagcacccagcaccatgaagatcaagatcattgcccctccggagcgcaaatactctgtctggatc

SEQ ID NO: 1514 - DNA, 592 bp, Homo sapiens
gggaagcagacacaatggtaagaatggtgcctgtcctgctgtctctgctgctgcttctgggtcctgctgtcccccaggagaaccaagatggtcgttactctctgacctatatctacactgggctgtccaagcatgttgaagacgtccccgcgtttcaggcccttggctcactcaatgacctccagttctttagatacaacagtaaagacaggaagtctcagcccatgggactctggagacaggtggaaggaatggaggattggaagcaggacagccaacttcagaaggccagggaggacatctttatggagaccctgaaagacatcgtggagtattacaacgacagtaacgggtctcacgtattgcagggaaggtttggttgtgagatcgagaataacagaagcagcggagcattctggaaatattactatgatggaaaggactacattgaattcaacaaagaaatcccagcctgggtccccttcgacccagcagcccagataaccaagcagaagtgggaggcagaaccagtctacgtgcagcgggccaaggcttacctggaggaggagtgccctgcgactctgcggaaata

SEQ ID NO: 1515 - DNA, 552 bp, Homo sapiens
taactttgaatccagatcccaatgagattaaaagctattgttatgtgtcaaaggaagaactaaaagaacttctgaaaaaagcagccagtggtgaaattaagataacgccatggtttaaaattattgcagcgacttttctctttaaatggtgggataacttaaatcatttgaatcagtttgttgaccatgagaaaatatacagaatgtgaatatgtaggtaaatgattacagaaaaatttatctgcttaacaaacttagaatgactttttccttttaaatttagttctatcattaatttatcattaaatttagttctatcatttggtactatcattaatgtattatatacactgatactttaaaacttgtgtggaaaaaactaacttataattttgtatcacacaccctggatatgtgttctgtttctaagcgacatttgtgagagattattgtaaaatgagagcgagcaaataaaacttaatttaatctttgcagatacatacttatgggaaatttgaacaaatgagtgaaactctgtgtttttagtaggct

SEQ ID NO: 1516 - DNA, 564 bp, Homo sapiens
aaggaattggcgatgttttatggaacctacacaattctcatcaaacactaatcttcaccgggtctatcattattgtttttgttctgtaattgctatttcagatgcttcccttaaagataatattggctaatattcataaagtagttttccaagatgaaagttgagagcttcatctctgcaggcacactgcctagctctaaatccaaagtccatcccatactgctacaggaatttaaacaagttacttaccttcctcaagccttgattgcctataaatggagatactaatggcacctaccctgcagaattcatgtgaggatggaaacatataatctatgcactatgcttagcagagtgtctgtacagaacacacactgttaaatggtaactgttattaccatgattagtttgcaaagcactttcacgtatagttgctgcaaactaatgtgcactattttgttgtcatttgccagatagatcattaacacattattgtttcacctcaatccctccttatatgttaaatctaaatgttattcaactacaaaattttaaaaatatctg

SEQ ID NO: 1517 - DNA, 542 bp, Homo sapiens
ataaattctcattgtatcctcccatctgtccactgaggaagattatcaaacggatcttcatccaatggatgcataaactttcctacttacttgtagtggcaaagctggctttcaagtacaagtttgttggctccattacctatgctcctattatccgcttctgtcccgcaacaaagtagctcacttaggcgtatgaccacatgcattatgatagtttcccaccaccatattgaataataaaagctttggccaaagcttttttaaagtaggagaaacattggatgtatatgttttgcattgccttttgatttcaaattaatcaggaagaattagtgattttaatgagcagtaaagtggtgcaataaagcagaaagaaaaatgttcagccagaagtgaaagactagtaaaaaaagaaaaaaaatatttgtacatatgatctaatttagaaagtccagaattggcttcatacagaaaagtgattactttcattgtacaaattactttaaaattttggtaaagtttctgttaggcttctggtctac

SEQ ID NO: 1518 - DNA, 665 bp, Homo sapiens
agtggtgcacatcagtagtcccagctactcaggaagctgaggccagaggatcgcttgagcccacaaggtcgagtctgcagtgagccgtgatcaaaccactgcactccagcctgggtgacagagcgagaccctatctctaaaacagaaaataataggactgttgggccttggcatagctccttttcttctatgcacaaagagacagcttcatacaaaagagaacacagtgaccacccagagaatagtaaccttatcctcttttcctctttgatattgttcagaggatcatagatgatactggttaaaatgctcaaagagcctctggatcatccgagacagactcacagttcttggtcctcttcctccaggcctcattgtcttactgcttccatgttaaagcacccagacccttgtccagaacttttatagcaagataaaagatcccttccctgagcaacttcctcctgctttgggacacatcttccctcagggcacaatctgtcagacactcgctcgcctggcctgctgtctcccctcccggcctgatgttggatttcagtaggttgcagctaatgttgaatatatttcagatgctgtaccctctctgtgaactatgaagacatgattagcagatacaattagctactttagcattaaaaaaaaat

SEQ ID NO: 1519 - DNA, 575 bp, Homo sapiens
acatgttattgtcagttttgaagaaactacaacttaatatgtgtggcttatgtactaggcattcctgacttctcatcgagtgcctcctgtgacttgtcctaccttttcctccaaaactaaaatctaattattcttaacaaacatatcctgtatgcctttttcccaccaagttttctgaagaattgtttttattataattatttagtgctttattaaagtgggcaattaaagcattttaaatgcctccatcatcaatctatatgtttatcttatgaggcattaacaccactttacttttatacagcagtttgcagtttacagcttgaaacatgtgtaccccaaaaatagcacattgccttttcatcagaatagggatatctaatttaacaatagtcaccacatacagtgaagcagtgagaagactggccttcaaaccagtaatcttcattttctacggaagtgcccaagcctggctttcctctttgcctttatgcagttggaccattgagttcaccagattgcaccccaaactccattattttgctttgagcaaggactgagagttagtgtagact

SEQ ID NO: 1520 - DNA, 694 bp, Homo sapiens
  misc_feature 108, 128: n = A,T,C or G
gccggggcccctcgttatagaaatttctttcatagtatttatcccatgaaacctgtgtgcaacacagcagaggtccaaagtaggtaagtacagatccagaaaagtcantggaaaatagggccaatggngaaaaaaaacccctaatcattgaccaggccatcaagctgtcattagtgactttgcaggatgtgttaaagaggcctcctattcatctcacaactcaaaacagacatgctctccgggaaagtggcctgatattcatgttgatgccttgacttctcccagtgcataagcttcccacttgtcattggatgatcccaaattcactgttcctttaatgccattgaattctgaccatagggagcaccaatggtagcttcagcttccctgaaacaagcttcccgttcctgaatttcctctcactcttgagtccaggcccaggtgcctgagagaggcatttgccacagctggccatacagttgactttatcgagtcaacatctgtttctagagggcacagcacttagccccaggactcagcttggtgcccaacgctgagcttccagttattgcaccgctaggggcaaatgatgtttttcttcctatccagtgaagtgggctcctatttggcaaggaaggaaaatgaacaactttaattccttcctaacttttttcataacaactctcttaattct

SEQ ID NO: 1521 - DNA, 566 bp, Homo sapiens
  misc_feature 111: n = A,T,C or G
tgttacatagagggaaaaggactgggatagaggacagactgatagtttctttctttcatatcacacgtatagagaaataattatatcagaaactcacaaacctagacatgngaaaaacagattactgtctattgtcagcatcattttcatctgtaagtcactactggaatatatttttcttttaatttccagtgactttagaatacacacagtttttccgacttttcaaaaatttgattaaatggttttatagtataatattgggaccccataccgttagcccttgtatgtataccaacactgccaaagtaaacattaggtcaggcatggtggctcaggcctgtaatcccagcattttgggaggctgaggcaagtggataacttgaggtcatgagttcgaaaccagcctggccaaaacagtgaaaccccgtctctactaaaaatacaaaattagccagatgtggtggcgcacacctgtaatcccagctactcaggaagctgaggcaggaaaatcgcttgacctgggagttggaagttgcagtgagccgagatcgcaccactgcact

SEQ ID NO: 1522 - DNA, 609 bp, Homo sapiens
ccgagcttgcggcgaccacgagcaatggactcttgtggctgacttcactcaccatgctctcactgcctccttgtcagcagtagctgtaaatagtcgttttgtggtcactgggagcaaagatgaaacaattcacatttatgacatgaaaaagaagattgagcatggggctctagtgcatcacagtggtacaataacttgcctgaaattctatggcaacaggcatttaatcagtggagcggaagatggactcatctgtatctgggatgcaaagaaatgggaatgcctgaagtcaattaaagctcacaaaggacaggtgaccttcctttctattcacccatctggcaagttggccctgtcggttggtacagataaaactttaagaacgtggaatcttgtagaaggaagatcagcattcatagaaaatataaaacaaaatgctcacatagtagaatggtccccaagaggagagcagtatgtagttatcatacagaataaaatagacatctatcagcttgacactgcatccattagtggcaccatcacaaatgaaaagagaatttcctctgttaaatttctttcagagtctgtccttgcagtggctggagatga

SEQ ID NO: 1523 - DNA, 555 bp, Homo sapiens
  misc_feature 487: n = A,T,C or G
tctactttttcccttatttgaattttttgtagtggaagattccaaagacattcaaaaatttaaaaagaaaataaatattacggacccccatgtagccattgtccagtttaaccagttatcagcgtttagccagccttgtttccttagctctgcctgtccctcttgttctggaatactttaaggcctgtcctagacaacacgtcacttcactcatccatacttgaacatgtgtcctgacagatgaagactgtaaagaatataatcatgtggtgctgccatcagagccaaccaaattagctgttcattcctgatgtgacgattgggcctaaggcagccttcctcagcctcagcactgttaacgttttgggacagatgattctgcgctgtcggggcagccctgtgcattctagggtttcagcagcacccctggcttctacccactgaagccaatactagctccccaagttgtgacaatcaaaaatgactntttgggttgggcgccacagctcacgcctgtaattccagcactttagaaggctgaggtgggaggatcgc

SEQ ID NO: 1524 - DNA, 562 bp, Homo sapiens
cagcactctcgggacgtctccaccatggcctgggctctgctattcctcaccctcctcactcagggcacagggtcctgggcccagtctgccctgactcagcctgcctccgtgtctgggtctcctggacagtcgatcaccatctcctgcactggatccatcagtgacgttggtggtcataactttgtctcctggtaccaacaacacccaggcaaagcccccaaactcatgatttatgatgtcactaatcggccctcaggggtttctagtcgcttctctggctccaagtctggcaacacggcctccctgacaatctctgggctccaggctgaggacgaggctgattattattgcagttcattttcaggcaggagctctctcgggctatttggcggagggaccaagctgaccgtcctaggtcagcccaaggctgccccctcggtcactctgttcccgccctcctctgaggagcttcaagccaacaaggcccacactggtgtgtctcataagtgacttctacccgggagccgtgacagtggcctggaaggcagataacagccccgtc

SEQ ID NO: 1525 - DNA, 488 bp, Homo sapiens
cgcagggcttctgctgagggggcaggcggagcttgaggaaaccgcagataagtttttttctctttgaaagatagagattaatacaactacttaaaaaatatagtcaataggttactaagatattgcttagcgttaagtttttaacgtaattttaatagcttaagattttaagagaaaatatgaagacttagaagagtagcatgaggaaggaaaagataaaaggtttctaaaacatgacggaggttgagatgaagcttcttcatggagtaaaaaatgtatttaaaagaaaattgagagaaaggactacagagccccgaattaataccaatagaagggcaatgcttttagattaaaatgaaggtgacttaaacagcttaaagtttagtttaaaagttgtaggtgattaaaataatttgaaggcgatcttttaaaaagagattaaaccgaaggtgattaaaagaccttgaaatccatgacgcagggagaat

SEQ ID NO: 1526 - DNA, 563 bp, Homo sapiens
aaatgaattacaacttaaatacatgttggaagtgtaacactgtttttcaaggtttaaaaaaaattcctaatgccttttagccttctttaatatttttaggtaaggaaagtatgtttggattttttcctctttgttaggtatatgagattgaaatgtgaagtatttggacaacaaacgtcaagcaatgggaagccattttgatttcttgagtaatcttgtaagcattaagtgaatgacaaagtagtagtgtaacttatttcttatgttataacttcagtcaattaatataaggatagtttttgttgtatgttcactaagtggttaatataatagccattgaatatactaatctttcatcttagagaactatacaacttttattgtttcttaatggaacattctggctaaccagaaaaagtgagaaaagtagtaccttgggatgtgtagtcaagatgacaaattttaagactggaaaagctctaaacaggcttaatgattcttcaggtagaatgatcctgagaagtgatgtttgatggaataaagtgcatgtgatgattaagtga

SEQ ID NO: 1527 - DNA, 445 bp, Homo sapiens
cctgcaacttccctaaaaattgaatgaattgtaaaacagacctatggaatttcaaacctgaacaatcagggggacaacttcttgggactttgggtattctgaaattactcatcttgactctactgggcctggatgtacctgggtgttttgggggtatcctgttcatggccaatgggggcagagtctacataaaactatgcttcggggggttctggggaaaacctttcgacttgttggctatactattcaatatggctgtatagctcattgggcttttgaatacgttgggggggttgccatgtgttctggaccatcaatggagcctacaattcaaaattcaaatattgtctttgcaaaaaatcttagtcgacatttttatggtatccaaagaggtgacattgtgattgcaaaaagcccaagtgatccaaaatcaaatatttgtaaa

SEQ ID NO: 1528 - DNA, 558 bp, Homo sapiens
tgtgggcagctgaggccactggcgtgtctcagccaggcatctggggggccagcggaaccaggggccagcagggctggtggcagaggcagcactcaggttggccactgggggcctggccaccctcaggggtggccctctgaggtctcagggctgcgtgcctgtagggagtccactacccccagcccagggctgcctgctggcaccgtggcaaggcccaacctgaggggcttgcagggagctggcagcaggcttggaggactgggtctgtggggcagtgtggacacggcagagtgcaggaatgtgctgggaggaagtcagacagccgcgagatgaagagttcgtgcaccccatctgagtgcctggcccagggcctgaaacccgccctcaggggcctctctcctgcctgccctgcctcagccaggccctgagatgggggaaaacgagcagtctgctctgctgctctgaccttccagagcccaaggtcagggaggggcaaccaactggccccagggggatatgggtcctctggggccttcgggaccctgggcaggggtgctt

SEQ ID NO: 1529 - DNA, 572 bp, Homo sapiens
tgacagcattcgggccgagagtctcgctccgtggccttagctgtgctcgcgctactctctctttctggcctggaggctatccagcgtactccaaagattcaggtttactcacgtcatccagcagagaatggaaagtcaaatttcctgaattgctatgtgtctgggtttcatccatccgacattgaagttgacttactgaagaatggagagagaattgaaaaagtggagcattcagacttgtctttcagcaaggactggtctttctatctcttgtactacactgaattcacccccactgaaaaagatgagtatgcctgccgtgtgaaccatgtgactttgtcacagcccaagatagttaagtgggatcgagacatgtaagcagcatcatggaggtttgaagatgccgcatttggattggatgaattccaaattctgcttgcttgctttttaatattgatatgcttatacacttacactttatgcacaaaatgtagggttataataatgttaacatggacatgatcttctttataattctactttgagtgctgtctccatgtttgatgtatctg

SEQ ID NO: 1530 - DNA, 578 bp, Homo sapiens
ggagcggcacctggaagatgcgcccattggctggtggcctgctcaggtggtgttcgtggtcttcgcctccttgtgtgcctggtattcggggtacctgctcgcagagctcattccagatgcacccctgtccagtgctgcctatagcatccgcagcatcggggagaggcctgtcctcaaagctccagtccccaaaaggcaaaaatgtgaccactggactccctgcccatctgacacctatgcctacaggttactcagcggaggtggcagaagcaagtacgccaaaatctgctttgaggataacctacttatgggagaacagctgggaaatgttgccagaggaataaacattgccattgtcaactatgtaactgggaatgtgacagcaacacgatgttttgatatgtatgaaggcgataactctggaccgatgacaaagtttattcagagtgctgctccaaaatccctgctcttcatggtgacctatgacgacggaagcacaagactgaataacgatgccaagaatgccatagaagcacttggaagtaaagaaatcaggaacatgaaattcaggtctagct

SEQ ID NO: 1531 - DNA, 557 bp, Homo sapiens
ctcaaaattccagcaatgaccattgctaagaatgcaggtgttgaaggatctttgatagttgagaaaattatgcaaagttcctcagaagttggttatgatgctatggctggagattttgtgaatatggtggaaaaaggaatcattgacccaacaaaggttgtgagaactgctttattggatgctgctggtgtggcctctctgttaactacagcagaagttgtagtcacagaaattcctaaagaagagaaggaccctggaatgggtgcaatgggtggaatgggaggtggtatgggaggtggcatgttctaactcctagactagtgctttacctttattaatgaactgtgacaggaagcccaaggcagtgttcctcaccaataacttcagagaagtcagttggagaaaatgaagaaaaaggctggctgaaaatcactataaccatcagttactggtttcagttgacaaaatatataatggtttactgctgtcattgtccatgcctacagataatttattttgtatttttgaataaaaaacatttgtacattcctgatact

SEQ ID NO: 1532 - DNA, 583 bp, Homo sapiens
gtttgagtcatgagcatgctgttgtctagagtgggcggggatgacgtggttggagtgggtgcgctgctctgtacttgatttttttgagtctgaaattagctttccaggctggggcagggaggggagcacaggtggatcagtactgcccccaagcggtggagctttggtggtggatcaaatactgctgccgcctgtctgcacaaacatatttctctcttccagcccttcagaagtgtattggaatatgtcgataacaataatgatggtggtgaagatgatgatgatgtgggtaattctggctaccttattgggtccaagctccccacaattcgttgcacaaagcactctacatacattctctttagtcctgatcaaaccacctttcagagtaggatttagtgtcctattttaaagatgaaggagctcgggctcagagagagatcgtttagacacacacacaactttggaatgaaacatttacagccgggcgcggtggcgcgtgcctgtagtcccagctacttgggaggctgaggctggaggatcgcttgagtccaggagttctgggctgtagtgcgctatgccg

SEQ ID NO: 1533 - DNA, 569 bp, Homo sapiens
gccggggggcttcctgagctgacagcattcgggccgagatgtctcgctccgtggccttagctgtgcgcgcgctactctctctttctggcctggaggctatccagcgtactccaaagattcgggtttactcacgtcatccagcagagaatggaaagtcaaatttcctgaattgctatgtgtctgggtttcatccatccgacattgaagttgacttactgaagaatggagagagaattgaaaaagtggagcattcagacttgtctttcagcaaggactggtctttctatctcttgtactacactgaattcacccccactgaaaaagatgagtatgcctgccgagtgaaccatgtgactttgtcacagcccaagatagttaagtgggatcgagacatgtaagcagcatcatggaggtttgaagatgccgcatttggattggatgaattccaaattctgcttgcttgctttttaatattgatatgcttatacacttacactttatgcacaaaatgtagggttataataatgttaacatggacatgatcttctttataattctactttgagtgc

SEQ ID NO: 1534 - DNA, 66 bp, Homo sapiens
ctttaacctccctttctcagaaactgctttatccaggctcgaatagtataattaccatatgtcaac

SEQ ID NO: 1535 - DNA, 560 bp, Homo sapiens
tacggccgggaatggaaggttggcgaaattgagtttgaagggcttatgaggactctggacaacttggggtatagaacaggctatgcttacaggcatcctctcattcgagagaagcctaggcacaagagtgatgtggaaatcccagcaactgtgactgctttttcctttgaagacgatacagtgccactctctcctctcaaatacatggcacagaggcaacagcgtgaaaaaacaagatggctgaactcaccaaatacttacatgaaagtgaatgtgcctgaggagtctcggaacggagaaaccagtccccgaaccaaaatcacgtggatgaaagcagaagactcatctaaagttagtggtggaacacctatcaaaattgaagatccaaatcagtttgttcctttaaacacaaacccgaatgaggtactagaaaagagaaataagattcgggaacaaaatcgatatgacttgaaaacagcaggaccacaatctcagttgcttgctggaattgttgtggataagccaccttctactatgcaatttgaagatgatgatcatgg

SEQ ID NO: 1536 - DNA, 287 bp, Homo sapiens
gtatataaagcaaagaacaacacagtcacttcctggcggcaaaccaaacaaaaccagagtcatctggggaaaagtaactcgggcccatggaaacagtggcatggttcgtgccaaattccgaagcaatcttcctgctaagggcattggacacagaatccgagtgatgctgtacccctcaaggatttaaactaacgaaaaatcaataaataaatgtggatttgtgctcttgtatttttaagtggattaaaaaacttactacctgaaaaaaaaaaaaaaaaaaaaaaaaa

SEQ ID NO: 1537 - DNA, 113 bp, Homo sapiens
tttttttttttttttactaaacgagaattgactgtttattcgtgcaaaaaaaaaaatacttgctgttactgcaatccacccactggtctggtgggcggccagccatttatctc

SEQ ID NO: 1538 - DNA, 434 bp, Homo sapiens
tttttttttttttttttttttttggcgtggtgttaaacaatggttttgttctctgccttataaattgtgggattctagaggagtctgcttttctcccaagaagtacctcttcttttcttgcttttcatatgctctccttgagatatcttggttattctcatggctttaaatagcacttatatccagaagactcataaatctgcaatctaattatggcatctccagagttctgtattttaaaagttagcagaatctttaacgctgtggcaaagtttctggttttaagcgtaaaggtagtaatgagacatgaaaatacagtgaagcaatcaaacctgtaatttagaaaaataattgacagcattttggagaacaaagctccttgctgcatgtggtgaataaaaagtaaataaaatactgtggctacccctgaggga

SEQ ID NO: 1539 - DNA, 525 bp, Homo sapiens
aaatgaaatattgtcaagagtttcagatagaaaatgaaaagcaagctaagacaagtattggagaagtatagaagatagaagaatataaagccaaaaattggataaaatagcactgaaaaaatgaggaaaagataaaaggtttctaaaacatgacggaggttgagatgaagcttcttcatggagtaaaaaatgtatttaaaagaaaattgagagaaaggactacagagccccgaattaataccaatagaagggcaatgcttttagattaaaatgaaggtgacttaaacagcttaaagtttagtttaaaagttgtaggtgattaaaataatttgaaggcgatcttttaaaaagagattaaaccgaaggtgattaaaagaccttgaaatccatgacgcagggagaattgcgtcatttaaagcctagttaacgcatttactaaacgcagacgaaaatggaaagattaattgggagtggtaggatgaaacaatttggagaagatagaagtttgaagtggaaaactggaag

SEQ ID NO: 1540 - DNA, 461 bp, Homo sapiens
gtttgtgcgcccgtcgcaggtcgcaggcctctttgtcagctggagttgcgcgggctgacgcgccactatgtagcgggtttcgggcgggccacgcgtgcgggacaggaacccaaccccagccgaccttgagctccaggagttcgtctcttacgtctgcggaagtgcagctgcctcagttcttaacgcaggttgacaactacaggcacaagccattgaagctggtatgtcctgttgctggtatttcaattgacttaagccaactatcccttcagttacaataggaaagtgcctctaataaggccaaatatgcgtactaacttgtagcgaccacgtgtccgtgcagtgccacaggagctagagcagtgacaatgctggtggcaacagggcagtgtagcaggtgcttcatgttcaccttttcaaccttttcatttaattgtcacaactcggaggtggattctgtt

SEQ ID NO: 1541 - DNA, 540 bp, Homo sapiens
aaggaagggctgtacagttgatgccaggcaaaaacaggcacatatgtgtgtcttctgcctctccccagatcctgtacttcaccaatggccatctgtatccaactggttctaagtcaaagcgggtcagcctgcttcaaaacccccccacagtgggggtggccacactgaaactgactgacgtccacccctcagatactggaacctacctctgccaagtcaacaacccaccacatttctacaccaatgggttggggctaatcaaccttactgtgctggttccccccactaatcccttatgcactcagagtggacaaacctctgtgggaagctctactgcactgagatgcaactcttccgagggggctcctaagctagtgtacaactgggtgcgtcttggaacttttcctacaccttctcctggcagcatggttcaagatgaggtgtctggccagctcattctcaccaacctctccctgacctcctcgggcacctaccgctgtgtggccaccaaccacatggcagtgcatcctgtgagctgac

SEQ ID NO: 1542 - DNA, 517 bp, Homo sapiens
acaagccagcaactctctttgcattaaaatttcaaagtttaattaatataattaaaagcaacagcaagcagcagcctgtgaagattttgctcatcttttttatgccttttgacattgaatgacctattactgtatgcgcattacttggattttgaggggcactctaccttggttatgattcagtagaggaaaaagaccacctttcttcaatttacaaattaaatcttctggagggtcgctatcacaaaacattgacgatgtatgtattataattttttagaaaaaccaccatcgtgtcacgtcgacgatgccaaattatgttagcgtgagcagaaacaccgtgggggaggaaggcagcagctgaagaaaaaagctcaaatgatctagtcactttcgatactgtacttcagatgcgaaatggatattcgagtggaaacctgacaaagtgcgcctgctttgatgtgaactggtatagacaatgaccagtggctgggtcagtgggatgtctctctgtgag

SEQ ID NO: 1543 - DNA, 326 bp, Homo sapiens
acatgtctttttttttttttttttttttttttttccgagttttatgatttatttaacttgtggaacaaaaataaaccagattaaccacaaccatgccttactttatcaaatgtataagaagtaaatatgaatcttatatgacaaaatgtttcattcattataacaaattgccaataatcctgtcaattatatttctaaattttcccccaaattctaagcagagtatgtaaattggaagttaacttatgcacgcttaactatcttaacaagctttgagtgcaagagattgaagagttcaaatctgaccaagatgttgatgttggata

SEQ ID NO: 1544 - DNA, 574 bp, Homo sapiens
tttttttttttttttttttttttggccattgtcataattttttattatgtatcaaattgtcttcaatataagttacaacttgattaaagttgatagacatttgtatctatttaaagacaaaaaaattcttttatgtacaatatcttgtctagagtctagcaaatatagtacctttcattgcaggatttctgcttaatataacaagcaaaaacaaacaactgaaaaaatataaaccaaagcaaaccaaaccccccgctcaactacaaatgtcaatattgaatgaagcattaaaagacaaacataaagtaacttcagcttttatctagcaatgcggaatgaatactaaaattagtggcaaaaaaacaaacaacaaacaacaaacaaaacaaaacaaacaaacaaaaaatcccaccaatcttcatgggtaaactttcctgctcagggatgtaagctgactctagaccatcccgcggttcctgcggatagcacagcacaagatcatactgaagatcatgccaaatatcatgaccacggcaatgccgatgcccactgcgccgatgatgtggaatttatt

SEQ ID NO: 1545 - DNA, 573 bp, Homo sapiens
attggtgtttctactgtaatgcattttggaacaattgtctttggcaagtcagctaactctcagtgcttcagaaatgttcctccgtgattaccaagccaatacacatgcctgaataatgagagatgtgttactgaatggctgataaagattgacaagggaatgcaaggagcaatacacagtatgctcttgccagtagataattggtctgcccacaacatactcccacacttggatcatgtaggggttgagtttttcccattgaactacacagccattctgcagccattggatcagggtacagttggcacagtgacagctcacttctgaaagcagttggaacaactctttctaaatgtagagtatgaagagaaaaatggagaaaagcaacatgagtaagccattgacatgattgcagagacttggtgatctataaagttatctgtaatcatgaaatgttagcaaaacacaggcatgattcctgtggagtcccctgaggtcctcctgtaagaagactgcaactaaatgtggtatttgaaccaatctagcactcaactgctgctgtcattgatgtct

SEQ ID NO: 1546 - DNA, 559 bp, Homo sapiens
tggagctgccagagtaaagcaaagagaaaggaggcaggcccgttggaagtggttgtgacaaccccagcaatgtggagaagcctggggcttgccctggctctctgtctcctcccatcgggaggaacagagagccaggaccaaagctccttatgtaagcaacccccagcctggagcataagagatcaagatccaatgctaaactccaatggttcagtgactgtggttgctcttcttcaagccagttgatacctgtgcatactgcaggcatctaaattagaagacctgcgagtaaaactgaagaaagaaggatattctaatatttcttatattgttgttaatcatcaaggaatctcttctcgattaaaatacacacatcttaagaataaggtttcagagcatattcctgtttatcaacaagaagaaaaccaaacagatgtctggactcttttaaatggaagcaaagatgacttcctcatatatgatagatgtggccgtcttgtatatcatcttggtttgcctttttccttcctaactttcccatatgtagaagaagccatta

SEQ ID NO: 1547 - DNA, 544 bp, Homo sapiens
tttttttttttttttttttttttaaaggggcaaaggttttattgtaattttaagttaacagcattaaaaagaatcaacacaattatactgttaataaaaagacaaaaagacttcagcatagaaagtgtcatttacagaaactacaatcatacaaagaatattttcttacacaccaaatgaaaaatctaaacattaataaagacttcttatattctaataattagtgggacctgacagaagcatcagtgaaatgtcatcaagactatgtgtgaaaattagacaagatgcgcacaattagcttcatctcagcaatatttagcaagagaccttttggtacaaccaattaggcaacatttctcaaacagtgccacgtagggtcgtctctttttttgagaatgagtatccaagcctaagtattttaattctgaaggattgctgtctgcggcttcactttgcctattgcgaataagtttcttaaattcttcaaagctaagattggaatcctttaatgcaggtacatactgctgtagctctggtaatgatg

SEQ ID NO: 1548 - DNA, 554 bp, Homo sapiens
agaaggtgggtggtcaagagcagagcttagggatttagtcacatatattacgttacagagacacagaccaacattgagtaaccactgtgtgcctgatctttaagtcatgcattttgaaatgtaaagacagagtctgtatgtgtttatatttcttcttccaatttctctacagctttccttacaaggttgagtccacatcagggctcagtgttggctgaggtggggtgtccacaaccctactcctagtctttacagtatatgtgggttgaacacccccagggcgtcacggaggctgagcgagaggcttttgagctgctcccagatgatgaacgccagtgcatcaagtgcaagaccacgtgcttcttgtcagccctggcctgctacgactgcccagatggccttgtatgcctttcccacatcaatgacctctgcaagtgctctagtagccgacagtacctccggtatcggtacaccttggatgagctccccaccatgctgcataaactgaagattcgggctgagtcttttgacacctgggccaacaaagtgcgagt

SEQ ID NO: 1549 - DNA, 628 bp, Homo sapiens
taccgggttaaaaagtttgttaactctcttttccggctgggaccatggagggtgttgaagagaagaagaaggttcctgctgtgccagaaacccttaagaaaaagtgaaggaatttcacagagctgaagatcaagcgcctgagaaataagtttgcccaaaagatgcttctaaaggcaaggaggaagcttatctatgaaaaagcaaagcactatcacaaggaatatatgcagatgtacagaactgaaattcaaatatcgaggatagcaagaaaagctggcaacttctatgtatctgcagaacccaaattggcgtttgtcatcaggatcggaggttatcaattgggtgagcccaaaggtctgaaaggtgttgcaacttctttgccttcatcaaatcttcaatagaaacttgtgaagctcagcagggcttcaataatgtgctgaggtttgtagaaccatatattgcatgggcatacccaaatctgaagtcagtaaataaactaatctacaaatgtggttatagcgaaatgaataagaagctacttgctccaacagataatactttgattgctcgatctcttggtaaatatggcctcatctgcatggaggatctgattcatgagatctatact

SEQ ID NO: 1550 - DNA, 239 bp, Homo sapiens
tggtcatctctactaaaaaaaaaaaaaccggggggggggggcatatccctgtatttccacctcctcagaaggttaagggggaagaatcctttaaccctaaaaggccagaactgcagggacccttaaccttcccttttttttcaaaatggggggaaaaagggaaaccttgtttaaaaaaaacccctccaaacccaaaaaccccccaaaaaaccgaaaaaaaaaccccccttttaaccaaa

SEQ ID NO: 1551 - DNA, 631 bp, Homo sapiens
tacggccgggattcatacctaatttaaatgacaatttatcctctaagtcaaaaaaacactgttgtagttaagaatgggaatatttcagctacttcatatattgacatttttttgaggatgacagtctggtgattaatgaattccaagtgttgctctagtgctgctttccaatgtactttgagagtatttagtgaatgctgtagaaagtaccacattgtttggctataaaaagaaacattgttcctactttttaagaatatgtgagtggggcaacataccagctatttctggttgaagcaacttcacttagtgatagtttctttcaaatgcagtaatatatgaaagattataaaacactgtggacttttatgttatttacttaaaattttaaagtttttaaaaaagtaatagtgttgtatttttttaaagggcctaaatgcttaaaaaatctagttaaacttacactcttccttggaaaactgaactttaaaacaaagaagtaaggaaataatgtcaggctagctaaaggaagtaccacaaaattcaagtatgtttcttaaaagacactaacagacgtttgttcatgccttatcaatttttatttaacatttaatcctaacatgtagctatt

SEQ ID NO: 1552 - DNA, 616 bp, Homo sapiens
gccagggacgtgtttctgcgctcgcgtggtcatggaggcgctgccgctgctagccgcgacaactccggaccacggccgccaccgaaggctgcttctgctgccgctactgctgttcctgctgccggctggagctgtgcagggctgggagacagaggagaggccccggactcgcgaagaggagtgccacttctacgcgggtggacaagtgtacccgggagaggcatcccgggtatcggtcgccgaccactccctgcacctaagcaaagcgaagatttccaagccagcgccctactgggaaggaacagctgtgatcgatggagaatttaaggagctgaagttaactgattatcgtgggaaatacttggttttcttcttctacccacttgatttcacatttgcgtgtccaactgaaattatcgcttttggcgacagacttgaagaattcagatctataaatactgaagtggtagcatgctctgttgattcacagtttacccatttggcctggattaatacccctcgaagacaaggaggacttgggccaataaggattccacttctttcagatttgacccatcagatctcaaaggactatgggtgtatacctagaggactc

SEQ ID NO: 1553 - DNA, 607 bp, Homo sapiens
acccagcagaggagctaggccagtccatctgcatttgtcacccaagaactcttaccatgaagaccctcctactgttggcagtgatcatgatctttggcctactgcaggcccatgggaatttggtgaatttccacagaatgatcaagttgacgacaggaaaggaagccgcactcagttatggcttctacggctgccactgtggcgtgggtggcagaggatcccccaaggatgcaacggatcgctgctgtgtcactcatgactgttgctacaaacgtctggagaaacgtggatgtggcaccaaatttctgagctacaagtttagcaactcggggagcagaatcgcctgtgcaaaacaggactcctgcagaagtcaactgtgtgagtgtgataaggctgctgccacctgttttgctagaaacaagacgacctacaataaaaagtaccagtactattccaataaacactgcagagggagcacccctcgttgctgagtcccctcttccctggaaaccttccacccagtgctgaatttccctctctcataccctccctccctaccctaaccaagttccttggccatgcagaaagcatccctcacccatcctag

SEQ ID NO: 1554 - DNA, 524 bp, Homo sapiens
acagcctggcaatcggtaccattagtggccatgcccgacactgcccagacctttgtgttgtctgggttgatgcccatgctgacatcaacacaccccttaccacttcatcaggaaatctccatggacagccagtttcatttctcctcagagaactacaggataagggaccacaactcccaggattttcctggatcaaaccttgtatctcttctgcaagtattgtgtatattggtctgagagacgtggaccctcctgaacattttattttaaagaactatgatatccagtatttttccatgagagatattgatcgacttggtatccagaaggtcatggaacgaacatttgatctgctgattggcaagagacaaagaccaatccatttgagttttgatattgatgcatttgaccctacactggctccagccacaggaactcctgttgtcgggggactaacctatcgagaaggcatgtatattgctgaggaaatacacaatacagggttgctatcagcactggatctt

SEQ ID NO: 1555 - DNA, 574 bp, Homo sapiens
aggcattgaggcagccggcgcaggggcttctgctgagggggcaggcggagcttgaggaaaccgcagataagtttttttctctttgaaagatagagattaatacaactacttaaaaaatatagtcaatgggttactaagatattgcttagcgttaagtttttaacgtaattttaatagcttaagattttaagagaaaatatgaagacttagaagagtagcatgaggaaggaaaagataaaaggtttctaaaacatgacggaggttgagatgaagcttcttcatggagtaaaaaatgtatttaaaagaaaattgagagaaaggactacagagccccgaattaataccaatagaagggcaatgcttttagattaaaatgaaggtgacttaaacagcttaaagtttagtttaaaagttgtaggtgattaaaataatttgaaggcgatcttttaaaaagagattaaaccgaaggtgattaaaagaccttgaaatccatgacgcagggagaattgcgtcatttaaagcctagttaacgcatttactaaacgcagacgaaaatggaaagattaattgggag

SEQ ID NO: 1556 - DNA, 631 bp, Homo sapiens
gcgactgtgacaggcctcgccggaggagctgggccctgaatcaccctgctccccggccgactgtcggcgctgggggagggggtcccgggggtcgactcaccgatctgcccgatgaactcgatcttgatgccctggtgctccagccgcttgttggggttcttgagggcaaggctcaccttcccggagaccgtctccccgtcgtagaagaggaaatatttctccttcttcccgtcctccgtcttgtgctcggcccgcttcctactctctgcgtcgttcagaaggatttccacctccacgctctgcccgaagccgaagaagctcatcgcaccgccgggccgggcgggtctcggaacgactcggcgcgcgcgcgggagcaagctttgaaagttgagcacggcggcggcgagccggtgccctgggatcatggtggcgttgcggggccttggtagcggcctgcagccctggtgtccgctggatcttagactcgaatgggttgacacagtgtgggaactggatttcacagagactgagcctttggatcccagcatagaagcagagatcatagagactggattggctgcattcacaaaactctatgaaagccttttaccctttgctactggagaacatg

SEQ ID NO: 1557 - DNA, 656 bp, Homo sapiens
tacagatctggtctgaatctcaagtccagaccagtcagagttcaagaccagcctgggcaacatggtgaaaccccatctatacaaaaactcggcaaggcatggtggcatgcacctgttgtcccagctactcaggggctgaggcaggaggatggcatgagcccaggagcttgaggctgcagtgagctgtgattgtgccactgcactccagcctgagtgacagagtgagacccccatctccaaaagaaaaggctatcaatacaaaagtttatctaaattactgtacagctatacaatggaatactctacaaaatggagagatccataagataaagcagatgaataaagcaaaatgcatgtgttgacagctgttgtgatacctcagttcttgtcttcttggtttaaaagaatttaaatgagacagcaaaggagatgcagcataatttattgcaaaagaaaaggagtattttgaaagttaggtgcagaacagacagtacacctgagagagagaattcagggccggctgctcgtaagggtgagacagcattgattattgctggagaaactccctttatgggagttttgcattattattcataaggaggtgaggtgttgcagtaatcatgtcctgggtggtcctctgcacaggtgcagtagct

SEQ ID NO: 1558 - DNA, 584 bp, Homo sapiens
tacggccgggataactgggccaagggccactacacagagggagccgagctggtcgactcggtcctggatgtggtgaggaaggagtcagagagctgtgactgtctccagggcttccagctgacctactctctggggggcggcacggggtccgggatgggcaccctgctcatcagcaagatccgggaagagtacccagaccgcatcatgaacaccttcagcgtcatgccctcacccaaggtgtcagacacggtggtggagccctacaacgccaccctctctgtccaccagctggtggaaaacacagatgaaacctactccattgataacgaggccctatatgacatctgcttccgcaccctgaagctgaccacccccacctacggggacctcaaccacctggtgtcggccaccatgagcggggtcaccacctgcctgcgcttcccgggccagctgaacgcagacctgcgcaagctggcggtgaacatggtgccctttcctcgcctgcacttcttcatgcccggcttcgcgcccctgaccagccggggcagccagcagtaccgggcgcccacggtgcccgagctcac

SEQ ID NO: 1559 - DNA, 633 bp, Homo sapiens
acgacgcccagaatgggagctgactgatagggtggtgtgggtgactggagcctcgagtggaattggtgaggagctggcttaccagttgtctaaactaggagtttctcttgtgctgtcagccagaagagtgcatgagctggagagggtgaaaagaagatgcctagagaatggcaatttaaaagaaaaagatatacttgtttcgccccttgacctgaccgacactggttcccatgaagcggctaccaaagctgttctccaggagtttggtagaatcgacattctggtcaacaatggtggaatgtcccagcgttctctgtgcatggataccagcttggatgtctacagaaagctaatagagcttaactacttagggacggtgtccttgacaaaatgtgttctgcctcacatgatcgagaggaagcaaggaaagattgttactgtgaatagcatcctgggtatcatatctgtacctctttccattggatactgtgctagcaagcatgctctccggggtttttttaatggccttcgaacagagcttgccacatacccaggtataatagtttctaacatttgcccaggacctgtgcaatcaaatattgtggagaattccctagctggagaagtcacaaa

SEQ ID NO: 1560 - DNA, 524 bp, Homo sapiens
cagacccttggactaaggctatagtttcgacactgtttccaggtgtccacattgaattaaggatctgaaacaaggcttcagaccacctctccaggaaagtgcacgtttgcaaaggcttgaccacaggttctgggggcccacagcccccacgggtgaaacaaaccccttctggctctgacagccagcaaaactctggggcctgtctctagggacatggcagaggccccacccctctgcccagttggccttgctcttgggactgcccaaccacaaacagatttgtggtctggtaacaaaaaaagaaaagacaaggaggccggcaaaagtgggaggctggagggtgggttaaaaagaggtggaaaggccaagaaagcaggctgaggggaagacttctgcctctgcagacactgtcccctcctctcctctgtgaaaggctcccctggaaaggtggttcttcagtaggtaaaccatccgctggatggagctgcaatgcctgagctgaaagggactgtttacgcgggcgt

SEQ ID NO: 1561 - DNA, 353 bp, Homo sapiens
tggcacgttcccctaatcccaactactcgggaggctgctgcggagcccccgcggggcgtttggtttcggtttggccctgactgggattattgttgacgatcgaaatgggagtccccaagttttacagatggatctcagagcggtatccctgtctcatctaagtggtgaaagagcatcagattcctgaatttgacaacttgtacctggatatgaatggaattatacatcactgctcccatcctaatgatgatgatgttcacattataatttcagatgataaaatctttactgatatttttcactacctggaggtgttgtttcgcattattaaacccaggaaagtgttctttatg

SEQ ID NO: 1562 - DNA, 465 bp, Homo sapiens
gtgcctggttccaggaggccataggcttcattgactgggtgaagaacagcggaggccgggtgctggtgcactgccaggcgggtatctcgcgctctgccaccatctgtctggcatacctcatgcagagtcgccgtgtgcggctggacgaggcctttgacttcgttaagcagcgccggggggtcatctcccccaacttcagttacatggggcagctgctgcagtttgagacccaggtgctgtgtcactgaggtggtgcccctctgcctgcctgccccactgtgctggcaggagctgactgtggactggtgggctcccctctgggccagcacagtccccttacctctggcagggctgctacctcctcagagtttcagaagcccccacatgggggctctaggaatgccggcatgctggtctttccgacctggcgctcttctgctgggggactgaggctggccctcattc

SEQ ID NO: 1563 - DNA, 513 bp, Homo sapiens
atatacttaggtaaatatagcaattttgaaattggaggaattttctgactaaactgttagctagtcactagatagaaagattattttagacaagttaagaagtttattatatcagcaagaactctagccccagagtgctctgcccaattgtacctatgtgactctaggtgggtcctttcacttggtgagccttggtttccacattcatgagagtggggtcagtgatacttaggttgcatggttaataagaactgggtatgtgtgtaaagtccctggagtgcagagtcaggcacagagagtgcccaataaatggtagccactgttatctttattgccattgccacagtgtgttttttggtgattgacagctttcactcttcaggaagttagtctgaaattcagttggcttaggagcactaattgttaataaattttgataagataggcttaagatattgtctgtttatttcccgaagtatatttttaaagaaaatattgtccagtagtgaaacg

SEQ ID NO: 1564 - DNA, 350 bp, Homo sapiens
caggggcacaatctcaactcactgcaacctgcgcctcctgagtttcaagtgattctcctgcctcatcctcccaagtatctgggactacagacatgcaccaccacacctggctaatgtttgtgtttttagtaaaggtggggttgcgccatgttggccaggctggtctcgaactcctgacctcatgtgatccacctgccttggccttccaaagttctgggatttcaagcatgagccactgtgcccggccctgctgggattacttttgtctgaaacccactggggaggaaggacaggccttggaaatgtcgcattaatagcaactgctccctctaatgggacgacacatccct

SEQ ID NO: 1565 - DNA, 501 bp, Homo sapiens
cttgaactttgagtttgcagagttttattggccacatgattaacttccttctccagctcctctttaatctctgaacatctgggggtgtggctaaaagttccaaccctctaaccatatgcttggtctgtctggcatggccagctcgtcctttcaaactatgtgagggcctaccttgagtcacccccaagtataaactcagatatagtccaaaggggcttcttatgaataacaaagacacttccattaatcaggaaattccaagcctctctaagctctgtaccaggaacaggagacaaagactagatttattcttcattatatgacagatacatttttatattttgcctctggttttagtaaagtttttgttgtgaagaacacaaatgccagatcaaatgaaggggctgtaattagcaaggctgcaagggattgtgagcagtaagggagatagggattttactggaaatccgccaaaggaactggtatgtagctatgcctctc

SEQ ID NO: 1566 - DNA, 638 bp, Homo sapiens
ccgcgctgcgcagttttgttctgctccagctgttcgaaggtgatccagacgcaagatggctgtcctctctaaggaatatggttttgtgcttctaactggtgctgccagctttataatggtggcccacctagccatcaatgtttccaaggcccgcaagaagtacaaagtggagtatcctatcatgtacagcacggaccctgaaaatgggcacatcttcaactgcattcagcgagcccaccagaacacgttggaagtgtatcctcccttcttattttttctagctgttggaggtgtttaccacccgcgtatagcttctggcctgggcttggcctggattgttggacgagttctttatgcttatggctattacacgggagaacccagcaagcgtagtcgaggagccctggggtccatcgccctcctgggcttggtgggcacaactgtgtgctctgctttccagcatcttggttgggttaaaagtggcttgggcagtggacccaaatgctgccattaaagaattataggggtttaaaaactctcattcattttaaatgacttacctttatttccatttacattttttttctaaatataataaaaacttacctggcatcagccttataccaaaaaaaaaaaaa

SEQ ID NO: 1567 - DNA, 639 bp, Homo sapiens
accgcgctgcgcagttttgttctgctccagctgttcgaaggtgatccagacgcaagatggctgtcctctctaaggaatatggttttgtgcttctaactggtgctgccagctttataatggtggcccacctagccatcaatgtttccaaggcccgcaagaagtacaaagtggagtatcctatcatgtacagcacggaccctgaaaatgggcacatcttcaactgcattcagcgagcccaccagaacacgttggaagtgtatcctcccttcttattttttctagctgttggaggtgtttaccacccgcgtatagcttctggcctgggcttggcctggattgttggacgagttctttatgcttatggctattacacgggagaacccagcaagcgtagtcgaggagccctggggtccatcgccctcctgggcttggtgggcacaactgtgtgctctgctttccagcatcttggttgggttaaaagtggcttgggcagtggacccaaatgctgccattaaagaattataggggtttaaaaactctcattcattttaaatgacttacctttatttccatttacattttttttctaaatataataaaaacttacctggcatcagccttataccaaaaaaaaaaaaa

SEQ ID NO: 1568 - DNA, 620 bp, Homo sapiens
tcagctcctctgggacaacaaattcttagtctataatattaggagacatcttctgttttgcaaatgtctgtgaatctgagcaacctggcattctgcttactggccagaaagctggcgggtgacatttgtaacatttcctctttgagactctgagttcacctagagaagtctaagcataacagctttctttcccagcacgagcctttatagctctctttagctcaaccactctgtccatccagccaatggatgtcccttcccctgtaccccaatttcaagcttattttaggaagccttgaactaccatgtatcctggctcctagctgagtttattagaggtatggagcagtgcaacttaaactcaagttgcacttacattttgaattttaaaatgatggttttatctgttgtgtgaagtggttcacccttgaggaccaggagcctccatatcctgactgaaaaccttttctgagacttagagtaacagtacttttggttccttgagttctcctgtctccagataccaaatgaccttgacttttctgccttgtgaattcgtagtccaatcagctgaaattaaatcacttgggagggacgcatagaaggagctctaggaacac

SEQ ID NO: 1569 - DNA, 440 bp, Homo sapiens
tacggccgggatccccaaatttttctttgattcaattacaaatgaatcttgggacaccaaggcttataaactagttagttgatatatgcagtatagaatgtgtctagttctgtatttgttaaattattttcctatgatcttagcactaagtaatgttcctggaaatcatttcatttaagatgcctgccctaatctgaagtcagagctaaaatgatccaaatatgattttttttttaattgagacggactctcgctctttcccccaggcgtggtggcgagcacctgtcatcccagctacttgggaggcctaggcgtgagaatcgcttgaacctggaaggtggtggttgcagtgagccgagatcctgccactgcactccagcctgggcaaccaagcgagactctgccttaaaaaaaaaaaaaaaaagggggcccatttcccc

SEQ ID NO: 1570 - DNA, 589 bp, Homo sapiens
tgactgaacatggatccctaaaatggctctacaactcgaaaaagttctgaacgtcaggtttagcttttgagtcatttcccccgctgtcaaggtggcaaatatatagcccaagaaggtggcttttgagtcatttcccgcaaggtcaaggtggtaaatgtgcagcctcagaacctcaaggataatgcgacagagctgcaaaatgaatggttgctccaaagatggaagcagcctttgtaaaactgccttagtgacagttaacttttcaacatcatacaatttttgttaacaccatgcaaaaacctatggtgttcagcagcatagcatactctataccgtaaccaaccctcttactgaagaaaagacatagtggataaattgcacttccaaaagttcttttgaatacctcaatgaactggcaacaacgtaagacctgttatagattgaattgtataccccccaaattcatacgttgaaatcttgattcccccaaatctcagaaagagtccttgtttggaaatacggtcattgcatatgtaattagtttagatgggatcattctggaataggataagcccccaatccaatatga

SEQ ID NO: 1571 - DNA, 341 bp, Homo sapiens
aatggggaaacctagtaggaattacccacgcagtattgacagtccctttgaggttaggatcactgaacctgagtgaagataacctgcctggtattgtgattttgctgtagcaaaagccctccggaagcaaatggttgaatttatgtggagtagggctttgccaggcaagcccaatgggaggagacagagggaaggagtagttatagtgatggatgacagacaagctagaaaaggctgggcgtggtggctcatgcctgtaatctcagcactttgggaggccaaggcgggcagatcatttgggcccaggaattcagaccagcctgggcaatatggcgaaaccc

SEQ ID NO: 1572 - DNA, 481 bp, Homo sapiens
ttttttttttttttttttttttttttatttttagtagagacggggttccatcacgctggccaggatggtctcaatctcccgacctcgtgatcagcctgccttggcctcccaaagtactgggattataggcgtgagccaccgcgtctggcctctaacgagatatttctaaaggttaggccttcagtcaagaattttaaagctggatcttagaggttatctaaactaacctctccatttcatagataaggaaagtgagtcccagaaaagcactggtttggacaagttcagaaagctaaacagtgactgtggatgtatgattctgtctcttaactcctaatccaaatgtcttctcactagataaggctgtgccttctacatttgaaggctcaaaccccatggatggatggagggaaggatgggtggagggatggatggatagatggatggatagatagtttactcattcattcagttatgcaag

SEQ ID NO: 1573 - DNA, 636 bp, Homo sapiens
ttttttttttttttttttttcgcagacaaagtaaaatttattgagacagacagaaatgcacctactcaggactacagttaagcatttactattaaccaaagagttgtgttcacattccagataagtctacgtggaaaagcattcagaatttactaggtttttgctacatcactatttcatctacaatagggacaacaaactgacactcaggatttgatgggctctcattacaatgctatacatttagcaggaacaaacatcagtgactttgagaaaaagttataaaaagaccaaaaccacccactgtagaatgggctcttggatgttactgtacagcgtggtcaaggtaacaagaagaaaaaaatgtgagtggcatcctgggatgagcagggggacagacctggacagacacgttgtcatttgctgctgtgggtaggaaaatgggcgtagaggaggagaaacagatacaaaatctccaactcagtattaaggtattctcatgcctagaatattggtagaaacaagaatacattcatatggcaaataactaaccatggtggaacaaaattctgggatttaagttggataccaaggaaattgtattaaaagagctgttcatggaataagaataaaact

SEQ ID NO: 1574 - DNA, 486 bp, Homo sapiens
tttttttttttttttttttttttcatattggttcttgagattagctagcgccacctcagctgtctgcttgttggctttcaacaccgccctcaatgtggcgatctgctcccgtttggtgctcagcagggactttaacttgaggatctcttccattaaggcttccttgtctttatcaatcatgggggctagctcccgagccgctgctctttgacgagacagttgcaaggaccggtccacagctttctgcagatgcttgatttggtcccggattatggcattaaggttgtagatattcattggctctttgcggatgtcacttgtatccaatactggagatgacggtggggcagtaataacaggagagattgtgggggtcttagttggacttggttctttgctggcctctgtgctttcttttgcaactggttcagatgaggtccttgtttctaccggggatgacacaccccgcctggctaatcgtgggga

SEQ ID NO: 1575 - DNA, 575 bp, Homo sapiens
taacccagatcgctactaccccgcagttcccggacatgatcctctccgcctctcgagataagaccatcatcatgtggaaactgaccagggatgagaccaactatggaattccacagcgtgctctgcggggtcactcccactttgttagtgatgtggttatctcctcagatggccagtttgccctctcaggctcctgggatggaaccctgcgcctctgggatctcacaacgggcaccaccacgaggcgatttgtgggccataccaaggatgtgctgagtgtggccttctcctctgacaaccggcagattgtctctggatctcgagataaaaccatcaagccatggaataccctgggtgtgtgcaaatacactgtccaggatgagagccactcaaagtgggtgtcttgtgtccgcttctcgcccaacagcagcaaccctatcatcgtctcctgtggctgggacaagctggtcaaggtatggaacctggctaactgcaagctgaagaccaaccacattggccacacaggctatctgaacacggtgactgtctctccagatggatccctctgtgcttct

SEQ ID NO: 1576 - DNA, 570 bp, Homo sapiens
cttttttttttttttttttttactggcatcctgtacatttacttttaaaaaaggataacaaaaatgaatattaacaaaaatccgggacaacaatattttcaagcaacaaaaactggggtggggaagcttattctgaaggtacatttaaaactgaaataacaacttaatgaaaattaagaattgcatagcgctgtgaatttagccttcagcaaaacaaaacagaagctatttggtattgatacaaatccatctatttgatagttagtcatccaatattatgtacatattttatatactgaatgtcattttaagtcctgttttccaaactccatttttctgttgctgggtttttgttttttgacaagttaaacactttctggcactttctatgacagaatttcttctgaacatacatgaactgacattctcccaaagcgtcccttgtgagtggacgcgcctttctgctacatatcgttcatttgttacaaaatgaaataatccacagtgcgatgtgtctgggtccaccgtgcacagcaacatccaggctaaaccaggctggaccaaaccttc

SEQ ID NO: 1577 - DNA, 371 bp, Homo sapiens
tttttttttttttttttttttttgggcatagaaagtgtcatttacagaaactacaatcatacaaagaatattttcttacacaccaaatgaaaaatctaaacattaataaagatttcttatattctaataattagtgggacctgacagaagcatcagtgaaatgtcatcaagactatgtgtgaaaattagacaagatgtgcacaattagcttcatctcagcaatatttagcaagagaccttttggtacaaccaattaggcaacatttctcaaacagtgccacgtagggttgtctctttttttgagaatgagtatccaggcctaagtattttaattctgaaggattgctgtctgcggcttcactttgcctatt

SEQ ID NO: 1578 - DNA, 591 bp, Homo sapiens
ttttttttttttttttttttttttttgcagtgtattttgatgtttttatttttaattggtatggagagagggagtgaagatagttttaagtggatacacttttcctttaatgaagacaagccgtaggtgggtgataaagagaaaaaagttaggctttagattcacacaatactgggtttaattcctaactttcttacttgctaggtgtgtgaccttgggaacgttatttaccaccaaatatgttgtcatatatgaaaagtaggagaatatatccttcaaagtttgctgtgcataagaaagatatatgtggcatttaattcagtgcctagcacatgcttattggcatcattaactgaaactcctgtgactactattcttaccattattattaatcatacttgctttcagcatgcagagagctcttatttattttacccctagctgattttctattacagcatatcagtctagggaagctgtgatgaaatcttcacttaaatctttgttcatttcagataagtggccctaatattgtttcttgtccatcaaaggacttcaaattagtagcttctgctatgcaataccccactg

SEQ ID NO: 1579 - DNA, 591 bp, Homo sapiens
ggggaaacatcacacctgccctaaaccctgttcctggaggtcagcatttgatctgttgcaagcccctctttctgtcccctcttcctaccctgcctcccatgactttgctcctcacacttttggaaccatgccttccgggggggcccatctcttctggccgtccttgtctctgggccacttggagtgtgtgataaatcagtcaagctgttgaagtctcaggagtctctggtagcctgcagaagtaagcctcaccatcagagcctttcctcaaaactggagtcccaaatgtcatcaggttttgtttttttttcagccactaagaacccctctgcttttaactctagaatttgggcttggaccagatctaacatcttgaatactctgccctctagagccttcagccttaatggaaggttggatccaaggagggtgtaatggagcatcaagccactcggcggcagcatggagctataactaagcatcctttagggttctgcctctccaggcatttagccctcacattagatctagttactgtggtatggctaatacctgtcaacatttggaggcaatcctaccttgcttttgctt

SEQ ID NO: 1580 - DNA, 197 bp, Homo sapiens
tgatttttttttattttttttttttttactgcttcctctttaattcgtctgagttttatgagccctaattcatagacctttgttgttgcatataaacttgaggataaacttgttgaattagatcaacgtaagcagttgaaattctgtgtggggtggtgatgaacggctctagcactttgtaaaaggtatttaaagcg

SEQ ID NO: 1581 - DNA, 538 bp, Homo sapiens
tggtagcgggtgcctgtagtcccagctactcgggaggctgacgcaggataatggcgtgaacccgggaggcggagcttgcagtgagccgagatcgcgccactgcactccagcctgggcgacagatcgagactccgtcccaaaaaaacatgagattgaaaaaaaaaaaccactgtgccccccccttgcttgatgattttctaattccactactaagtgacactcatctggcgtaacaacccgcaccccatcggtcaaacaaaagcggacaatgtacctttgacaagatatctggcaagagcaaatattcaatactggtggaatcttggacaaaaatctaactttcctgggaaagaggtaggggttagggtgggtgtcccatgttaagtggtcatttgggcaaaaactaaaaccaagtttctaaaatgaattttaaagtatggcaaatgactgatttagtcaaaaatttatcttctactctgaaaaaaatatgtttgtttaaaagacaaacgttgccacttttatactagagcacaatctt

SEQ ID NO: 1582 - DNA, 376 bp, Homo sapiens
ttttttttttttttttttttttttttcttttttttttttttttttttttttttttttttttctacacatgcttttttattagtatagataccttcacagacaatactgtaatttttagaggagttccacatcattacatcaacagggtgaatttctaacagaggcaaaactgagcaccatagtttacaagtaaaaagaccatgcttgaggacaacaaaagttcactaaggatgcacgattgatctgaaaagtttttaagcctggtcctcgccctcctcctcctaaaactccctttgttcgtcggccgtggggtcctggtactgctggtactcggacaccaggtcgttcatgttgctctcggcctcggggaactcca

SEQ ID NO: 1583 - DNA, 486 bp, Homo sapiens
tgaatataactccagaatctaccaaaacggggaaagtttccagcccaactgtaaacatcagtgcacatgtattgatggcgccgtgggctgcattcctctgtgtccccaagaactatctctccccaacttgggctgtcccaaccctcggctggtcaaagttaccgggcagtgctgcgaggagtgggtctgtgacgaggatagcatcaaggacaccatggaggaccaggacggcctccttggcaaggagctgggattcgatgcctccgaggtggagttgacgagaaacaatgaattgattgcagttggaaaaggcagctcactgaagcggctccctgtttttggaatggagcctcgcatcctatacaaccctttacaaggccagaaatgtattgttcaaacaacttcatggtcccagtgctcaaagacctgtggaactggtatctccacacgagttaccaatgacaaccctgagtgccgccttgtgaa

SEQ ID NO: 1584 - DNA, 530 bp, Homo sapiens
tgattttctgtggttgttggttgttcgctagtctcacggtgatggaagctgcacattttttcgaagggaccgagaagctgctggaggtttggttctcccggcagcagcccgacgcaaaccaaggatctggggatcttcgcactatcccaagatctgagtgggacatacttttgaaggatgtgcaatgttcaatcataagtgtgacaaaaactgacaagcaggaagcttatgtactcagtgagagtagcatgtttgtccccaagagacgtttcattttgaagacatgtggtaccaccctcttgctgaaagcactggttcccctgttgaagcttgctagggattacagtgggtttgactcaattcaaagcttcttttattctcgtaagaatttcatgaagccttctcatcaagggtacccacaccggaatttccaggaagaaatagagtttcttaatgcaattttcccaaatggagcagcatattgtatgggacgtatgaattctgactgttggtacttatatactctggat

SEQ ID NO: 1585 - DNA, 437 bp, Homo sapiens
tttttttttttttttttttttttagggattattttttttgagacaagagtctcactctgtcgcccaggctggagtgcagtggcacaatctgcgctcactgcaacctctgcctcccgggttcaagtgattctcatgcctcggcctcctgagtagctggaattacaggcaaaaaccttttaaaatagccaggcgtggtaatgcacatctgtagtatcagctactcgggaggctaagatgggaggatcacttgagctcaggagtttgaaggtgcagcgagctatgatcgcaccactgcacaccagcctgggccacagagtgagatcctgtatattaaaaaaaaggaggggagtgttcaggatagtggctatttgccgacaagtatacaattaggtcaagattttaacaacaggcacgggtgccctggttgttaactataa

SEQ ID NO: 1586 - DNA, 445 bp, Homo sapiens
tttttttttttttttttttttttggcagaaggaagaggtttttttattcagccaggagcgttggcagactggtgtcttaagagccgagctcccggaaaaagaaattcctagcccttttaagggcttacaactctaaagggtctacgtgaaaaagtcataatagatcaagtaagcctgaggaacgtgactgggggctacaaacatcagctaacagaacaaaaagtttttacagtgctttctcatacagtgtctgggatttacagataacacaggtagttttggtcaggggttaatattattgttgttttaaccaccggggccaggtggtggcgccaaggtcctctagctatttattttacttctgttttttccaactttttgctttctcccttttttgctgtcttacaaactagggaaaagggggggttggggagaaactgggaag

SEQ ID NO: 1587 - DNA, 493 bp, Homo sapiens
agtttcttaatgcaattttcccaaatggagcagcatattgtatgagacgtatgaattctgactgttggtacttatatactctggatttcccagagagtcgggtaatcagtcagccagatcaaaccttggaaattctgatgagtgagcttgacccagcagttatggaccagttctacatgaaagatggtgttactgcaaaggatgtcactcgtgagagtggaattcgtgacctgataccaggttctgtcattgatgccacaatgttcaatccttgtgggtattcgatgaatggaatgaaatcggatggaacttattggactattcacatcactccagaaccagtattttcttatgttagctttgaaacaaacttaagtcagacctcctatgatgacctgatcaggaaagttgtagaaatcttcaagccaggaaaatttgtgaccaccttgtttgttaatcagagttctaaatgtcgcacagtgcttgcttcgcc

SEQ ID NO: 1588 - DNA, 637 bp, Homo sapiens
tacggccgggtgctggtgcactgccaggcgggtatctcgcgctctgccaccatctgtctggcatacctcatgcagagtcgccgtgtgcggctggacgaggcctttgacttcgttaagcagcgccggggggtcatctcccccaacttcagtttcatggggcagctgctgcagtttgagacccaggtgctgtgtcactgaggtggtgcccctctgcctgcctgccccactgtgctggcaggagctgactgtggactggtgggctcccctctgggccagcacagtcccctcacctctggcagggctgctacctcctcagagtttcagaagcccccacatgggggctctaggaatgccggcatgctggtctttccgacctggtgctcttctgctggggaactgaggctggccctcattcggggtcgggaaccgagggtgtgtctgctctttccctccccatcctctggcagaaatcagctagacgctataccgtggactctccctggtccaccaccatgttgaagcccttggcagcctgagagctccaaggaacaagctgtgacaaccaggagccctgtctgtgggttcgtctgcccagggcctggagcccaagccctgtgttcctggggaagctggggac

SEQ ID NO: 1589 - DNA, 463 bp, Homo sapiens
atcgaccgcgccgagcaggccgaagccgacaagaagcaagctgaggaccgctgcaagcagctggaggaggagcagcaggccctccagaagaagctgaaggggacagaggatgaggtggaaaagtattctgaatccgtgaaggaggcccaggagaaactggagcaggccgagaagaaggccactgatgctgaggcagatgtggcctccctgaaccgccgcattcagctggttgaggaggagctggaccgggcccaggagcgcctggctacagccctgcagaagctggaggaggccgagaaggcggctgatgagagcgagagaggaatgaaggtcatcgaaaaccgggccatgaaggatgaggagaagatggaactgcaggagatgcagctgaaggaggccaagcacatcgctgaggattcagaccgcaaatatgaagaggtggccaggaagctggtgatcctgg

SEQ ID NO: 1590 - DNA, 595 bp, Homo sapiens
gtccttaagttccttgcaacaggaacccacttaggtggcaccaatcttgacttccagatggaacagtacatctataaaaggaaaagtgatggcatctatatcataaatctcaagaggacctgggagaagcttctgctggcagctcgtgcaattgttgccattgaaaaccctgctgatgtcagtgttatatcctccaggaatactggccagagggctgtgctgaagtttgctgctgccactggagccactccaattgctggccgcttcactcctggaaccttcactaaccagatccaggcagccttccgggagccacggcttcttgtggttactgaccccagggctgaccaccagcctctcacggaggcatcttatgttaacctacctaccattgcgctgtgtaacacagattctcctctgcgctatgtggacattgccatcccatgcaacaacaagggagctcactcagtgggtttgatgtggtggatgctggctcgggaagttctgcgcatgcgtggcaccatttcccgtgaacacccatgggaggtcatgcctgatctgtacttctacagagatcctgaagagattgaaaaag

SEQ ID NO: 1591 - DNA, 527 bp, Homo sapiens
ggaagaggcggccgggagtgttttcagttccgcctccaatcgcccattcccctcttcccctcccagccccctccatcccatcggaagaggaaggaacaaaaggtcccggaccccccggatctgacggggcgggacctggcgccaccttgcaggttcgatacaagaggctgttttcctagcgtggcttgctgcctttggtaagaacatgtcgtccatcttgccattcacgccgccagttgtgaagagactgctggatggaagaagtcagctggtgggtctggaggagcacgcggaggaggacagaatgggcaggaagaaaagtggtgtgagaaagcagtgaaaagtctggtgaggaagctaaagaaaacaggacgattagatgagcttgagaaagccatcaccactcaaaactgtaatactaaatgtgttaccataccaagcacttgctctgaaatttggggactgagtacaccaaatacgatagatcagtgggatacaacaggcctttacagcttctctgaacaaac

SEQ ID NO: 1592 - DNA, 495 bp, Homo sapiens
tatcatctgaacctgaccgtgggaggtattcccttccatgagaaggacctcgtgcagcctataaaccctcgtctggatggctgcatgaggagctggaactggctgaacggagaagacaccaccatccaggaaacggtgaaagtgaacacgaggatgcagtgcttctcggtgacggagagaggctctttctaccccgggagcggcttcgccttctacagcctggactacatgcggacccctctggacgtcgggactgaatcaacctgggaagtagaagtcgtggctcacatccgcccagccgcagacacaggcgtgctgtttgcgctctgggcccccgacctccgtgccgtgcctctctctgtggcactggtagactatcactccacgaagaaactcaagaagcagctggtggtcctggccgtggagcatacggccttggccctaatggagatcaaggtctgcgacggccaagagcacgtggtcaccgtctcgctg

SEQ ID NO: 1593 - DNA, 573 bp, Homo sapiens
aggcattgaggcagccagcgcaggggcttctgctgagggggcaggcggagcttgaggaaaccgcagataagtttttttctctttgaaagacagagattaatacaactacttaaaaaatatagtcaataggttactaagatattgcttagcgttaagtttttaacgtaattttaatagcttaagattttaagagaaaatatgaggacttagaagagtagcatgaggaaggaaaagataaaaggtttctaaaacatgacggaggttgagatgaagcttcttcatggagtaaaaaatgtatttaaaagaaaattgagagaaaggactacagagccccgaattaataccaatagaagggcaatgcttttagattaaaatgaaggtgacttaaacagcttaaagtttagtttaaaagttgtaggtgattaaaataatttgaaggcgatcttttaaaaagagattaaaccgaaggtgattaaaagaccttgaaatccatgacgcagggagaattgcgtcatttaaagcctagttaacgcatttactaaacgcagacgaaaatagaaagattaattggga

SEQ ID NO: 1594 - DNA, 469 bp, Homo sapiens
tggactcagcggtagcaacctcgccccttgcaacaaaggcagactgagcgccagagaggacgtttccaactcaaaaatgcaggctcaacagtaccagcagcagcgtcgaaaatttgcagctgccttcttggcattcattttcatactggcagctgtggatactgctgaagcagggaagaaagagaaaccagaaaaaaagtgaagaagtctgactgtggagaatggcagtggagtgtgtgtgtgcccaccagtggagactgtgggctgggcacacgggagggcactcggactggagctgagtgcaagcaaaccatgaagacccagagatgtaagatctcctgcaactggaagaagcaatttggcgcggagtgcaaataccagttccaggcctggggagaatgtgacctgaacacagccctgaagaccagaactggaagtctgaagcgagccctgcacaatgccgaatgcc

SEQ ID NO: 1595 - DNA, 366 bp, Homo sapiens
gcagtgagctaagatcccgccattgcactccagcctgggctacagagcaagagtctatcaataaatgaatgaatgaatgaatgaatgaatgaatgaatgaatgaatgaatgtggttgtgggcaactccaagaacacatcttggggtgctagcctactggtgacagtgttcaggaaggccgttcctgaggaagtgacattgaagcagagagcttgaaggaggtgtaaaatcctttttatagattttaaactaggtaaagactagggggcagtgtttgaggcacagggaagcatctgagcaagagcaagggacctaagagaaggtaaagaagaggagggtgatgaagatgaagatgcaggaggatagg

SEQ ID NO: 1596 - DNA, 467 bp, Homo sapiens
gaagcctgttcacccgtctgtgtcatgtggccatcttgagtctactctgtcgctcttgtgccctagcaccccgagaaccgtcagtttgagccagatggtgagtaataacctgtaacactttggttgctggttaattctggattgtgaatctccatgtatctttgggacctgtcagccgtggcagtctcccttactagccatggaagagcatatgcttgtttattggcaaagctgtcaccatttaattggtatcagattctgacttgcacaagtaacattcactgttaaaaacctaaagggcgccgggttattgggcaaaatttctaaaccgttgttcaatgtttctaggaagctgagctgaacacattacgatggatgatggaaacataagggacattccttttttgatatttctgagttaatctgaaacgccttaccggcaggacgttggaaagctaaagttggct

SEQ ID NO: 1597 - DNA, 709 bp, Homo sapiens
atctgacaccgtcaccagtaggagacctcagtgttttgggtctaggtgagtgcaggcccctctccccacacctcgccccacagagccctgttcttagcctcctgtgctgcgtgtccatcatcagctgaccaagacacctgaggacacatcttggcacccagaggagcagcagcaacaggctggagggagagggaagcaagaccaagatgaggaggggggaaggctgggttttttggatctcagagattctcctctgtgggaaagaggttgagcttcctggtgtccctcagagtaagcctgaggagtcccagcttagggagtcactattggaggcagagaggcatgcaggcggggtcctaggagcccctgcttctccaggcctcttgcctttgagtctttgtggaatggatagcctcccactaggactgggaggagaataacccaggtcttaaggaccccaaagtcaggatgttgtttgatcttctcaaacatctagttccctgcttgatgggaggatcctaatgaaatacctgaaacatatattggcatttatcaatggctcaaatcttcatttatctctggccttaaccctggctcctgaggctgcggccagcagagcccaggccagggctctgttcttgccacacctgcttgatcctcagatgtggagggaggtaggcactgcctcagtcttcatccaaacaccttt

SEQ ID NO: 1598 - DNA, 555 bp, Homo sapiens
aaaggcagctcactgaagcggctccctgtttttggaatggagcctcgcatcctatacaaccctttacaaggccagaaatgtattattcaaacaacttcatggtcccagtgctcaaagacctgtggaactggtatctccacacgagttaccaatgacaaccctgagtgccgccttgtgaaagaaacccggatttgtgaggtgcggccttgtggacagccagtgtacagcagcctgaaaaagggcaagaaatgcagcaagaccaagaaatcccccgaaccagtcaggtttacttacgctggatgtttgagtgtgaagaaataccggcccaagtactgcggttcctgcgtggacggccgatgctgcacgccccagctgaccaggactgtgaagatgcggttccgctgcgaagatggggagacattttccaagaacgtcatgatgatccagtcctgcaaatgcaactacaactgcccgcatgccaatgaagcagcgtttcccttctacaggctgttcaatgacattcacaaatttagggactaaatgctacctgggttt

SEQ ID NO: 1599 - DNA, 452 bp, Homo sapiens
agaagaagaaacaaacactgatctctttctgccacccctgaccctttggaactcctctgaccctttaggacaagcctacctaatatctgctagagaaaagaccaacaacggcctcaaaggatctcttaccatgaaggtctcagctaattcttggctaagatgtgggttccacattaggttctgaatatggggggaagggtcaatttgctcattctgtgtgtggttaaagtcaggatgcccaggggccagagcagggggctgctgctttgggaacaatggctgagcatataaccataggtatgggaacaaaaaacatcaaagtcactgtatcaattgccatgaagacttgagggacctgaatctaccgattcatcttaaggcagcaggaccagtttgagtggcaacaatgcagcagcagaatcaatggaaacaacagaatgattgcaatgtcc

SEQ ID NO: 1600 - DNA, 491 bp, Homo sapiens
gatcccaggaggggaacaccatgaagactaacgacacatacatgaaatttagctggttaacggtgccagaaaagtcactggacaaagaacacagatgtatcgtcagacatgagaataataaaaacggagttgatcaagaaattatctttcctccaataaagacagatgtcatcacaatggatcccaaagacaattgttcaaaagatgcaaatgatacactactgctgcagctcacaaacacctctgcatattacatgtacctcctcctgctcctcaagagtgtggtctattttgccatcatcacctgctgtctgcttagaagaacggctttctgctgcaatggagagaaatcataacagacggtggcacaaggaggccatcttttcctcatcggttattgtccctagaagcgtcttctgaggatctagttgggctttctttctgggtttgggccatttcagttctcatgtgtgtactattctatcattatt

SEQ ID NO: 1601 - DNA, 444 bp, Homo sapiens
gtgggaatcattacaaaacattatgaatatagttaaagcaactgaactgtacacttaaaatagttaatgtgatacattttatgttacatgtatttctgcccactagaaaaaataaaaatatataaacacacagcaaatgatgaccaggcctttgaagaaagcttataaaacaaaattaagaagccaaggctgggagtggtggctaacgcctgtaatcctagcactttgggtggctgagatgggcggatcacgaggtaaagacatcgagaccatcctggccaacatggtgaaatgtatgtttagtctctactaaaaatacaaaatttagctgggtgtggtggcatgtgcctgtaatcccagctactgaacccgggaggtggagattgcagtgagctgagatcgcgccacagcactccagcctggctacagagcgagactctgtct

SEQ ID NO: 1602 - DNA, 593 bp, Homo sapiens
tctcgctccgtggccttagctgtgctcgcgctactctctctttctggcctggaggctatccagcgtactccaaagattcaggtttactcacgtcatccagcagagaatggaaagtcaaatttcctgaattgctatgtgtctgggtttcatccatccgacattgaagttgacttactgaagaatggagagagaattgaaaaagtggagcattcagatttgtctttcagcaaggactggtctttctatctcttgtactacactgaattcacccccactgaaaaagatgagtatgcctgccgtgtgaaccatgtgactttgtcacagcccaagatagttaagtgggatcgagacatgtaagcagcatcatggaggtttgaagatgccgcatttggattggatgaattccaaattctgcttgcttgctttttaatattgatatgcttatacacttacactttatgcacaaaacgtagggttataataatgttaacatggacatgatcttctttataattctactttgagtgcagtctccatgtttgatgtatctgagcaggttgctccacaggtagctctaggagggctggcaactt

SEQ ID NO: 1603 - DNA, 552 bp, Homo sapiens
attgatttcttttttctcacagcaacaagtgcttactctagaggttagtgggccctgatatgtcatcagtcagatgcctgcctagccaaagctggactaagattattctgcacatttgttgatcttgatatagacttatatccctgtagggactgctaatggctccggcttctggagtaaggtactggagaccactcatccctgtgtctgcttgattggttcagctgttgaattgcccttttatttggaagcagtgttgaagttgtctagggttcaaatggctgctttgtacacctgtcatcagtataaggcagatgtttattttatcaagctattttatctctacatttaactaaaaacaaaagttcccaaagatctgccttcacttcagaaattttttttggattaaaaaaattaagcctgaaccttaaataaagtgagttggttattcattccaaggattaagtcccaatctacctctcagcacaatgcagaagctcaccactgtattgctgccattaactcatgccagaaccctttgccaataactgg

SEQ ID NO: 1604 - DNA, 567 bp, Homo sapiens
  misc_feature 519: n = A,T,C or G
gcgagtttatgtttgactttgatggtgatgagattttccatgtggatatggcaaagaaggagacggtctggcggcttgaagaatttggacgatttgccagcttagatgctcaaggtgcattggccaacatagctgtggacaaagccaacctggaaatcatgacaaagcgctccaactatactccgatcaccaatgtacctccagaggtaactgtgctcacgaacagccctgtggaactgagagagcccaacgtcctcatctgtttcatcgacaagttcaccccaccagtggtcaatgtcacgtggcttcgaaatggaaaacctgtcaccacaggagtgtcagagacagtcttcctgcccagggaagaccaccttttccgcaagttccactatctccccttcctgccctcaactgaggacgtttacgactgcagggtggagcactggggcttggatgagcctcttctcaagcactgggagtttgatgctccaagccctctcccagagactacagagaacngtggtgtgtgccctgggcctgactgtgggtctggtgggcatcattatt

SEQ ID NO: 1605 - DNA, 556 bp, Homo sapiens
actgttaacagtagaggtatgtccagaaacctagtttagtattttacaaattgctcttcctcactatatttgctctgtagtcctgaaacttgcatttttttctctgtaaaaactctggactcttcacagttgctctttgggttggaaagtccttttcaaagtaagatatctacaatctcaaccatacatacacaccctcccaatctcccacacccaggacagtgatgggcagaagttgggcagaatttgggcaggaaggccatctcgccccacctgccgtgctgcccagctgaatgggcggcaggactccatgtggcatttaggattctcaaagctgcaggaaactgaatggaactcttgtaaaacacgccctcgccagctttctcctacttcttctagtctctgcttgtcaagagctaggtggactttttgccctggactgagattccgaggtgggaggagaagttggattaagagacttgatgccttcaaaacgttcagggtatgacaagggcctcactcccttagaaagaaatgggtgatagaagaggaaagc

SEQ ID NO: 1606 - DNA, 496 bp, Homo sapiens
caggtccggcacatgtttccgcggagcggacccagcaatgacggtaaggggctcccttcccccgacggtggtagtcggagcccgggcttattagcaaacgtgagaggagcagagtatttttacccaagtggcactggggtaggagggctggaatttagccctcaagagcaaggaagcctagggaaagggcagccggctctttaggactgctgtaagacgagtgaacctggggccacttctgaaaacacagattgactgtagaggggacagtgcccgaagtgtgatcacaggtttcagaaagactggggcgcacagcttctacccagttatccactgaaaatccggtaaagccattcctaactatgccattcagttcaacaaataacgactgaatgtattcttgagttctggcgccgcgttacgtgctctggagtggcggaataaagccggcctcttaacttccggggcatgtagttttcaattattgcgacaaggg

SEQ ID NO: 1607 - DNA, 565 bp, Homo sapiens
gaaaattccagtgtcagcattcttgctccttgtggccctctcctacactctggccagagataccacagtcaaacctggagccaaaaaggacacaaaggactctcgacccaaactgccccagaccctctccagaggttggggtgaccaactcatctggactcagacatatgaagaagctctatatagatccaagacaagcaacaaacccttgatgattattcatcacttggatgagtgcccacacagtcaagctttaaagaaagtgtttgctgaaaataaagaaatccagaaattggcagagcagtttgtcctcctcaatctggtttatgaaacaactgacaaacacctttctcctgatggccagtatgtccccaggattatgtttgttgacccatccctgacagttagagccgatatcactggaagatattcaaatcgtctctatgcttacgaacctgcagatacagctctgttgcttgacaacatgaagaaagctctcaagttgctgaagactgaattgtaaagaaaaaaaacctccaagcccttctgtctgtcaggccttgag

SEQ ID NO: 1608 - DNA, 500 bp, Homo sapiens
acatttacattcataatctgtttaatcttctgttgaatgcccttgtgcactctctttgccctgttttagttccctacttgctgtagattataagtgcccttaatatctccagtatctccacagagaattttgtcttcaagccttggcatcctgttttccactgtgccttcaacctgagacttcagtgatttcacaaatgctctgaacaatggagttttgaaatggttaccatttgtattagtttcctgtggctgctataacaaactaccacaagcctggtgacttaaaccatcagaaatctattctctcacagttctggaagccaaaagtccaaaatcggtatcattgggcgagaagcaagatgtcagcagggctgcattccttctggatgctctaggggagaatccttttctttgccttcctcagcttctgctgaccactaccgttttttggcttgtggccacatcactgcaatctcagcttctctggtcacattaagt

SEQ ID NO: 1609 - DNA, 589 bp, Homo sapiens
  misc_feature 509: n = A,T,C or G
acccattgcctggtttcgcaggagactgtccgccttcagttctccagcagctcggggatcatggcccactgaacccccaagcgctttcacccgaacccaaggaggacgaccaggaaagacgggaactcgcgtagacacgcccggaagcccttgtcatgtaaatagctgtcggggactggtgtattgtcgccgccccagccggcgggacctggggcgaatccacacccattgtctgctgcccaaggggcctccggctggggggcgcggctgcggagttcaaaaggggtatgagcaggaggggtgtacttttagttcattaagttttaattacaggagtgctacaagaacacattcttcaggtttaaaaagatattaaaatattacataagagacctcccctccctggcccacctccagcctcttaaaaatttagtgtgtcgccttttagacactttctcaaagcttcacttatttaacaggcacttaaggagcacctacctgtgccaganactctccaaatattaactcaacctgacaccgactcagtgtggccgaatattactctccccattttacagagcgggcagct

SEQ ID NO: 1610 - DNA, 486 bp, Homo sapiens
attcctgaagctgacagcattcgggccgagatgtctcgctccgtggccttagctgtgctcgcgctactctctctttctggcctggaggctatccagtgtactccaaagattcaggtttactcacgtcatccagcagagaatggaaagtcaaatttcctgaattgctatgtgtctgggtttcatccatccgacattgaagttgacttactgaagaatggagagagaattgaaaaagtggagcattcagacttgtctttcagcaaggactggtctttctatctcttgtactacactgaattcacccccactgaaaaagatgagtatgcctgccgtgtgaaccatgtgactttgtcacagcccaagatagttaagtgggatcgagacatgtaagcagcatcatggaggtttgaagatgccgcatttggattggatgaattccaaattctgcttgcttgctttttatattgatatgcttatacacttaca

SEQ ID NO: 1611 - DNA, 552 bp, Homo sapiens
cagaagttgagaccacccagcagaggagctaggccagtccatctgcatttgtcacccaagaactcttaccatgaagaccctcctactgttggcagtgatcatgatctttggcctactgcaggcccatgggaatttggtgaatttccacagaatgatcaagttgacgacaggaaaggaagccgcactcagttatggcttctacggctgccactgtggcgtgggtggcagaggatcccccaaggatgcaacggatcgctgctgtgtcactcatgactgttgctacaaacgtctggagaaacgtggatgtggtaccaaatttctgagctacaagtttagcaactcggggagcagaatcacctgtgcaaaacaggactcctgcagaagtcaactgtgtgagtgtgataaggctgctgccacctgttttgctagaaacaagacgacctacaataaaaagtaccagtactattccaataaacactgcagagggagcacccctcgttgctgagtcccctcttccctggaaaccttccacccagtgctgaatttccctct

SEQ ID NO: 1612 - DNA, 415 bp, Homo sapiens
tggtggcttgcacctgtaatcccagcattttgggaggctgaggcgggcagatcacctgaggtcaggagttctagaccagcctggtcaacatggtgaaatcccatctccaataaaaatacaaaaattagctgggtgtggtggcacatacctgtagtcccagctactccagaggctgaggcaggagaatcgcttgaacccaggaggcagaggttacagtgagcagagatcgtgccactgcactccagcctgggcaacagagcgactccgtctccaaaaaaaaaaaaaaaacccaaaaaccgggttggggggtaacccaaagtcatttccttttaaggtttttaaaaggaaaaaaaaaaaactgccccaaggaaggagtcttaaagggttttttttaaaaaaaaaattttttaaaaat

SEQ ID NO: 1613 - DNA, 501 bp, Homo sapiens
ggtgtgtgagagccaggcgtccctctgcctgcccactcagtggcaacacccgggagctgttttgtcctttgtggagcctcagcagttccctctttcagaactcactgccaagagccctgaacaggagccaccatgcagtgtttcagcttcattaagaccatgatgatcctcttcaatttgctcatctttctgtgtggtgcagccctgttggcagtgggcatctgggtgtcaatcgatggggcatcctttctgaagatcttcgggccactgtcgtccagtgccatgcagtttgccaacgtgggctacttcctcatcgcagccggcgttgtggtctttgctcttggtttcctgggctgctatggtgctaagactgagagcaagtgtgccctcgtgacgttcttcttcatcctcctcctcatcttcattgctgaggttgcagctgctgtggtcgccttggtgtacaccacaatggctgagcacttcctgacgttgctggtagtg

SEQ ID NO: 1614 - DNA, 296 bp, Homo sapiens
  misc_feature 64, 187, 195: n = A,T,C or G
aggttcctcatctgctcgcgaggatgccttttctcttctgccttgcgaaataacagcagcctanctgttgcccgtgaccagtgagaaaggcagcgtcacgggctgattaggtttcacccaaagggtgccggcgccgaattggtttctaacgagaacttttaaaatgatccgttccaaaaaagggtangagccgcnagaccctccaactgcccagagaaaacaagtctcgtctggcaaaattctcggcccacgcggtccgcggccaaggggcaaaggtcctcgccccacgttgccga

SEQ ID NO: 1615 - DNA, 115 bp, Homo sapiens
ccctgttggcagtgggcatctgggtgtcaatcgatggggcatcctttctgaagatcttcgggccactgtcgtccagtgccatgcagtttgtcaacgtgggctacttcctcatcgc

SEQ ID NO: 1616 - DNA, 189 bp, Homo sapiens
gcagcaccggaggcccaggtctccgtgcagcccaacttccagcaggacaagttcctggggcgctggttcagcgcggacctcgcctccaactcgagctggctccgggagaaaaaggcggcgttgtccatgtgcaagtctgtggtggcccctgccacggatggtggcctcaacctgacctccaccttcctc

SEQ ID NO: 1617 - DNA, 103 bp, Homo sapiens
tatgacaagcaaaggaacatacttgcctggagatagcctttgcgatatttaaatgtccgtggatacagaaatctctgcaggcaagttgctccagagcatattg

SEQ ID NO: 1618 - DNA, 176 bp, Homo sapiens
aacccagctctgccctgtgtagagtttgatgagaaggtgactggaggccctgggaccaaaggcaagggaagaaggaatgagaagtacgatatggtgacagactgtggctacacaatctctcaagtgagatcaatgaagattctgaagcgatttggtggcccagctggtctatggac

SEQ ID NO: 1619 - DNA, 574 bp, Homo sapiens
  misc_feature 58, 278: n = A,T,C or G
ttggaaagccaggacacaacgctgctgcctgctttgtgcagggtcctccggggctcanccctgagttggcatcacctgcgcagggccctctggggctcagccctgagctagtgtcacctgcacagggccctctggggctcagccctgagctggcgtcacctgtgcagggccctctggggctcagccctgagctggcctcacctgggttccccaccccgggctctcctgccctgccctcctgcccgccctccctcctgcctgcgcagctccttccctangcacctctgtgctgcgtcccaccagcctgagcaagacgccctctcggggcctgtgccgcactagcctccctctcctctgtccccatagctggtttttcccaccaatcctcacctaacagttactttacaattaaactcaaagcaagctcttctcctcagcttggggcagccattggcctctgtctcgttttgggaaaccaaggtcaggaggccgttgcagacataaatctcggcgactcggccccgtctcctgagggtcctgctggtgaccggcctggaccttggccctacagccc

SEQ ID NO: 1620 - DNA, 484 bp, Homo sapiens
  misc_feature 331: n = A,T,C or G
tcggcacgagggggacccaagagcagtttccacccagccccaatcccagtctggcaccagcgatcaggtcctttatgggcagctgctgggcagccccacaagcccagggccagggcactatctccgctgtgactccactcagcccctcttggcgggcctcacccccagccccaagtcctatgagaacctctggttccaggccagccccttggggaccctggtaaccccagccccaagccaggaggacgactgtgtctttgggccactgctcaacttccccctcctgcaggggatccgggtccatgggatggaggcgctggggagcttctanggcttcctggggttcccttcttgggcctgcctcttaaaggcctgagctagctggagaagagggagggtccataagcccatgactaaaaactaccccagcccaggctctcaccatctccagtcaccagcatctccctctcctcccaatctccat

SEQ ID NO: 1621 - DNA, 638 bp, Homo sapiens
  misc_feature 631: n = A,T,C or G
tttttttcatgcttccacacctttcttgctgaaggacaaagtacataaaatgccggtgtttggcttccagatctgaaggaagctgtttagtactctggcaggatcacatcttgctgtggaacttcaaaacccacagcagagcttccttgcccttctctgggagctgctacctcctccacagtcttcagcttctcctctgctaggccctcctctagttccaggtcagccacctttatcccatcctccactgccttgggcaccattttgggggcctcttcagcatttatatctgcacctttaactttctctaaggcttgcaccttcatcagctcagcctgtgcccccttaactgcggcttgggccccatcgccttgaattttctctccttctggaatagctttcatgtcctcgttgccatcttggattggagaagggtctcggctagccttgtggctctcctggatgctgccatggctgctgctggcacttcccaggcgggaagaggccaccacagccttcaccgctgccttaagcttacgccgggcattgaattcttggagcttcttttgagcggtattcatgtgtaccaaattggctgctttacctgtgacccacggatgctggagagctngaaatga

SEQ ID NO: 1622 - DNA, 709 bp, Homo sapiens
tttttttgttaagtaacaacagatcttcctgctttactaaatctattcttcccccaagccctcgagaagccctggcaggaaccaggctggctactgagctctgggcgggggtaggggggtctggcctgctgcgggccaagttggggcaggacatacagcccattccatggggaggatgaggcccctgggggtcagtgaggcacggctctgcctcaaggccaccccctcctaaggacacagccatagtcgttgctgcccatcatctgcagggcactgacgcagggctccccgtcctcctcgtcaggctcctcctcgtcagcctcctcgtcggcgtggtatgacacgggcccgctctccaccagcaccgcctggggcctggcaggctcagctccgagggtgggagagcttgggagcaaagcctctcccgtggccaccttctttgctggctgcgtagacaccagaggcctcaaccttttccccacactggtcacagggtcagccccacttctgctggccggcgtcctccttcgtgacagcttcctggcactggcgctatgctcgggctgtgcatcctccctgtgcggactgccccccgcggcgctgctgaggccccggagcacgctataattgatcttgctggagatctttctctgctcccagcatctctcgatggcctccctggcgtactggcctgaattggctcccgtcg

SEQ ID NO: 1623 - DNA, 648 bp, Homo sapiens
ttcggcacgagggagtcagccagcatgaccgagcgccgcgtccccttctcgctcctgcggggccccagctgggaccccttccgcgactggtacccgcatagccgcctcttcgaccaggccttcgggctgccccggctgccggaggagtggtcgcagtggttaggcggcagcagctggccaggctacgtgcgccccctgccccccgccgccatcgagagccccgcagtggccgcgcccgcctacagccgcgcgctcagccggcaactcagcagcggggtctcggagatccggcacactgcggaccgctggcgcgtgtccctggatgtcaaccacttcgccccggacgagctgacggtcaagaccaaggatggcgtggtggagatcaccggcaagcacgaggagcggcaggacgagcatggctacatctcccggtgcttcacgcggaaatacacgctgccccccggtgtggaccccacccaagtttcctcctccctgtcccctgagggcacactgaccgtggaggcccccatgcccaagctagccacgcagtccaacgagatcaccatcccagtcaccttcgagtcgcgggcccagcttgggggcccagaagctgcaaaatccgatgagactgccgccaagtaaagcctt

SEQ ID NO: 1624 - DNA, 554 bp, Homo sapiens
aaaagaatacagaaagatggatgtgctttgcattcctacaaagatgtttgtcagatatgatatgtaaacataattcttgtatattatggaagattttaaattcacaatagaaactcaccatgtaaaagagtcatctggtagatttttaacgaatgaagatgtctaatagttattccctatttgttttcttctgtatgttagggtgctctggaagagaggaatgcctgtgtgagcaagcatttatgtttatttataagcagatttaacaattccaaaggaatctccagttttcagttgatcactggcaatgaaaaattctcagtcagtaattgccaaagctgctctagccttgaggagtgtgagaatcaaaactctcctacacttccattaacttagcatgtgttgaaaaaaaagtttcagagaagttctggctgaacactggcaacaacaaagccaacagtcaaaacagagatgtgataaggatcagaacagcagaggttcttttaaaggggcagaaaaactctgggaaataagagagaacaactactgtgatc

SEQ ID NO: 1625 - DNA, 452 bp, Homo sapiens
tcggcacgaggcctggaggttcagagagccgggctactctgagaagaagacaccaagtggattctgcttcccctgggacagcactgagcgagtgtggagagaggtacagccctcggcctacaagctctttagtcttgaaagcgccacaagcagcagctgctgagccatggctgaaggggaaatcaccaccttcacagccctgaccgagaagtttaatctgcctccagggaattacaagaagcccaaactcctctactgtagcaacgggggccacttcctgaggatccttccggatggcacagtggatgggacaagggacaggagcgaccagcacattcagctgcagctcagtgcggaaagcgtgggggaggtgtatataaagagtaccgagactggccagtacttggccatggacaccgacgggcttttatacggctcacagacaccaaatg

SEQ ID NO: 1626 - DNA, 548 bp, Homo sapiens
tttcgctttgcccattctgtttcagccagtcgccaagaatcatgaaagtcgccagtggcagcaccgccaccgccgccgcgggccccagctgcgcgctgaaggccggcaagacagcgagcggtgcgggcgaggtggtgcgctgtctgtctgagcagagcgtggccatctcgcgctgcgccgggggcgccggggcgcgcctgcctgccctgctggacgagcagcaggtaaacgtgctgctctacgacatgaacggctgttactcacgcctcaaggagctggtgcccaccctgccccagaaccgcaaggtgagcaaggtggagattctccagcacgtcatcgactacatcagggaccttcagttggagctgaactcggaatccgaagttggaacccccgggggccgagggctgccggtccgggctccgctcagcaccctcaacggcgagatcagcgccctgacggccgaggcggcatgcgttcctgcggacgatcgcatcttgtgtcgctgaagcgcctcccccagggaccggcggaccccagccatccag

SEQ ID NO: 1627 - DNA, 606 bp, Homo sapiens
  misc_feature 197, 531: n = A,T,C or G
ttcggcacgagggcgctgacttctatggaaaccagatcaagcccaaaatgttctgtgctggctaccccgagggtggcattgatgcctgccagggcgacagcggtggtccctttgtgtgtgaggacagcatctctcggacgccacgttggcggctgtgtggcattgtgagttggggcactggctgtgccctggcccanaagccaggcgtctacaccaaagtcagtgacttccgggagtggatcttccaggccataaagactcactccgaagccagcggcatggtgacccagctctgaccggtggcttctcgctgcgcagcctccagggcccgaggtgatcccggtggtgggatccacgctgggccgaggatgggacgtttttcttcttgggcccggtccacaggtccaaggacaccctccctccagggtcctctcttccacagtggcgggcccactcagccccgagaccacccaacctcaccctcctgacccccatgtaaatattgttctgctgtctgggactcctgtctangtgcccctgatgatgggatgctctttaaataataaagatggttgtgattaaaaaaaaaaaaaaaaaaaaaatttt

SEQ ID NO: 1628 - DNA, 484 bp, Homo sapiens
tttttttcagagagaaagtgctttatcagccgggctcagccccgcacacggactcgccaggagtaggtggtcagcacgcgctgctggcggcgcaccacgcaggtgtaggtgccctcattgacggcgttggcgatgatgctcaggtgcgcctcgcccagggccaggtagccggggtaggagaactccaggggctcctggtccttgtaccagtacactttccctttcttgtggaggatcttctggccgcagcggaaggtcacgttcctgccctcgggcaccagcctggttttggtcctggggggcggtggggtggtggccaccgtggggaaggggaattcgtagcagaagtcgcagctgctggggcagagcctcttcatgagccgccggcgagcgtcgcagaagcccctccgcgcccaggacgcgcacacgaacagcctgtcgaggcatccgtagagccggtgcagcccccacagctcgtcctggg

SEQ ID NO: 1629 - DNA, 620 bp, Homo sapiens
ttcggcacgaggccctggttgaaaacaattcagtaaagcatcctgcctcagaatgactttcctatcatgcttcatgtgtcattccaaggtttcttcatgagtcattccaagttttctagtccataccacagtgccttgcaaaaaacaccacatgaataaagcaataaaatttgattgttaagatacagtagtggaccctacttattcagtcaattaagagtaagtttttttatgtggttattaaaacagtatgaacaattagtctaactctgcatagacagggtctagattttgttaacccaaatgtataactgcagttagcttaaattacaatttgaagtcttgtggtttttatatagctaggcactttattactcttttgaactgaaagcacactcccttataggttcatgtaactgtcctgtaataaggtgcttataaatggaacaactacacagcctagttttgccacaacctttagcatctaaaaagttttaaaagcttctaaatgtctaatataaagggagatgcttatagccacaacatctattttaccaatattgtttccattacactaccttggattttgcatgagtgagtatagtaacccaagatgccat

SEQ ID NO: 1630 - DNA, 462 bp, Homo sapiens
  misc_feature 422, 439: n = A,T,C or G
tttttttacatgtctattttttattcaatatattaaatatattaatcagaaaagtcacatactataaatccaggaaaatacacaaatataaatgtcagaatctgtcatttgtcttcttcctagagtgacagtttatgtacatgtggaaggagggtaggaagagagagccagcaggaggctggaaaggctgcccaggaaggcggggccatcccttcctcccagccccgctcccacctcaagctctttcttcctgtatttacagcagcactgggcttatttacagcacggcgctatgtgttaaaaacggtttatcttacaaaaaacataaaggccggggcaaggctgggggggataagacaaatcgtggggtcaccccatgaaggcatccccctccccaagggcttgagctccctgcaaacctnctggagcaggtgagaangtggagtcattctgcagctcaag

SEQ ID NO: 1631 - DNA, 631 bp, Homo sapiens
ttcggcacgaggtgcttctaggtttcgtatattttcccaatttagaccttcaaaaaacgcatgctttttgaaatcctctattccattctgccccagccggcgttctctactgcagatcagtctctggatgaggtccttcgcttcttcagatacatccgtgacatgggatgggaactggaatcgctcttcatggttcatgatcttcccataggtctccacgagtgactccgcataaaacggcgtttctccatagagcatctcatacatgcagacacccagagaccaccagtcacactcaggcccgtatttgcccatgccgtcctccatcgcctgcaggatctccggcgagatgtagtcaggtgtgcccacggccacggaggactgcacagtgccatcatcattcatcttcaaacatgatccaaagtcagccaggcggatatgaccattcacgtccaaaaggacattgtcaggtttaatgtctctgtgcacgtaatgaagctgatggatggagtcaatggccagcaccatttcaccaatgtagaacctcgccatatcttccggaagcttgtcttcaaatttgctgagcagggtcagtaaatcaccacccacatagtaatccatgactaagtac

SEQ ID NO: 1632 - DNA, 723 bp, Homo sapiens
  misc_feature 4, 81, 113, 157, 253, 259, 464, 477, 490, 549, 569, 610,623, 630, 638, 650, 663, 701, 706, 714: n = A,T,C or G
gcgnccgcggcgggcgcccctgccagtgagcccctgtccgaagtgagccacggcattgactcggggctgcccgggggaggngcactgaggagggagttgcgcgcgcgaggcangggcgatggggccaagaagaaccggggcgatacgcggcaggtgnacagctgggacccgccgcggtcgggctgccccctcccctcgccccgaccgctcccctgctggtgagggcctgcggaggcggcggcggcggcgcctntggtgncagtggtggcggcggaagcttccccgggatcgtgtccggagctcgaggagagggtggtgcccggcgagctatgcacgggggcggcggcgtctcctcctgttccgcctcctcagtctcctcggtctcgcagaatccgccggcggccgcgccagggacatggagctcgagaaatcgtggccaactcgtgcttctgaaacgcgtcaangcagaatatgaanttccgatgatgangaccgaaatgattgtggactgtcaatttaagatagattcttcaatgataagtttgcaancccttttacaagaaatactnccagatgttgttacaagaatgtagatttggacttaaaggangagaacccttccnaaaaaanccttttanggaatttccttnaaggggaaatttnggccttaaaaggttggaatttcccaaaattccttaaanggggnccattttnaaaatccca

SEQ ID NO: 1633 - DNA, 423 bp, Homo sapiens
  misc_feature 212, 330, 380: n = A,T,C or G
tcggcacgaggcgaggaaacaggcttcggctcaggcacccgggccctggagcaagccctggagaagacgaaagccaacctcatccaggcagtgacacgacgattctccaccgagtatgagctgcagcagtggttcacagaaaacagcaaatagtccccagcccttgaagtcacccggcccccatgcaaggtgcccacatgtgtccatcccancggctggtgcagggcctccattcctggagcccgaggcaccagtgtcctcccctcaaggacaaagtctccagcccacgttctctctgcctgtgagccagtctagttcctgatgacccangctgcctgagcacctcccagcccctgcccctcatgccaaccccgccctangcctggcatggcacctgtcgcccagtgccctggggctgatctc

SEQ ID NO: 1634 - DNA, 573 bp, Homo sapiens
  misc_feature 345, 502: n = A,T,C or G
tgtctccctcctccccgaggatgcctggatcctgagccgccttgccctggctgcccaggagtgtgagcggggcttcctcacccgagagctctcgctcgtcactcatgccctgcaccacttctggcttcacaacctctgtgacgtctacctggaggctgtgaagcccgtgctgtggcactcgccccgccccctggggccccctcaggtcctgttctcctgcgctgacctcggcctccgcctcctggccccactgatgcccttcctggctgaagagctctggcagaggctgccccccaggcctggttgcccccctgcccccagcatctcggttgccccctaccctancgcctgcagtttggagcactggcgccagccagagctggagcggcgcttctcccgggtccaagaggtcgtgcaggtgctaagggctctccgagccacgtaccagctcaccaaagcccggccccgagtgctgctgcagagctcaaagcctggggaccanggcctcttcgaggccttcttggagcccctgggcaccctgggctactgtggggctgtgggcctgttaccccc

SEQ ID NO: 1635 - DNA, 448 bp, Homo sapiens
  misc_feature 172: n = A,T,C or G
atggtctggcccagcagcagactcagctgaacctgcgctccctgctggtgaacccggagggccccaccctgatgcggctcaactccgtgcagagctcggagcggcccctgttcctggtgcacccaatcgagggctccaccaccgtgttccacagcctggcctcccggctcancatccccacctatggcctgcagtgcacccgagctgcgccccttgacagcatccacagcctggctgcctactacatcgactgcatcaggcaggtgcagcccgagggcccctaccgcgtggccggctactcctacggggcctgcgtggcctttgaaatgtgctcccagctgcaggcccagcagagcccagcccccacccacaacagcctcttcctgttcgacggctcgcccacctacgtactggcctacacccagagctaccgggcaaagctgacccc

SEQ ID NO: 1636 - DNA, 578 bp, Homo sapiens
tggcacgagggggtgatgctaggcggctccctgggctccaggctgttgcggggtgtaggtgggagtcacggacggttcggggcccgaggtgtccgcgaaggtggcgcagccatggcggcaggggagagcatggctcagcggatggtctgggtggacctggagatgacaggattggacattgagaaggaccagattattgagatggcctgtctgataactgactctgatctcaacattttggctgaaggtcctaacctgattataaaacaaccagatgagttgctggacagcatgtcagattggtgtaaggagcatcacgggaagtctggccttaccaaggcagtgaaggagagtacaattacattgcagcaggcagagtatgaatttctgtcctttgtacgacagcagactcctccagggctctgtccacttgcaggaaattcagttcatgaagataagaagtttcttgacaaatacatgccccagttcatgaaacatcttcattatagaataattgatgtgagcactgttaaagaactgtgcagacgctggtatccagaagaatatgaatttgcacc

SEQ ID NO: 1637 - DNA, 639 bp, Homo sapiens
attcggcacgaggtggccaagctttacatgaacacgcaccctggccgcctgctgctcggcctcacgcttggcctctggctgaccaccgcctgggtgctgtccgtggccgagaggcaggctgttaatgccactgggcacctttcagacacactttggctgatccccatcacattcctgaccatcggctatggtgacgtggtgccgggcaccatgtggggcaagatcgtctgcctgtgcactggagtcatgggtgtctgctgcacagccctgctggtggccgtggtggcccggaagctggagtttaacaaggcagagaagcacgtgcacaacttcatgatggatatccagtataccaaagagatgaaggagtccgctgcccgagtgctacaagaagcctggatgttctacaaacatactcgcacgaaggagtctcatgctgcccgcaagcatcaacgcaagctgctggccgccatcaacgcgtgagggccgctttgtatgcacacgtgtccatgtgcacccatgtccaagtcacctctctgcacggctgtgtgtgtgcatgtccatgcctgtccaggttccgccaggtgcggctgatacaccggaagctccgggaacaagtgaactccatggtggacatct

SEQ ID NO: 1638 - DNA, 897 bp, Homo sapiens
  misc_feature 356, 574: n = A,T,C or G
cgcctttgcccgaagcccggggacgaaccgacggaccgaccgcctggcgcacggacgcgggcctcgctttgtgttcggggctagcgtcggcgaggcttgagcttgcagcgcgcggcttccctgctttctcgcggccaccccggctccggcggcctcggcgcgcgaggggctggaggtgcgggaccgctctccgccggtcggtccgcgtgcggctgagcccaggccgccagcgccgcggccgcgtgcggtgtccctgagctcctgctccccgccgggctgctccgagcaacggtgcttcggagctccagactcgggctggcgggggggggatgattgtggggggggaggagtgtcgngaagcactacaagggtcctgaagtcagttgttgcatcaaatacttcatatttggcttcaatgtcatatggtggttgttgggaataacatttctgtgaattggactgtgggcatggaatgaaaggggagttctgtccaacatctcttccatcaccgatctcggcggcttttacgcagtttggctcttctgtgtggtgggaggagtgatgtgcattgtgngatgtgcatggtgcgatggagcgctactggaaacacattctgctgtagttttgtcgatgtcgtgggagatttctcgtggacgaagtgcgagtcggcgttggtgtaagacggatagagcagtgggtcggtgggaagattggcgtggggtgggtggtttattgtagttcttggtttggtgtggtgtggggtgtgtgggtggtgtgtggtgtgggtgggttgtgggtgtgggtgtgttggagaggggtggggtgtattttttatttgtttttggggggggtggtgggcggggtggggcgctgaacagggttcgtgagcgagctgga

SEQ ID NO: 1639 - DNA, 501 bp, Homo sapiens
gtctctttaaaatcatttttaaaaagttacaaaacaatatcattcatcatatattcttattttcctttttttaaaaaattaaagtaataaaaaagtcactttataaaataatataaaagggcttgatgggtggggccggtgggtgctgtctgagctggtggactgaggaatccagtgcttctcttctggctaccccctcgttgtcaggaaggacccccaggccacagatggggatgacagcaggtcccttgtctctggctgggctgtgggagaggggcagggaaagccggggcaggagggcagtgggcagacccagacaggggggacggctggggccctgtcccgaagagacgggagggcctgctggtggggggtgaggtggcactggggcagcgggtgtctgggcccctcagtgccggctcctcctccagacagtctgcctagcttccgttgctcagcatccccagcagctcactgggctccagtccctgcggctgggcc

SEQ ID NO: 1640 - DNA, 576 bp, Homo sapiens
cggcacgaggcgcgtgtgcgcccggtccccgcctgccgcaccatggagagctaccacaagcctgaccagcagaagctgcaggccttgaaggacacggccaaccgcctacgtatcagctccatccaggccaccactgcggcgggctctggccaccccacgtcatgctgcagcgccgcagagatcatggctgtcctctttttccacaccatgcgctacaagtcccaggacccccggaatccgcacaatgaccgctttgtgctctccaagggccatgcagctcccatcctctacgcggtctgggctgaagctggtttcctggccgaggcggagctgctgaacctgaggaagatcagctccgacttggacgggcacccggtcccgaaacaagctttcaccgacgtggccactggctccctgggccagggcctcggggccgcttgtgggatggcctacaccggcaaatacttcgacaaggccagctaccgagtctattgcttgctgggagacggggagctgtcagagggctctgtatgggaggccatggccttcgccagcatctataagctggacaacctt

SEQ ID NO: 1641 - DNA, 630 bp, Homo sapiens
attcggcacgagggaggagttcaaggcctgcctcatcagcctgggctacgacgtggagaacgaccggcagggtgaggccgagttcaaccgcatcatgagcctggtcgaccccaaccatagcggccttgtgaccttccaagccttcatcgacttcatgtcgcgggagaccaccgacacggacacggctgaccaggtcatcgcttccttcaaggtcttagcaggggacaagaacttcatcacagctgaggagctgcggagagagctgccccccgaccaggccgagtactgcatcgcccgcatggcgccataccagggccctgacgccgtgcccggtgccctcgactacaagtccttctccacggccttgtatggcgagagcgacctgtgaggccccagagacctgacccaacacccccgacggcctccaggaggggcctgggcagccccacagtcccattcctccattgccaggagatggccccaacaagcaccccgcttttgcagcagaggagctgagttggcagaccgggcccccctgaaccgcaccccatcccaccagccccggccttgctttgtctggcctcacgtgtctcaaattttctaagaaccaaaaaaaaaaagggaaaaaaa

SEQ ID NO: 1642 - DNA, 602 bp, Homo sapiens
  misc_feature 173, 536: n = A,T,C or G
ttcggcacgagggagatggtgatggcccagaaggcagcccgcaggccaggatcaggtctgctgcggccaggttccccaggtagatctctgccaccgtgcagctgctcttgtgcaggcagaagacgctgaggacaaagatgttctctagggtggccagcacgaacagcacccanaggaaggggggctggatggtgttgagccagcccagccactccacttgggggcatttgctctgggcaaaggtcccgttaagagtgggcccttgcaaggtgacattgagcatgtcggcgctgaaagaggccgtggtgggcacggagtcctcacaaacagacagaaacattgatatcttccagggagagaacatttggactcagagtgggatgtgagtgaggccacacctgggcttctccggagcaagcggcatgggcactcgacctgcttctgggtcggggtttcgtacgtagcagaacagctccctcgctgcgatctattgaaagtcagccctcgacacaagggtttgtctacgaatggtttancgccaggttccccacgaacgtgcggtgcgtgacgggcgaaggggcggccgcaagcttattcccttt

SEQ ID NO: 1643 - DNA, 556 bp, Homo sapiens
  misc_feature 492: n = A,T,C or G
ttcggcacgaggatcctcagtgcaaactcgctggcacagagatgttcaatgatggcctcagatttcaactcgttgtcacagggaggacacaccgttgtgccttggggcttggaggcttcggtggcattgggcggcgtcatggcgatgcagacgtccccctcggggaacttgtcacacttaagcatctcgggccagtagaagccgaagaactgcatgaccggctcgcacgaatcgcgcacggcctcgcagagccagcgacacgggtagatgggccggtccaggcagacgggcgcgaagagcgagcagaggaagacctgggtgccggcgtggcagttcttgttgagcaggggcacccagctgctggcctgctgcttcacctccgccatggtctcgtgctccagcaggttgggcagcaccatcttcttgtagcccacgttgtggcacagccgcaggtccgcggggatgtccacgcactgaggtggcttggtgtanaagcgcccgctctggtacgggccgatgtccgactggaagctcacgtagtcgtactcgctggccg

SEQ ID NO: 1644 - DNA, 462 bp, Homo sapiens
tttttttttacccaagagagcctttattcagccacactgacggctctgagcagagcacctcctggccccactggtacccaggaaacatgcccaggttaaagctgccccccagcgtaggggctgaggtatggtcagtgggctgaggcttgtagactgtcggggcagtctattgaaccagaaagacagttccttgccctggatggcctcagatgtctttttccatccagaatatggggcgccccctcacattttgatattgtgtctccagcaggctttttgaagggggccctgatggaactgggggtgagatggtcaggcactcaggtaggggagggggtggtggcaatggaggtcccttggcacacttggggcagcttgggcagtcaggtttggggccttcctgggtggccggggagagggggctgtggggaaggcattaagcagggtggcaggcagcagtct

SEQ ID NO: 1645 - DNA, 172 bp, Homo sapiens
gagaagacgacagaagggaagggacccacaggaagttacagtggtgcccacggatgtgtcagcctccagccacggggacgcgggattcaagaatgaagttgatacaggctcagtcaagaccttaaataaaaatttgtacaaagaaaaaaaaaaaaaaaaaaagtcgtatcga

SEQ ID NO: 1646 - DNA, 158 bp, Homo sapiens
  misc_feature 134: n = A,T,C or G
atacggctgcgagaagacgacagaaggggattagaggtgcattctttaatgcaccctgtgcacaggtcttttgcgagatacgcatgtgctgctgtcgcaacagatgattcaggatctgtctgcactgtaggcanaaaaaaaaaaaaaaaaaaaagtcg

SEQ ID NO: 1647 - DNA, 140 bp, Homo sapiens; identical to SEQ ID NO: 979

SEQ ID NO: 1648 - DNA, 291 bp, Homo sapiens
gataactccaggtacacacacttcctgacccagcactatgatgccaaaccacagggccgggatgacagatactgtgaaagcatcatgaggagacggggcctgacctcaccctgcaaagacatcaacacatttattcatggcaacaagcgcagcatcaaggccatctgtgaaaacaagaatggaaaccctcacagagaaaacctaagaataagcaagtcttctttccaggtcaccacttgcaagctacatggaggttccccctggcctccatgccagtaccgagccacagcg

SEQ ID NO: 1649 - DNA, 505 bp, Homo sapiens
ggtccttcttttcctgactgcagctcttttcattttgccatccttttccagctccatgatggttctgcaggtttctgcggccccccggacagtggctctgacggcgttactgatggtgctgctcacatctgtggtccagggcagggccactccagagaattacgtgcaccagttacggcaggaatgctacgcgtttaatgggacacagcgcttcctggagagatacatctacaaccgggaggagttcgtgcgcttcgacagcgacgtgggggagttccgggcggtgacggagctggggcggcctgatgaggagtactggaacagccagaaggacatcctggaggaggagcgggcagtgccggacagggtatgcagacacaactacgagctggacgaggccgtgaccctgcagcgccgagtccagcctaaggtgaacgtttccccctccaagaaggggcccctgcagcaccacaacctgcttgtctgccacgtgacagatttctac

SEQ ID NO: 1650 - DNA, 575 bp, Homo sapiens
gatcccgctctggtgccgctgcagccggcagagatggttgggctcatgttcccgctgttgctcctccttctgcccttccttctgtatatggctgcgccccaaatcaggaaaatgctgtccagtggggtgtgtacatcaactgttcagcttcctgggaaagtagttgtggtcacaggagctaatacaggtatcgggaaggagacagccaaagagctggctcagagaggagctcgagtatatttagcttgccgggatgtggaaaagggggaattggtggccaaagagatccagaccacgacagggaaccagcaggtgttggtgcggaaactggacctgtctgatactaagtctattcgagcttttgctaagggcttcttaactgaggaaaagcacctccacgttttgatcaacaatgcaggagtgatgatgtgtccgtactcgaagacagcagatggctttgagatgcacataggagtcaaccacttgggtcacttcctcctaacccatctgctgctagagaaactaaaggaatcagccccatcaaggatagtaaatgtgtcttccctcgcacatca

SEQ ID NO: 1651 - DNA, 362 bp, Homo sapiens
ggtcaacagggaatgcctcgtgggagaaaaaagacaattttattctcagcgctgattttgagatgatgggcttgggaaacgggcgtcgcagcatgaagtcgccgcccctcgtgctggccgccctggtggcctgcatcatcgtcttgggcttcaactactggattgcgagctcccggagcgtggacctccagacacggatcatggagctggaaggcagggtccgcagggcggctgcagagagaggcgccgtggagctgaagaagagcgagttccagggagagctggagaagcagcgggagcagcttgacaaaatccagtccagccacaacttccagctggggagcgtcaacaagctgtaccag

SEQ ID NO: 1652 - DNA, 543 bp, Homo sapiens
gacagaggggagtgccccaggagctatgacaagcaaaggaacatacttgcctggagatagcctttgcgatatttaaatgtccgtggatacagaaatctctgcaggcaagttgctccagagcatattgcaggacaagcctgtaacgaatagttaaattcacggcatctggattcctaatccttttccgaaatggcaggtgtgagtgcctgtataaaatattctatgtttaccttcaacttcttgttctggctatgtggtatcttgatcctagcattagcaatatgggtacgagtaagcaatgactctcaagcaatttttggttctgaagatgtaggctctagctcctacgttgctgtggacatattgattgctgtaggtgccatcatcatgattctgggcttcctggcatgctgcggtgctataaaagaaagtcgctgcatgcttctgttgtttttcataggcttgcttctgatcctgctcctgcaggtggcgacaggtatcctaggagctgttttcaaatctaagtctgatcgcattgtgaat

SEQ ID NO: 1653 - DNA, 520 bp, Homo sapiens
ctgcaatcgcagccgggagcccgcagcccgcgccccgagcccgccgccgcccttcgagggcgccccaggccgcgccatggtgaaggtgacgttcaactccgctctggcccagaaggaggccaagaaggacgagcccaagagcggcgaggaggcgctcatcatcccccccgacgccgtcgcggtggactgcaaggacccagatgatgtggtaccagttggccaaagaagagcctggtgttggtgcatgtgctttggactagcatttatgcttgcaggtgttattctaggaggagcatacttgtacaaatattttgcacttcaaccagatgacgtgtactactgtggaataaagtacatcaaagatgatgtcatcttaaatgagccctctgcagatgccccagctgctctctaccagacaattgaagaaaatattaaaatctttgaagaagaagaagttgaatttatcagtgtgcctgtcccagagtttgcagatagtgatcctgccaacattgttcatgac

SEQ ID NO: 1654 - DNA, 621 bp, Homo sapiens
tcggcacgagggcagcttcactccatgtcatatatggcagtgaatatttcaaaacgttgggaataagggcctgcaaaaggcagcgaggaggcacctcgggtcttgaggttcctgacaaccgatctggtctgttggtttgaggatgaaggggctccatttctgctgcctccctgctgagaatattctccctttagcagccaaagattcgctggaacggaggctgccctctgctgcctgttggggtcggaagacaaggggcttctgaaatgggagttcctgagatacaacaaaatgtgtgccttcaaagaaactgacagctttgtatttggtgaaatggttttaattatactccatgtgtattttgcccactttttttgggaattcaagggaaagtgtttcttgggtttggaatgttcagaggaagcagtattgtacagaacacggtattgttatttttgttaagaatcatgtacagagcttaaatgtaatttatatgtttttaatatgccattttcattgaagtattttggtcttaagatgactgtagtaatttaactgtttatgttacccacgttgggatccagttggtcttggtttgcttctctctgtaccacgtgcaca

SEQ ID NO: 1655 - DNA, 649 bp, Homo sapiens
accgcaatgacatcatgctggtgaagatggcatcgccagtctccatcacctgggctgtgcgacccctcaccctctcctcacgctgtgtcactgctggcaccagctgcctcatttccggctggggcagcacgtccagcccccagttacgcctgcctcacaccttgcgatgcgccaacatcaccatcattgagcaccagaagtgtgagaacgcctaccccggcaacatcacagacaccatggtgtgtgccagcgtgcaggaagggggcaaggactcctgccagtctcttcaaggcattatctcctggggccaggatccgtgtgcgatcacccgaaagcctggtgtctacacgaaagtctgcaaatatgtggactggatccaggagacgatgaagaacaattagactggacccacccaccacagcccatcaccctccatttccacttggtgtttggttcctgttcactctgttaataagaaaccctaagccaagaccctctgcgaacattctttgggcctcctggactacaggagatgctgtcacttaataatcaacctgggggttcgaaatcagtgagacctggattcaaattctgccttgaaatattgtgactctgggaaaatgacacacctggtttgtctctgttgtat

SEQ ID NO: 1656 - DNA, 579 bp, Homo sapiens
tcggcacgaggtcatgggtgaagacacctacccctaccagggcaaggatggttattgcaagttccaacctggaaaggccatcggctttgtcaaggatgtagccaacatcacaatctatgacgaggaagcgatggtggaggctgtggccctctacaaccctgtgagctttgcctttgaggtgactcaggacttcatgatgtatagaacgggcatctactccagtacttcctgccataaaactccagataaagtaaaccatgcagtactggctgttgggtatggagaaaaaaatgggatcccttactggatcgtgaaaaactcttggggtccccagtggggaatgaacgggtacttcctcatcgagcgcggaaagaacatgtgtggcctggctgcctgcgcctcctaccccatccctctggtgtgagccgtggcagccgcagcgcagactggcggagaaggagaggaacgggcagcctgggcctgggtggaaatcctgccctggaggaagttgtggggagatccactgggacccccaacattctgccctcacctctgtgcccagcctggaaacctacagac

SEQ ID NO: 1657 - DNA, 366 bp, Homo sapiens
ttttacacataaaaaacctacagtttttattattagattccatcaatcctaccagaaaggggatcccggactccatggctcatggttcacagggacccaagcaagcatacggtcaacagctcaagcagcagcactgggtgggatctggaggtgcctgagtgggattctggggcacctgggccgggcccaagacatgcctgaagtgagattcagccagggttctctgaatccagtctgtgtagcttagcacctgggtgtagacaccaggccggaaagcgggggcacagcgaatccccagctcacaatgccggcctggatccacgtatcattgatggggcagaccagcggccccccggagtcaccctc

SEQ ID NO: 1658 - DNA, 551 bp, Homo sapiens
tagtggatcccccgggctgcaggaattcggcacgaggtttgtctcttcagggtcaggaggaggatatgggggtggcatgagggtctgtggctttggtggaggggctggtagtgttttcggtggaggctttggagggggcgttggtgggggttttggtggtggctttggtggtggcgatggtggtctcctctctggcaatgagaaaattaccatgcagaacctcaatgaccgcctggcctcctacctggacaaggtacgtgccctggaggaggccaatgctgacctggaggtgaagatccatgactggtaccagaagcagaccccagccagcccagaatgcgactacagccaatacttcaagaccattgaagagctccgggacaagatcatggccaccaccatcgacaactcccgggtcatcctggagatcgacaatgccaggctggctgcggacgacttcaggctcaagtatgaaaatgagctggccctgcgccagggcgttgaggctgacatcaacggcttgcgccgagtcctggatgagctgaccctgg

SEQ ID NO: 1659 - DNA, 660 bp, Homo sapiens
actgtattttctgggtttattcccccttgttccaagctctaagcctcagcttactccacctccatagcctgcacagtttcctccactagctccagggttagtggcttcactgtctgggtcaggacagctgtggttccaggcacaaagtggtagcggccagacctcttcacgggctctgtgggtgagctcagtgtccgcagcagcttggcgccagtctttgtgatcacacatgcgtccacattgcccccggagcccaggtcacccaagatcccggcggtgacggcttccaccagcagcccctgagcagcctccagcgtcatgttcggctggaaccggtcttctagcaccgccagggccgcgtcctgaccagagcccagggctgtgaagggcagacggctgtaggagccatggggatgcacaccgtagagctgcggtccagtcaggtctacgccgcccacgatcagcgatgcacccacgtggccctggtacctgaagagcgtctggcgcaggatggcagtgaccgtggccacgcggggctcgcggccggtagataacgcgtgtagctccatcttggacgccaccatccgtgtggtcatctcggcgtccggggtactccagcccacaagagtaaattttgggggcgatgaagtggattttctc

SEQ ID NO: 1660 - DNA, 480 bp, Homo sapiens
  misc_feature 386: n = A,T,C or G
ccgagccaacaacctttattgtcaccaggcaaggaagcagggggaagggactgaagcagggggctgaggctggagaggccggaaactttggggcaaagggggcggctgccccctccccccggggtggccgcccggggtagctaagtccccaccggggggtctgggggacctccccccgggaggagatgaccttgccatcctggacctcttccaaaatggtacgcccctgagggggggtcaccggttctttcttgtaatgagtcaggggggcatcccccccccccagcaggcggcggtagggggtaatctcctgctccagccgcgtcctcacatccagcaggatttggaatatctggttctgcagctccatcccgaagcgaaggggncccagttgctcccccactctgccaatcagcccctggattctgggaaacctccacgcaatagggttttctcttgtccccgccaggttgaccctcc

SEQ ID NO: 1661 - DNA, 616 bp, Homo sapiens
  misc_feature 310, 360, 405: n = A,T,C or G
acaacgaggaacaggcttcggctcaggcacccgggccctggagcaagccctggagaagacgaaagccaacatcaagtgggtgaaggagaacaaggaggtggtgctccagtggttcacagaaaacagcaaatagtccccagcccttgaagtcacccggccccgatgcaaggtgcccacatgtgtccatcccagcggctggtgcagggcctccattcctggagcccgaggcaccagtgtcctcccctcaaggacaaagtctccagcccacgttctctctgcctgtgagccagtctagttcctgatgacccangctgcctgagcacctcccagcccctgcccctcatgccaaccccgccctangcctggcatggcacctgtcgcccagtgccctggggctgatctcanggaagcccagctccagggccagatgagcagaagctctcgatggacaatgaacggccttgctgggggccgccctgtaccctctttcacctttccctaaagaccctaaatctgaggaatcaacagggcagcagatctgtatatttttttctaagagaaaatgtaaataaaggatttctagatgaaaaaaaaaaaaaaaaaaaaaaaaaatttt

SEQ ID NO: 1662 - DNA, 494 bp, Homo sapiens
ttcggcacgaggcaccagccccagtccccagctgtgccgcttgctgggcacagagcctctggtaactgccccctgatacacacagtgcccggggatagaacccgtgtgcgtggacctgggtgactgggaggccaccgagcgggcgctgggcagcgtgggccccgtggacctgctggtgaacaacgccgctgtcgccctgctgcagcccttcctggtagtcaccaaggaggcctttgacagatcctttgaggtgaacctgcgtgcggtcatccaggtgtcgcaagtgacctgccctgtgggctggacgggaattctcgtgagtgatgccagctctgcctcacggtctcgctgcgattccagattgtggccaggggcttaatagcccggggagtcccaagggccatcgtgaatgtctccagccagtgctcccagcgggcagtaactaaccataacgtctactgtgagtgccccagctgtgccctcagccccacccc

SEQ ID NO: 1663 - DNA, 428 bp, Homo sapiens
  misc_feature 298, 351, 413: n = A,T,C or G
caccttctacctatgtggagtttacagtgtctggcactgactgtgttgctaaagaggccacagaggcagccaagtgtaacctgctggcagaaaagcaatatggcttttgtaaggcaacactcagtgagaagcttggtggggcagaggttgcagtgacctgcacggtgttccaaacacagccctgtgacctcacagccccaaccagaaggtgccaatgaagcagtccccaccccctgtggtggacccagatgcacctccgtcccctccacttggcgcacctggactccctccagctggntcacccccacgactcccatgtgttactggcagctcctccaggacaccagttgnaccgggcgcactacgacctgcgccaacacctttcatgggtgtgggtctcattggggtcaccnttcaggagaagtgtt

SEQ ID NO: 1664 - DNA, 459 bp, Homo sapiens
  misc_feature 219, 289, 318, 422, 442: n = A,T,C or G
gacagcgccctgtgtgagggctccccggacctgcccgtcagcttctctccgaccctgctgtcactctcactcgtcaggacgggagtcacccagctgaaggccggcagcttcctgagaattccgtctctgcacctgctcctcttcacctccaactccttctccgtgattgaggacgatgcatttgcgggccttgtcccacctgcaggtacctcttcatcngaggacaatgagattggctccatctctaagaatgccctcagaggacttcgctcgcttacacacctgtgcngtgcctccaccgccccagccctccatgangaggcacccatgctccaccccccagggaaacacaagggtatccttggtggcttgctggacggtggccttctctttccttccaaccaaggaaaggcctggggccnaattaaaccaattcttgggnaggaaccccttcccccc

SEQ ID NO: 1665 - DNA, 551 bp, Homo sapiens
ttcggcacgaggagggcttccaccccgaccccaaggccctcaagggcttccaccccgaccccaaggccctcaagggtttccacactgaccccgaggccctcaagggcttccaccccgaccccaaggccctcaagggcttccaccccgaccccgaggccctcaagggcttccaccccgaccccgaggccctcaagggcttccaccccgaccccgaggccctcaagggcttccacactgaccccaatgccgaggaggcccctgagaacttaccctacctctcggacaaagatggcagctccagccacaggcagcccacgtcgaaagccgagtgccccaatctctgttttgaaggaaaccttaccccaaagcttctacactctgacttagctcctactctgctggagtgaaaatctacccacgacgctcacaaacttataattcctcctcaccacaagtttatgtgttaaaaaccatcatcataaaaggaaatgagacccgtatctgaaggaaacagatgttcggtacacggacgacgccgactctcccatcac

SEQ ID NO: 1666 - DNA, 574 bp, Homo sapiens
ccgctcaacagattgtccatggaaatgcagaaattaatttcttatgtctttcagtcccttctttccactgaaaatcctatggatgaaacaaaattaggtaaaaggagaaaaggtttgctcttaccccattccaccgcgtcctcctccccgcccacctctgctcatgcctccacgatcaaatccccctcttcccctgccccggttatcagggccactcatgctccggttctctcctggtccggaaaatcctccagactcctgcccataaacacccatgctactggggtggtcctgtcggaatgaacctgaggaaagagtcacatctgtaagccatggaccagcatttacaccactgcctgatgtactttctcctggaatcacaaaatcctcaattccaaggcactaaccaaggcaccatcttctttacatcacgataaagcatccttaataggtaggctcttttaagttcaacaaaactgctggatcatcacagctgaaataaccttatatagttagcctataataaacctcttctaataacaacaacaaaaaaagccctctggctaacatatag

SEQ ID NO: 1667 - DNA, 596 bp, Homo sapiens
  misc_feature 528, 553, 558, 578: n = A,T,C or G
gcttctataggagagctttagaatgaagtcatttagaggagcaggcgaatcctaaccgcatctctctctttagctggactgaacccaaacatgaatgtcaacagcatggacatgaccggtggcttgtcggtgaaggacccatcccagtcccagtcacgcctcccccagtggacgcaccccaactccatggataacttgcccagtgccgcttcccccctggagcagaaccctagcaagcatggtgctatccctggaggtctaagcattgggcctccaggtaagtcctccattgatgactcctatggccggtacgatttaatccagaacagtgagtcaccagccagtcctcccgtagctgttccccatagctggtcacgtgccaaatctgacagtgataaaatctcaaatggctctagcatcaactggcccccaggtaagaccatgcaacacttctgtgcaacagcagcaggtcagaatgtgctccaagcctgcagagagtgattaggctgagaggaccagaattgagcnaggattggaagcgttaagcccagantttgnattttcttggaatccattgnagtcaatttgggtatggt

SEQ ID NO: 1668 - DNA, 372 bp, Homo sapiens
ttgggggcgcattggggatccaggagcaccagtcgtactggccgaagttgaccgcggcgtgctgggcggaggcggtgaagatcaccacggtcaggtactccgacagctgctcccggctcttgaccgacttggggaagcctgaggacttgcggccccgcatgccgtacacgtagacatcgttcacgaagtcctgcagctccgggtcctcctccaccacctggtcgccctcgtagtagatgtctaccacctcggccgtgaacctggctcagggggcgcacggggtgggcgacccagccaggtctgcggacggtgcccggcggcaaccccctcacggacgctgggactcccccaccccgtccccattcagcgcta

SEQ ID NO: 1669 - DNA, 465 bp, Homo sapiens
cggcacgagggattgttatattctcttgctcagttgacctctttattattatatagtgaccttatttttctcttcttacagtttttgtcttgaaatctattttgactgatacaagtgtagctactccagctcttttttgcttttgtcgccatggaatatctttttttcatctgcttattttcagcctatgtgtgtctttataagtgaaatgtgtttcttgtagacaacagataattgggtcttgtttttttatccattcagagccactctgtgtcttttgatttgagagtttagtgcgtttccattgttattaagaagtaaggatatgttctgccattgtattgtttgtcttttgcttgttttgtggtcttctcttcctttcttcattccttcatttcttttattgaaggtgattttgtcttgtggtatgatttaatttcttcctttttattttttaggtatatg

SEQ ID NO: 1670 - DNA, 533 bp, Homo sapiens
  misc_feature 137, 228: n = A,T,C or G
tcggcacgaggggcaggaaatagtctggcagcctctacagcagaagaaacggcaggcagtgcccagggtcgtgcccaggaggctgagcagctgctacgcggtcctctgggtgatcagtaccagacggtgaaggcccntactgagcgcaaggcccaaggtgtgctggctgcacaggcaagggcagaacaactgcgggatgaggctcgggacctgttgcaagccgctcangacaagctgcagcggctacaggaattggaaggcacctatgaggaaaatgagcgggcactggagagtaaggcagcccagttggacgggttggaggccaggatgcgcagcgtgcttcaagccatcaacttgcaggtgcagatctacaacacctgccagtgacccctgcccaaggcctaccccagttcctaacactgccccacatgcatgtctgcctatgcactgaagagctcttggcccggcagggcccccaataaaccagtgtgaacccccaaaaaaaaaaaaaaaaaaaaaaaattggggggggc

SEQ ID NO: 1671 - DNA, 648 bp, Homo sapiens
  misc_feature 290: n = A,T,C or G
tcggaacgaggacgatggggagaacctgtcggcgccattgcagttccgctctaaggaggtgtccaagagcaacgtggtggacgacatggtgcagagcaacccagtgctctatacgcccggcgaagagcctgaccactgcgtggtcatcaagtatgtgccgtacgtgggtgacagcaagcgcgcgctggatgagtatacctcggagctgatgctgggcggaaccaacacactggtgctgcacaacacgtgtgaggactcgctgctggccgcacccatcatgctggacctancgctgctgaccgagctgtgccagcgcgtgagcttctgcactgacatggaccccgagccgcaaaccttccaccccgtgctgtccctgctcagcttcctcttcaaggcgccactagtgccgcccggcagcccggtggtcaatgcgcttttccgccagcgcagctgcatcgagaacatcctcagggcctgcgtggggctcccgccacagaaccacatgctcctggaacacaaaatggagcgcccagggcccagcctcaagcgagttggacccgtggctgccacctaccctatgttgaacaagaaaggaccggtacccgctgccacaaatggctgcaccggtgatgccaatgggcatctgca

SEQ ID NO: 1672 - DNA, 517 bp, Homo sapiens
tcggcacgaggaatatattgactttatttgtctcctttcaggagcctcacagacatatccaggtaaaaagatcgttaaataaatgccttcagccatcgcaatgcaaaaataaatatcaatcctccagacgcagtagcagccgcgctgcgcccaaagtcccaacggccacgcctaacaattataaaagtgttcagcgagagtgttggcgtgagtgtgaatgggtgtgcgctggggggcacggtggagcggtgtgcaaaatcggagttgcaaaccatcggacaagggcatggagtggctacccgccgccgactcagcgcgggcgcgcctccccgcacacactcacagcagagttcgcactgggaagagttaaaaaataaacatttacaaggacgaggaaagcggccccgctcccggcgctcccgggccagggcgagcgcggcgaggggcgcaccgaccggttcgcagcggggcgggagtccgagcgcgcgaggagcggcggacccgggtccttgcggga

SEQ ID NO: 1673 - DNA, 615 bp, Homo sapiens
  misc_feature 84, 493: n = A,T,C or G
tcggcacgaggcgggcactggaccgcagaactggcactcgagtcccaggggccggaatgcgcttggagggagagggccgctcancgagggcgggacagaacctctcccgggctgggagtgcacggcgcggtgcgcccagggacctcagcatgaacaacctcacagagcttcagcctggcctcttccaccacctgcgcttcttggaggagctgcgtctctctgggaaccatctctcacacatcccaggacaagcattctctggtctctacagcctgaaaatcctgatgctgcagaacaatcagctgggaggaatccccgcagaggcgctgtgggagctgccgagcctgcagtcgctgcgcctagatgccaacctcatctccctgtcccggagaggagctttgaggggctgtcctccctccgccacctctggctggacgacaatgcactcacggagatccctgtcagggccctcaacaacctccctgccctgcangccatgaccctggccctcaaccgcatcagccacatccccgactacgcgttccagaatctcaccagccttgtggtgctgcatttgcataacaaccgcatccagcatctggggacccacagctt

SEQ ID NO: 1674 - DNA, 229 bp, Homo sapiens
gcccagtgtgccccttccgctgtcaatgccatcttcgagtggtccagtgttctgatttgggtctggacaaagtgccaaaggatcttccccctgacacaactctgctagacctgcaaaacaacaaaataaccgaaatcaaagatggagactttgagaacctgaagaaccttcacgcattgattcttgtcaacaataaaattaccaaagttagtcctggagcacttacacc

SEQ ID NO: 1675 - DNA, 55 bp, Homo sapiens
gctgtcgggagagcccaggattcaacacgggccttgagaaagtggctcttgtacc

SEQ ID NO: 1676 - DNA, 55 bp, Homo sapiens
ctggactcgcgcgccctgcaggtcgacactagtggatccaaagaattcggcacga

SEQ ID NO: 1677 - DNA, 482 bp, Homo sapiens
acagaagggctacagccgcctgcatctgtatccagcgccaggtcccgccagtcccagctgcgcgcgccccccagtcccgcacccgttcggcccaggctaagttagccctcaccatgccggtcaaaggaggcaccaagtgcatcaaatacctgctgttcggatttaacttcatcttctggcttgccgggattgctgtccttgccattggactatggctccgattcgactctcagaccaagagcatcttcgagcaagaaactaataataataattccagcttctacacaggagtctatattctgatcggagccggcgccctcatgatgctggtgggcttcctgggctgctgcggggctgtgcaggagtcccagtgcatgctgggactgttcttcggcttcctcttggtgatattcgccattgaaatagctgcggccatctggggatattcccacaaggatgaggtgattaaggaagtccaggag

SEQ ID NO: 1678 - DNA, 520 bp, Homo sapiens
gactcccgagctctactgactcccaacagagcgcccaagaagaagatggccataagtggagtccctgtgctaggatttttcatcatagctgtgctgatgggcgctcaggaatcatgggctatcaaagaagaacatgtgatcatccaggccgagttctatctgaatcctgaccaatcaggcgagtttatgtttgactttgatggtgatgagattttccatgtggatatggcaaagaaggagacggtctggcggcttgaagaatttggacgatttgccagctttgaggctcaaggtgcattggccaacatagctgtggacaaagccaacctggaaatcatgacaaagcgctccaactatactccgatcaccaatgtacctccagaggtaactgtgctcacgaacagccctgtggaactgagagagcccaacgtcctcatctgtttcatcgacaagttcaccccaccagtggtcaatgtcacgtggcttcgaaatggaaaacctgtcaccacaggagtgtcag

SEQ ID NO: 1679 - DNA, 352 bp, Homo sapiens
tcgcgccgccctgcaggtcgacactagtggatccaaagaattcggcacgaggcaagatgggtcaccagcagctgtactggagcacccgcgaaattcggccagggttctcgctcttgtcgtgtctgttcaaaccggcacggtctgatccggaaatatggcctcaattatgtgcccgccagtgtttccgtcagtacgcgaaggaatattcggtttcatttaagttggactaaatgctcttccttcagaggcttatccggggcatcttactcaatgaaaaaccatgataatttctttgtattaattaaaataaacattttgaaaaaccccttcaaaaaaaaaaaaaaaaaaaccc

SEQ ID NO: 1680 - DNA, 516 bp, Homo sapiens
cggcacgagggtgggagcaccaggatctcgggctcggaacgagactgcacggattgttttaagaaaatggcagacaaaccagacatgggggaaatcgccagcttcgataaggccaagctgaagaaaacggagacgcaggagaagaacaccctgccgaccaaagagaccattgagcaggagaagcggagtgaaatttcctaagatcctggaggatttcctacccccgtcctcttcgagaccccagtcgtgatgtggaggaagagccacctgcaagatggacacgagccacaagctgcactgtgaacctgggcactccgcgccgatgccaccggcctgtgggtctctgaagggacccccccccaatcggactgccaaattctccggtttgccccgggatattatagaaaattatttgtatgaataatgaaaataaaacacacctcgtggcaaaaaaaaaaaaaaaaaaaaaaaccttttggggccgaaattttttccctttaagggggggtaatttta

SEQ ID NO: 1681 - DNA, 262 bp, Homo sapiens
tttatctatatatatatgtttatttatttatttcatctttcctttttctcaggagtgaagggctcactgggtctgttgagaaccaggtcagatcaggaggtcgaggtcagttctgggagctctgtggtctccatgtcataatggttctttccgtcggaataggtcttccccttcaagacctctatgagctgctgtaggcgcttggcaaaagaaagtccttggggaagttttgtggtagatgagggtgtagggtggggggggg

SEQ ID NO: 1682 - DNA, 574 bp, Homo sapiens
tcggcacgaggtctcctttctattcggagcggctgaaggaggctcatgtcagactgtacccatccagccgctgcacatcacaacatttacttaacagaacagtcaccgacaacatgctgtgtgctggagacactcggagcggcgggccccaggcaaacttgcacgacgcctgccagggcgattcgggaggccccctggtgtgtctgaacgatggccgcatgactttggtgggcatcatcagctggggcctgggctgtggacagaaggatgtcccgggtgtgtacaccaaggttaccaactacctagactggattcgtgacaacatgcgaccgtgaccaggaacacccgactcctcaaaagcaaatgagatcccgcctcttcttcttcagaagacactgcaaaggcgcagtgcttctctacagacttctccagacccaccacaccgcagaagcgggacgagaccctacaggagagggaagagtgcattttcccagatacttcccattttggaagttttcaggacttggtctgatttcaggatactctgtcagatgggaagacatgaatgcacact

SEQ ID NO: 1683 - DNA, 599 bp, Homo sapiens
cttgacagaaaaaccatctgtgctggggctttgattgcgaaagactgggtgttgactgcagctcactgtaacttgaacaaaaggtcccaggtcattcttggggctcactcaataaccagggaagagccaacaaaacagataatgcttgttaagaaagagtttccctatccatgctatgacccagccacacgcgaaggtgaccttaaacttttacagctgacggaaaaagcaaaaattaacaaatatgtgactatccttcatctacctaaaaagggggatgatgtgaaaccaggaaccatgtgccaagttgcagggtggggcaggactcacaatagtgcatcttggtccgatactctgagagaagtcaatatcaccatcatagacagaaaagtctgcaatgatcgaaatcactataattttaaccctgtgattggaatgaatatggtttgtgctggaagcctccgaggtggaagagactcgtgcaatggagattctggaagccctttgttgtgcgaaggtgttttccgaggggtcacttcctttggccttgaaaataaatgcggagaccctcgtgggcctggtgtctatattcttctctc

SEQ ID NO: 1684 - DNA, 474 bp, Homo sapiens
cccttccgggcctggagagccgcacccagcagccttcgctaacccctctgtctactattaaggcctttgccactcagtcgggctcccaggacctgaaggccctcaataccagctaccagtcccagctcatcaaacccagccgcatgcgcaagtaccccaaccggcccagcaagacgcccccccacgaacgcccttacgcttgcccagtggagtcctgtgatcgccgcttctcccgctccgacgagctcacccgccacatccgcatccacacaggccagaagcccttccagtgccgcatctgcatgcgcaacttcagccgcagcgaccacctcaccacccacatccgcacccacacaggcgaaaagcccttcgcctgcgacatctgtggaagaaagtttgccaggagcgatgaacgcaagaagcataccaagatccacttgcggcagaaggacaagaaagcagacaaaagtgttg

SEQ ID NO: 1685 - DNA, 488 bp, Homo sapiens
ttcactctgtcgcccaggctggagtgcagtggtgtgatctcggctcactgcaacctctgcctcccgtgttcaagcagttctcctgcctcagcctcccaaatagctgggattacagttgcctgccaccacgcccagctaatttttatatttttagtacagatggggtttcaccatgttggccaggctggtctcgaactcctgacctcaagtgatccacccgccttggcctcccaaagtgctgggataataggtgtcagccaccgcacccagcctggagtggccttttatgagaggggacccgtcaaatctgtgccttatggaggggtccggcagcggccacaattgtcttgtcccctcaccccccaactccccctggaacacctctcccaggcaagacattttcacagcaccattcacaacggttgggccaaaaagaaacttttccttcatcatttcctgcactcgctgaccacaactttggacacccc

SEQ ID NO: 1686 - DNA, 452 bp, Homo sapiens
  misc_feature 452: n = A,T,C or G
gtagctctcttagaaattttattggtcctggagaaaggaaggcaaactctgcctcccgctcagagtccccccaaccctcactgtttcccgttgccattgatggggaggttcacgtactcatgggaggccaggaaggcttggagcttgggccgggcactgaggcgccccacatatgctgagagcagggggaacgcatccaggcagcagggtctcaaaaggcttcagttgcccgggcagtgcttcacatagtcatccttgcccgcctcatagttggtgtagatgagggagatgtatttgcagcggaggtcctccacgccgtcattcaccatgtccaccaagggctggcatcctgctggtccttcccatagagcccaagggtgcggcccagggtgacgcaggatggtattggactggtaaagggtgaggtctccgtcctggaacttggggagctn

SEQ ID NO: 1687 - DNA, 460 bp, Homo sapiens
  misc_feature 389: n = A,T,C or G
tcggcacgaggaagtggacgagatgtaccgggaggcacccattgataagaaaggcaacttcaactacgtggagttcacccgcatcctcaaacatggcgccaaggataaagacgactaggccaccccagccccctgacaccccagcccccgccagtcacccctccccgcacacacccgtccataccagctccctgcccatgaccctcgctcagggatccccctttgaggggttagggtcccagttcccagtggaagaaacaggccaggagaagtgcgtgccgagctgaggcagatgttcccacagtgaccccagagccctgggctatagtctctgacccctccaaggaaagaccaccttctggggacatgggctggagggcaggacctanaggcaccaagggaaggccccattccggggctgttccccgaggaggaagggaaggggctctgtgtgcccccc

SEQ ID NO: 1688 - DNA, 531 bp, Homo sapiens
ttcggcacgaggctgaagtgggttggccaggaggttcccccgaccggttggggagacttggggccagcgcttctggtctggtaaatatgtatgatgtgttgtgcttttttaaccaaggaggggccagtggattcccacagcacaaccggtcccttccatgccctgggatgcctcaccacacccaggtctcttcctttgctctgaggtcccttcaaggcctccccaatccaggccaaagccccatgtgccttgtccaggaactgcctgggccatgcgaggggccagcagagggcgccaccaccacctgacggctggggacccacccagcccctctcccctctctgctccagactcacttgccattgccaggagatggccccaacaagcaccccgcttttgcagcagaggagctgagttggcagaccgggcccccctgaaccgcaccccatcccaccagccccggccttgctttgtctggcctcacgtgtctcaaattttctaagaaccaaaaaaaaaaaaaaaaaaaatgcg

SEQ ID NO: 1689 - DNA, 542 bp, Homo sapiens
  misc_feature 404: n = A,T,C or G
cactactcagccctgcaggcagccgtggcagccctgatgtccagtacccaggctaatcagcccccgcgccttttcgtgccccacagcaagagggtggtggtggctgctcatcgcctggtgtttgttggggacaccctgggccggctggcagcctctgcccctctgagagcacaggtcagggctgcaggtacagcactgggccaggcattgcgggccactgtgctggctgtcaagggagctgccctgggctacccatccagccctgccatccaagagatggtgcagtgtgtaacagaactggcagggcaggccctgcaattcactaccctgctcactagcctggctccatgaaggtcctttggcacagctctgctcctcccctgcctgccaaagcccccctttangccttgggtggctggaaggctttgttaagggactaggagaaatgggggtatctttcccctttcctgccctttctgctcatctcaacctctcacagaggtgtcttctccccctaacctacagctttttgtacaagccat

SEQ ID NO: 1690 - DNA, 579 bp, Homo sapiens
tcggcacgagcactactaccactactcagacccggtgtgcaagcaccccaccttctccatctacgcccggggccgctacagccgcggcgtcctctcgtccagggtcatgggaggcaccgagttcgtgttcaaagtgaatcacatgaaggtcacccccatggatgcggccacagcctcactgctcaacgtcttcaacgggaatgagtgcggggccgagggctcctggcaggtgggcatccagcaggatgtgacccacaccaatggctgcgtggccctgggcatcaaactacctcacacggagtacgagatcttcaaaatggaacaggatgcccgggggcgctatctgctgttcaacggtcagaggcccagcgacgggtccagcccagacaggccagagaagagagccacgtcctaccagatgcccttggtccagtgtgcctcctcttcgccgagggcagaggacctcgcagaagacagtggaagcagcctgtatggccgggcccctgggaggcacacctggtccctgctgctggctgcacttgcctgccttgtccctctgctgcattggaacatccgcag

SEQ ID NO: 1691 - DNA, 501 bp, Homo sapiens
  misc_feature 349: n = A,T,C or G
gacttggcacgaggtacacatctggtgctggtgtccaccttctgcaggactgtgttcccgaaaccctgtgggagctgggctactggctgtgctacgtcaacagcaccatcaaccccatgtgctacgcactctgcaacaaagccttccgggacacctttcgcctgctgctgctttgccgctgggacaagaaacgctggcgcaagatccccaagcgccctggctccgtgcaccgcactccctcccgccaatgctgatagtcccctctcctgcatccctccaccccagtccccgggaaaggccggtgggaagagggcaggggctgcatcctcagccccagggccctgctcangcctcacctggcttcccaggaccctgggtcaccttcctgggcagcccaaagagaccctgccaactttccagacttcgctattcccaggcagggagggaaacccggggaactggtttttctgttccctgctgggtgggaatgcgctcttcacc

SEQ ID NO: 1692 - DNA, 438 bp, Homo sapiens
atctcgaaatagttgattccatacatttccaggtcctgagcaatcttcaggtattccaacatagcattatctttgagcatcccacggtgttccgcatgccacacctggatccggtcctcccactggtccctggtaagtttgtgctggtccatcactctttgagggatcagccgctcagagctgaggtacccagacttgtgcacttctttgttgtagtccccaaacttggcctgcacagcgtaggaccccaagagcacggcagtctcaggggggcagtagatctcatcgctaaggattccttccttcacttggaggaagaaaagtttctgggtgatgtcctggatgagctcctcagccacatcttcagggtagaacttggcccggaacttgaactggaggggattctccttcctgacctcctggggcagacaccttctt

SEQ ID NO: 1693 - DNA, 436 bp, Homo sapiens
  misc_feature 85: n = A,T,C or G
ctgtggcaaagatctcatctctggaggcacgggcatcttccagctctctttgaaagtccttcatctgagcctgcagtttgcgtantgcttgatggcttcctccctccccttgatggcagagtcggcctgaagctccaggtctttcaggtccccttccagcttcttctttgctgcagctgccagggcacgttgctttcgctcgtcttccagttccgtctcatactcgtgaagctgtctctgcagttgcctcctcttctcctcattctgctcgtcccgggcttggagatccctttcgaactggcccttgagcgcctgcatgttgacttccagccgcagtttggcgtcctccgtggcttgcagctcgtcctccagctcttccagctgcgtcttcatctcctccatctgggtctccagggcccgcttggacttctccaga

SEQ ID NO: 1694 - DNA, 582 bp, Homo sapiens
  misc_feature 331: n = A,T,C or G
tcggcacgagggagtaagtttgaggaacctgataagcgcaaagacaccaaggagatctacacgcacttcacgtgcgccaccgacaccaagaacgtgcagttcgtgtttgacgccgtcaccgatgtcatcatcaagaacaacctgaaggactgcggcctcttctgaggggcagcggggcctggcgggatgggccaccgccgactttgtaccccccaacccctgaggaagatgggggcaagaagatcacgctccccgcctgttcccccgccgcttttctcctctttcctctctttgttctcagctccccctgtcccctcagctccagacgtangggaggggttgccacaggcctccctgtttgaagcctgcccttgtctgagatgctggtaatggccatggtacccccttctgggcatctgttctggtttttaaccattgtcttgttctgtgatgaagggaggggggcacatgctgagtctcccaaggctgcgtctggaagggcccctgcttctccagcctggacccccagctttgcccaacaccagcccctgccccagcccaagtccaaatgtttacagggag

SEQ ID NO: 1695 - DNA, 373 bp, Homo sapiens
ttggccccacccccggcggggccacgggggccagcggccttggtgtgcgggccccggacacgaaggccccaaaagtcacccagccccctatgggcccaaatctccttcagccgccccaggtcttcacggagcttgtcgcccaaaccattggcaaggaccggcctgaaattcccacccttaaaacccttcggcctgtccaaaaaccagtcggggaccttcaactggcggggattccgcaaaagggggaccacacgttccaccacacccccagtgagcccccccccccccttggggaggcccaacggtggttgcccacaagaccactgggcaaattcttgggcccaaaccctaaagggcagtgatgcgaaaggct

SEQ ID NO: 1696 - DNA, 339 bp, Homo sapiens
tcggcacgagggccggaagtggtgaagacgcacctgcgggacatgatcatcctacccgagatggtgggcagcatggtgggcgtctacaacggcaagaccttcaaccaggtggagatcaagcccgagatgatcggccactacctgggcgagttctccatcacctacaagcccgtaaagcatggccggcccggcatcggggccacccactcctcccgcttcatccctctcaagtaatggctcagctaataaaggcgcacatgactccaaaaaaaaaaaaaaaaaaaaaaaaaaaaaaaaaaaaaaaaaaaaaaaaaaaaaaaaaaaaaaaaaaaaaaaaaa

SEQ ID NO: 1697 - DNA, 491 bp, Homo sapiens
ttttttttttttttttttacaaataaacggggcttttattgtgtgtccacaaaaacaaagtcagggtggcctttggttaatcccctccccccaacaagatgacaaaaggaggaatgcatgtcaacaaaatgacaaagaggaccatggagggcctgagtctgctgcctccctggtgggacaaggcagggggagcaagcactactctgggctaggccagcgccccccaagcaaaaacacataaagcccctgcccctgcccccacccccacccccactgctaaggcagtcagccaggacttccccaaagacctagctctgaagcccagaccctcatggctccctctagaaggggttgccttcttcagcctgcatgaagtggtaaatgaagaagaggacgatcacaaagaccaggaaaagcagcagctggccccagagcgggacctggcgatcctggcccagccagccccaggagcacggttttcaggccggatg

SEQ ID NO: 1698 - DNA, 518 bp, Homo sapiens
  misc_feature 109: n = A,T,C or G
tcggcacgagggccctttctccctccgcctccatccttgtcttcctcttccatcttttcatgatgggaaatctcatctgaaccttgttccctctcctcctcttgtttangctcttctgaactgatctgcccattttttaatgacattaccactgtttcctcctggctttcagttgttttctcttccaccatcacctctacctgattttctccaatgctccctcgctttggcttctcctcttcctcctcctccttttccttgtcttctttcttgttttcttcagcatccctccaatcattcttctggtaggacttggtgactgtttctgtttcctctatctcgtatctttcttggcgactttcacttttttcttccttctcggtagtttcattttctgctgtgtcattttgcattcttctgcttgggagcgacagacttgcatctgttattgttgggtcgaactccttctgccgctccagagcctcctgaaggcgtttttggcgtctttcctcacgccg

SEQ ID NO: 1699 - DNA, 495 bp, Homo sapiens
  misc_feature 301: n = A,T,C or G
tcggcacgaggttgtgcgtccctggaagtggggacccccttgtccctcctccctcccctgttgtctggccgtcgtcaaccccaccttgactgagtgttgagcccgtccttgggctctggtccctgcggggcaggctctcccgggcccacggggcggacgctgcataccaatttgccctgcaccgcctgtcccggagacggagcccgaaggcctgccatggcggctgtgtcgaggatgcgtggcgcctgccgtggcgggacagcgtgggcaggctcatttctgcccccaacccgggccccangacaggtcagcgcgccctgccccggtgcccaccgctgccccccatccgccctcctgccacttgcccctgacccccctgccgtgcctcccgcagccctcccatgccgttccactcctccctgcctctgagccgaacatgataataaaagctattattgagcgcttaaaaaaaaaaaaaaaaaaaaaattgggggc

SEQ ID NO: 1700 - DNA, 476 bp, Homo sapiens
  misc_feature 372: n = A,T,C or G
atcacctactacccagccatgaaggctgtgaacgagcagggcaaggaggtgaccgagttcggcaataagtactggctcatgctcaacgagaaggaggcccagcaagtgtatggtgggaaggaggccaggacggaggagatgaagtggcggcagtgggcggacgactggctggtgcacctgatctcccccaatgtgtaccgcacgcccaccgaggctctggcgtcctttgactacattgtccgcgagggcaagttcggagccgtggagggtgccgtggccaagtacatgggtgcagcggccatgtacctcatcagcaagcgactcaagaacaggcaccgcctccaggacaacgtgcgcgaagacctctatgangctgctgacaagtgggtggctgctgtgggcaaggaccggcccttcatggggggccagaagccgaatctcgctgatttggcggtgtatggcgtgctgcgtgtgat

SEQ ID NO: 1701 - DNA, 453 bp, Homo sapiens
tgctaagaattttatatatttacaaatatatcacatttaaagacatctgaataaaatatcaaagtttatactagtgtttttccccttgacatcacatcctcgcttctgttttcgccatgtgacatgcaagtttggccttccaccatgattgtaagcttcctgaggcctccttagaagccgagcagatgccagctccatgcttcctgtacagcaatctttcaaggagacctaacccagaaaatgagccattcttcagctcggatatcttattgttactcagaatcagggtgaccgtgcggttgggcagagtatctgggggcaggacctgcgcgagttccaggctgctgcacaccaccttgccctcggcggcgcccgccgccctgccagcccctcggggccgcccatcgtgcttgcagccggcgggcagcgccgcggcgccgccgccgccgccgc

SEQ ID NO: 1702 - DNA, 347 bp, Homo sapiens
  misc_feature 201, 204, 208, 307: n = A,T,C or G
attcggcactagggcagacatcagctcctggttcaacgaggccattgacttcatagactccatcaagaatgctggaggaagggtgtttgtccactgccaggcaggcatttcccggtcagccaccatctgccttgcttaccttatgaggactaatcgagtcaagctggacgaggcctttgagtttgtgaagcagaggcgaanatncatnctctcccaacttcagcttcatgggccagctgctgcagtttgagtcccagggtgctggctccgcactgttcggcagaggctggggagccccgccatgggntgtgctcgaccgagggcaccttcaccaccaccgtgtttca

SEQ ID NO: 1703 - DNA, 357 bp, Homo sapiens
  misc_feature 306: n = A,T,C or G
tgacggagccgagtctccaattgtaggctctacggaaatgaacttgctggtcctgcccaggcaaatgggcttagttccctatttatttatcctccagcaacagaactgagttcactcggtatctgaaattgacttttccagcagaaagtttttgtgggtatgggcactggccttggctttgagcaagcttgatgaatgttggatatttctggatttcagggtggcccggtggaaatcctgccctttctgtacctgggcagtgcgtatcacgcttcccgcaaggacatgctggatgccttgggatanactgccttgatcaacgtctcagccaattgtccccaaccattttgagggtca

SEQ ID NO: 1704 - DNA, 118 bp, Homo sapiens; identical to SEQ ID NO: 275

SEQ ID NO: 1705 - DNA, 51 bp, Homo sapiens
tgtctcacctgtgaaaaatcagggtgcctgcggcagttgctggactttctc

SEQ ID NO: 1706 - DNA, 464 bp, Homo sapiens
cgggtagaagtggaggggccgttcgaagagtcgtgagggggtgacgggttaagattcggagagagaggtgctagtggctggacttgacctggaaagaatcttctgctgactctcaactttttcctgggaaaaaatggatcattcccaccatatggggatgagctatatggactccaacagtaccatgcaaccttctcaccatcacccaaccacttcagcctcacactcccatggtggaggagacagcagcatgatgatgatgcctatgaccttctactttggctttaagaatgtggaactactgttttccggtttggtgatcaatacagctggagaaatggctggagcttttgtggcagtgtttttactagcaatgttctatgaaggactcaagatagcccgagagagcctgctgcgtaagtcacaagtcagcattcgctacaattccatgcctgtcccaggac

SEQ ID NO: 1707 - DNA, 558 bp, Homo sapiens
tcggcacgagcagaaacaacttttttcacaacgggaaaggaaagaacactagtgttctttcagtaaagtacaaagtgtttattttacaaaagagtaggtactcttgagagcaattcaaatcatgctgacaaggatactgatagaaaaagtgatttcttcttattataaagtacatttaaagttcaaggactaaccttatttatttgggaaaggggaggaggaaggaaatgatatggtacccagacactgggctaggctgcaactttatctcatttaatactcccagctgtcatgtgagaaagaaagcaggctaggcatgtgaaatcactttcatggattattaatggatttaagagggcatcaatcagctcaactcaagatttcataatcatttttagtatttagattgtgcctcaaagttgtagtacctcacaatacctccactggtttcctgttgtaaaaaccttcagtgagtttgaccattgtgctcttggctcttgggctggagtaccgtggtgagggagtaaacactagaagtctttagtacaaaactgctct

SEQ ID NO: 1708 - DNA, 481 bp, Homo sapiens
tcggcacgagggagcctcctcgggaccaggacttcagggccacaggtgctgccaagatgctccagggcacctgctccgtgctcctgctctggggaatcctgggggccatccaggcccagcagcaggaggtcatctcgccggacactaccgagagaaacaacaactgcccagagaagaccgactgccccatccacgtgtacttcgtgctggacacctcggagagcgtcaccatgcagtcccccacggacatcctgctcttccacatgaagcagttcgtgccgcagttcatcagccagctgcagaacgagttctacctggaccaggtggcgctgagctggcgctacggcggcctgcacttctctgaccaggtggaggtgttcagcccaccgggcagcgaccgggcctccttcatcaagaacctgcagggcatcagctccttccgccgcggcaccttcaccgactgcgcgctggccaacatgac

SEQ ID NO: 1709 - DNA, 479 bp, Homo sapiens
gggccggcagtcatctcgcggccgttcagaattataaggctgtctgcagagatttgaaaaatggcaacaaatgaaagtgtcagcatctttagttcagcatccttggctgtggaatatgtagattcacttttacctgagaatcctctgcaagaaccatttaaaaatgcttggaactatatgttgaataattatacaaagttccagattgcaacatggggatcccttatagttcatgaagccctttatttcttattctgtttacctggatttttatttcaatttataccttatatgaaaaaatacaaaattcaaaaggataagccagagacatgggaaaaccaatggaagtgtttcaaagttcttctctttaatcacttctgtatccagctgcctttgatttgtggaacctatcattttacagagtatttcaatattccttatgattgggaaagaatgccaagatggtattttcttttggc

SEQ ID NO: 1710 - DNA, 587 bp, Homo sapiens
acagaaggggaatgtgataagttctttaaaagaggtaagagcaacgtgctttgggagcagagaagagggagaaagcagcatcttgcccggatgagccaggggacacagaagagaagcccactatctcatttaatctttacaactctcttgcaaggttccctggttgtgaaaatacatgagataaatcatgaaggccactatcgtcctccttctgcttgcacaagtttcctgggctggaccgtttcaacagagaggcttatttgactttatgctagaagatgaggcttctgggataggcccagaagttcctgatgaccgcgacttcgagccctccctaggcccagtgtgccccttccgctgtcaatgccatcttcgagtggtccagtgttctgatttgggtctggacaaagtgccaaaggatcttccccctgacacaactctgctagacctgcaaaacaacaaaataaccgaaatcaaagatggagactttgagaacctgaagaaccttcacgcattgattcttgtcaacaataaaattagcaaagttagtcctggagcacttacacctttggtgaagttggaacgac

SEQ ID NO: 1711 - DNA, 524 bp, Homo sapiens
tggatcccccgggctgcaggaattcggcacgaggtcctgctgagctctgttctctccagcacctcccaacccactagtgcctggttctcttgctccaccaggaacaagccaccatgtctcgccagtcaagtgtgtccttccggagcgggggcagtcgtagcttcagcaccgcctctgccatcaccccgtctgtctcccgcaccagcttcacctccgtgtcccggtccgggggtggcggtggtggtggcttcggcagggtcagccttgcgggtgcttgtggagtgggtggctatggcagccggagcctctacaacctggggggctccaagaggatatccatcagcactagtggtggcagcttcaggaaccggtttggtgctggtgctggaggcggctatggctttggaggtggtgccggtagtggatttggtttcggcggtggagctggtggtggctttgggctcggtggcggagctggctttggaggtggcttcggtggccctggctttcctgtctgccctcct

SEQ ID NO: 1712 - DNA, 478 bp, Homo sapiens
ccgctgcaggctgcgcggatgcaggaggcacggggtggcgtggggtcgcatggctgcaggcttcggcgttcagtgattgtcgctgggcacagggggcgggcgctgggtgccagggaagcctggcacctttctccacaaggccgggccaactggcggcttgcatgtcttccacaaggggcttcaaacagcctccttgagggcgggcctggaaggtccggcctgccaggggtatctggtggggcctgttcttccagcttgggcggactcccgcaactggtctttcactctgtcaggcggtcgcgggtccggctgcccatctcttccatccgcgcgggagggttcggcccaggcttgggccgttcttttagcggtggcggtcaggggagccaaagtgggggccccagcgggcctgttttaacaaggggcccacgggctcgggaatgggtgggaggggcggcctggcgcctcgcggcccccg

SEQ ID NO: 1713 - DNA, 424 bp, Homo sapiens
agagaggaggcagccccctccacaccagtggcctcgtggttattagcaaggctgggtaatgtgaaggcccaagagcagagtctgggcctctgactctgagtccactgctccatttataaccccagcctgacctgagactgtcggagaggctgtctggggcctttatcaaaaaaagactcagccaagacaaggaggtagagaggggactgggggactgggagtcagagccctggctgggttcaggtcccacgtctggccaggcactgccttctcctctctgggcctttgtttccttgttggtcagaggagtgattgaaccagctcatctccaaggatcctctccactccatgtttgcaatgcttttatatggcccagccttgtaaataaccacaaggtccactccctgctccacgaagccttaag

SEQ ID NO: 1714 - DNA, 622 bp, Homo sapiens
  misc_feature 486, 570: n = A,T,C or G
cggcacgagggcctttgaggtgactcaggacttcatgatgtatagaacgggcatctactccagtacttcctgccataaaactccagataaagtaaaccatgcagtactggctgttgggtatggagaaaaaaatgggatcccttactggatcgtgaaaaactcttggggtccccagtggggaatgaacgggtacttcctcatcgagcgcggaaagaacatgtgtggcctggctgcctgcgcctcctaccccatccctctggtgtgagccgtggcagccgcagcgcagactggcggagaaggagaggaacgggcagcctgggcctgggtggaaatcctgccctggaggaagttgtggggagatccactgggacccccaacattctgccctcacctctgtgcccagcctggaaacctacagacaaggaggagttccaccatgagctcacccgtgtctatgacgcaaagatcaccagccatgtgccttantgtccttcttaacagactcaaaccacatggaccacgaatattctttctgtccagaagggctactttccacatatagagctccanggactgtcttttctgtattcgctgttcaataaacattgagtgagcacctccc

SEQ ID NO: 1715 - DNA, 449 bp, Homo sapiens
gctctgctaattttttattgttgtgtaatatatggagtcgcgctacttggtccatgctgatctcgaactcctgagattcattgatcctcccatctcggcctccccttctgcatattgtaggtgctcaataatgacctaccatatgcaggagttgatgtactcattgctcgggactttgttgcttgggtgaccctgaccttcatgctcctgcaccctaggcctggacgctgtcgatccaggtcgcatagctcgcctcgcgtgtgtatatcccgggcttcttgcggtatccgaaactcgcgacccgaggtgatcacgctctcgagcatgcctttgcatactagcgtgctcccggagtcatccttgcagctgtcccggtgattgctcttcgcgcacatcaagcgctcggtgatggcgccttcgtggttcgtgcgcctgatgcaggtggcgcg

SEQ ID NO: 1716 - DNA, 266 bp, Homo sapiens
aggagcctaagcaagaacagcttaagccccgacggggggtgccccccccccttcagaggcctgggcggggggggcggcagccccgtctcccggggggggcggggcgcccccgtcctcaggggggggttgctgtatgggcccagggggcccctgtaccccttcgggccggtctgcaaccccaggctgggtggcggtgaacccaggggcgggagagtccattcccccggaaatcccccctgggtcgcggccttcccagcagcagcctg

SEQ ID NO: 1717 - DNA, 403 bp, Homo sapiens
  misc_feature 310, 360: n = A,T,C or G
acaacgaggaaacagcttcggctcaggcacccgggccctggagcaagccctggagaagacgaaagccaacatcaagtgggtgaaggagaacaaggaggtggtgctccagtggttcacagaaaacagcaaatagtccccagcccttgaagtcacccggccccgatgcaaggtgcccacatgtgtccatcccagcggctggtgcagggcctccattcctggagcccgaggcaccagtgtcctcccctcaaggacaaagtctccagcccacgttctctctgcctgtgagccagtctagttcctgatgacccangctgcctgagcacctcccagcccctgcccctcatgccaaccccgccctangcctggcatggcacctgtcgcccagtgccctggggctgatctc

SEQ ID NO: 1718 - DNA, 603 bp, Homo sapiens
ttcggcacgaggctattggccacgatgaaacagatttcaactgataaagagctggagaactccatgtactttggaatctcctccaagatagccagagtttaatacatcttcattctcaacactctccaaagaacttgacctaccttatgggttccatatttttcttcttaaatgtgcatcaatcatgccttgcccccaacctttaaatatattcttagacctggtaaatgcactcagacttgcgtctttaggaatttttaactttctttcactacattggcacttaaattttttctttataaagctttttgaaggtcataaacaaagaccataattgatgatagacctaatacatttcctctgtgtgtgtgtgtaacattccaaatactttttttttcttttccactgtttgtaaggtgcaacaatttaatatttttaagggactttttaagagttccttaagaaccaatttaaaattacttcagtgcaatcctacacagtatcaacattagaattttgatattagtcttatgttatcttccattctatttttatctgctttttgctgctagtttcaaactgccagtatttttccttttgctt

SEQ ID NO: 1719 - DNA, 571 bp, Homo sapiens
  misc_feature 444: n = A,T,C or G
tcggcacgaggacacaactgtgttcactagcaacctcaaacagacaccatggtgcacctgactcctgtggagaagtctgccgttactgccctgtggggcaaggtgaacgtggatgaagttggtggtgaggccctgggcaggctgctggtggtctacccttggacccagaggttctttgagtcctttggggatctgtccactcctgatgctgttatgggcaaccctaaggtgaaggctcatggcaagaaagtgctcggtgcctttagtgatggcctggctcacctggacaacctcaagggcacctttgccacactgagtgagctgcactgtgacaagctgcacgtggatcctgagaacttcaggctcctgggcaacgtgctggtctgtgtgctggcccatcactttggcaaagaattcaccccaccagtgcaggctgcctatcanaaagtggtggctggtgtggctaatgccctggcccacaagtatcactaagctcgctttcttgctgtccaatttctattaaaggttcctttgttccctaagtccaactactaaactgggggatattatg

SEQ ID NO: 1720 - DNA, 430 bp, Homo sapiens; identical to SEQ ID NO: 333

SEQ ID NO: 1721 - DNA, 472 bp, Homo sapiens
  misc_feature 197, 393, 428, 441, 453, 459, 464: n = A,T,C or G
ttatagcagaagttgtgggagacgggagggcaccctccacacatactacagtgtggtcagagccccagggtagccctttccaccctatgccaagccccaagcagcccagcccaagcttagctccctccccagtcccactctagatgcacactgagctaccaaagttagtgcagccaaacggccccaggcccttcctnttgccccagcaccaatccttccccacactcgttcactgcccgccaactcccattccaacttcctttttacactggatgtttctatcacatcctgaggaccactaacccaccagcaagtttccccctgaacacacattcacgtagggtccataaccctttcagagtcctaaaagggtttaattgagaaggccacctnaagttttggtgaattgggagccccagccccaaatncctttccctttgnaattatgggggnaagtanggggngatttttt

SEQ ID NO: 1722 - DNA, 543 bp, Homo sapiens
  misc_feature 465: n = A,T,C or G
tcggcacgaggagcagagaccaccctctgatgacggtgggcgtcctttccagcccctctcggggcatcgcttcatcccttcccccatttccttcctggccctgctctccaagtcttgtgtgtgtggtggggcctggcttccctcccggcctctcgcctgttcccgcccatccctctctggttctctcaggcctcctctgggcttgccaggaatgtaggggaattagggggagggggacacaggaaatgcctcccctcctctgacaacagctccagctgcagggggaggggggaggggagagcagagtgggtgagacgagggagggctgaaggggggagtcggcttggggggagagtgttctcctgcccacccaggcactgggcgtggcccagccccacagacagaacagttctttcttccttattttattttttattagagacagggtctcactctgtcgcccangctggagtgcagtcgtgtgattggcctcaagcgattctcccacctcggccttccaaagcgctgggattacagcagtga

SEQ ID NO: 1723 - DNA, 490 bp, Homo sapiens
tcggcacgagcttccttcaaattaatgaccttggattacataaggatttctatgcattcattataatttgttattcctttcaatatccttgtatttcaaatcttccatataagaattagacatggcaattcttaaattgattcagaatggtctgatactattccagtatcacctccttaattctgtttctcctcgttttcctgattttccttctcattctctccttccccgctctgtctctctctccctgtcactctctctctctcgttccttattttttgtttcttacctcttactgtttaacctgttgcttccttctggattaatacatttagagccattcctttatatggtcacatttcctatgactttactcaattacttttaaaatcctttctattctgagactaatttttaagaattacaaagctcattcttctgaatctaatatcactaactcctaaactttttccgttttctttggatacac

SEQ ID NO: 1724 - DNA, 607 bp, Homo sapiens
  misc_feature 560, 585, 590, 603: n = A,T,C or G
aaattacttcgaaactttaattacagatacttttccacgcaacatttctgaaatgaaagctttgattctccccttttcttgcataaaggctgggaaggtggtttggccagaccgtacatctttttgtatatacatatctacacctgtgtctcttctttattaataaaaggtgtcttgatcacagtcccaaaccaactctgcattggattccagcatataaaactcagagagtaaaacaattttaaaggaagacaggctgcaaccacaggaaaatggcaggaaaagttgtagcttgatagttgtttcttctaagtttaactcagaaatataataataattaagagaaaaaaataagaggccctagctttcatccctgctaccaaacacgctcgtccagaactctaggctgtcttaaagtgcaattactggttgtgaagttgctcaggccagggatcaggctggacggagttcaaagcagaaacttcaaacactccttgctggttcatgactcaggggctgggggcgcccggagaggagaaacaagaaaggacagttctctnggcattccaagtgcctcaaaggatnaatgncctttcctttggnaaag

SEQ ID NO: 1725 - DNA, 484 bp, Homo sapiens
ggtctccatcaagtactgcagccactcggggcttgtgttctccgtgtccacctcctacatcaaggtgtgggacatccgggactcagccaagtgcattcggactctcacgtcctcgggccaggtgatctcaggggatgcctgtgccgccacatccacccgtgccatcaccagtgctcagggcgagcatcagatcaaccagatcgccctcagcccttcgggcaccatgctgtacgccgcctcgggcaatgccgtccgcatctgggagcttagcaggttccagcctgtcggcaagctgactggccacatcggccctgtgatgtgcctgacggtcacccagacggccagccagcatgacctcgtggtgactggctccaaggaccactacgttaagatgttcgagctgggcgagtgtgtgacgggcaccatcggccccactcacaacttcgagcccccgcactacgatggcatcgagtgtctcgccatc

SEQ ID NO: 1726 - DNA, 486 bp, Homo sapiens
  misc_feature 4, 477: n = A,T,C or G
gcgnccgccttccagagcgaggaccccgcggacccctgtgccctgctccagcgaaggcaggcccaggctgtgacagccgccagcacctgctgtccccagatgcccctgcagaagctgctcttctcagctactctgacccagaaccctgaaaagctgcagcagctgggcctccaccagccccggcttttctccacagggctagcacacaggggcctggaagatacagatggggacggggattcggggaagtatgcctttcctgttgggctcacgcaccactacgtgccctgcagcctcagctctaagccgctggtcgtcctgcacctggtcctggagatgggcttctcgagggttctctgcttcactaactcccgagagaactcccacaggctcttcctgctggtgcaagcttttgggggtgtggacgtgggctgagttcttcctcgcgctacgggcctgggcaagaaggaaggatgnatccttgaa

SEQ ID NO: 1727 - DNA, 502 bp, Homo sapiens
tcggcacgagggagatttcagagatgaaccgggccatccagaggctgcaggctgagatcgacaacatcaagaaccagcgtgccaagttggaggccgccattgccgaggctgaggagcgtggggagctggcgctcaaggatgctcgtgccaagcaggaggagctggaagccgccctgcagcgggccaagcaggatatggcacggcagctgcgtgagtaccaggaactcatgagcgtgaagctggccctggacatcgagatcgccacctaccgcaagctgctggagggcgaggagagccggttggctggagatggagtgggagccgtgaatatctctgtgatgaattccactggtggcagtagcagtggcggtggcattgggctgaccctcgggggaaccatgggcagcaatgccctgagcttctccagcagtgcgggtcctgggctcctgaaggcttattccatccggaccgcatccgccagtcgcaggagtgcccgcgactg

SEQ ID NO: 1728 - DNA, 581 bp, Homo sapiens
  misc_feature 133, 259, 321: n = A,T,C or G
tcggcacgaggcaaatttatattttttaatatcggggggtggaccacgccgccctccatccgtgctgcatgaaaaacattccacgtgccccttgtcgcgcgtctcccatcctgatcccagacccattccttanctatttatccctttcctggtttccgaaaggcaattatatctattatgtataagtaaatatattatatatggatgtgtgtgtgtgcgtgcgcgtgagtgtgtgagcgcttctgcagcctcggcctangtcacgttggccctcaaagcgagccgttgaattggaaactgcttctaaaaactctggctcancctgtctcgggctgacccttttctgatcgtctcggcccctctgattgttcccgatggtctctctccctctgtcttttctcctccgcctgtgtccatctgaccgttttcacttgtctcctttctgactgtccctgccaatgctccaactgtcgtctgactctgggttcgttggggacatgagattttattttttgtgagtgagactgagggatcgtagatttttacaatctgtatctttgacaattctgggtgcgagtgtg

SEQ ID NO: 1729 - DNA, 570 bp, Homo sapiens
  misc_feature 431, 443: n = A,T,C or G
tcggcacgaggcacaactgtgttcactagcaacctcaaacaaacaccatggtgcacctgactcctgaggagaagtctgccgttactgccctgtggggcaaggtgaacgtggatgaagttggtggtgaggccctgggcaggctgctggtggtctacccttggacccagaggttctttgagtcctttggggatctgtccactcctgatgctgttatgggcaaccctaaggtgaaggctcatggcaagaaagtgctcggtgcctttagtgatggcctggctcacctggacaacctcaagggcacctttgccacactgagtgagctgcactgtgacaagctgcacgtggatcctgagaacttcaggctcctgggcaacgtgctggtctgtgtgctggcccatcactttggcaaagaattcaccccaccagtgcangctgcctatcanaaagtggtggctggtgtggctaatgccctggcccacaagtatcactaagctcgctttcttgctgtccaatttctattaaaggttcctttgttccctaagtccaactactaaactgggggatattatg

SEQ ID NO: 1730 - DNA, 543 bp, Homo sapiens
tcggcacgaggcgaccccctgacccctgagttcatcaagccctgcccagcttcagcaccttcatggacggctacacaggagagtttgacaccttcctctaccagctgccaggaacagtccagccatgctcctcagcctcctcctcggcctcctccacatcctcgtcctcagccacctcccctgcctctgcctccttcaagttcgaggacttccaggtgtacggctgctaccccggccccctgagcggcccagtggatgaggccctgtcctccagtggctctgactactatggcagcccctgctcggccccgtcgccctccacgcccagcttccagccgccccagctctctccctgggatggctccttcggccacttctcgcccagccagacttacgaaggcctgcgggcatggacagagcagctgcccaaagcctctgggcccccacagcctccagccttcttttccttcagtcctcccaccggccccagccccagcctggcccagagccccctgaagttgttcccctcacaggccacccacc

SEQ ID NO: 1731 - DNA, 509 bp, Homo sapiens
  misc_feature 184, 385: n = A,T,C or G
tcggcacgagggatccctgcccctccaggtgtccagggtaaagtgtaactcaaaccgacctgtggggcacagggggcaccagctggccttgccctctctggtctgggctgtctaccttcctcactgtatctttgcccaaacccacctgggccagtaggcccctgtccccagccacacaccttanatgctggcatgccttactccaggtgcctgtgtttggccgaggcctgtgtgattcccggtctgcaccacatggcggggttggggggccgctggaggccacctgccaaggcgtgggatgggatggtcctgccggtttaggccgtgattctggaaaaccttggatgggccttcgtcctatgtcagccttccctctgatcctcangccctacctgtagagacctccactcctagagccagtctcagggtctgggatttccctgcaggagctcagccaccactgtgccatggtgacacaggccaaggcagacattggccctcccttctcc

SEQ ID NO: 1732 - DNA, 440 bp, Homo sapiens
  misc_feature 284, 367, 416, 432: n = A,T,C or G
agtttgtcatgtttgtctttattcatctttccggatcttggtccccaccgccagcacccacccaccccacccccaacccccactgtcctgaccacctggagccaaaagcctcttttcctaggtccagagtcctctctccctctggccagagcctcagagtgggaaagggaatccctggccctcaaggaggttttctctcagacaggggagggtgagggggcagctagtctccgagctgggcaggtctgacttcccaggttaccccaggtgagcttacctgactntgggcgccggcagtgagggccagaacaacacccagtagggttaagggagggccagcagtgccagggttcaagagccccaggtntttttaagagattgagttaaagcagggtgaagggccaagcccagttccntcagttgcccagcttnccttttta

SEQ ID NO: 1733 - DNA, 514 bp, Homo sapiens
  misc_feature 218, 311, 395, 452, 455, 492, 497: n = A,T,C or G
ggcttcagcaaagacaacgagtctctcatcagccgggccgagttcctggccggggtgcgggtcggggttccccaggtaagtgacctggcagccgaggctgtggtcctgcattacacagactggctgcatcccgaggacccggcacgcctgagggaggccctgagcgatgtggtgggcgaccacaatgtcgtgtgccccgtggcccagctggctgggancgtggctgcccagggtgcccgggtctacgcctacgtctttgaacaccgtgcttccacgctctcctggcccctgtggaatgggggtgccccacnggctacgagatcgagttcatctttgggatccccctgggacccctctcgaaactacacggcagaggagaaaatcttcgcccagcnactgatgcgatactgggccaactttgcccgcacaggggattccaatgagcccgaganccnaaaggccccacaaatgggccccgtacacggcgggggnttcancagtacgttagtctgga

SEQ ID NO: 1734 - DNA, 588 bp, Homo sapiens
  misc_feature 95, 429: n = A,T,C or G
tcggcacgagggggagccactgtgcagaggctcccagtctgctgcatagaaggacccagataggtccatgtctggcacggagcgggctgtctcanaaccactgggcctggatgatgctgggaacaggaagtcatcaaagggctcggtcttcagctccatgctgctgatgctcttgacaggttccactgagggcttgggctcagggtcattgaggagaggcagggtgaaggcctcctcagactccggggtggcaacctctggcaggcccccagtcagatcaagggaagccacagacatctcttctgggaagcccaggtcatcagggatcttgcaggcaggtcggtgagctgccaggatgaactctagtttttccttctccttcagcaggttggcaatctcggtctgcaaagcagacttctcatcttctanttggtctgtctccgcttggagtgtatcagtcagctccctcctccggttgcggcatttggctgcagccatcttattcctttcccttcggattctccttttctcttcttcttctggagataactgttccaccttgcccctcctgccaatgctctgcgctcg

SEQ ID NO: 1735 - DNA, 517 bp, Homo sapiens
tcggcacgaggattcgttgaacccatcctggaggtttccagcttgccgacaaccaactcaacaaccaattcagccaccaaaataacagctaataccactgatgaacccaccacacaacccaccacagagcccaccacccaacccaccatccaacccacccaaccaactacccagctcccaacagattctcctacccagcccactactgggtccttctgcccaggacctgttactctctgctctgacttggagagtcattcaacagaggccgtgttgggggatgctttggtagatttctccctgaagctctaccacgccttctcagcaatgaagaaggtggagaccaacatggccttttccccattcagcatcgccagcctccttacccaggtcctgctcggggctggggagaacaccaaaacaaacctggagagcatcctctcttaccccaaggacttcacctgtgtccaccaggccctgaagggcttcacgaccaaaggtgtcacctcagtctctc

SEQ ID NO: 1736 - DNA, 488 bp, Homo sapiens
tttttgaactcggcagtcctttatttagatcaatgcggggctgaggggccctcattccactgcagggcaaagggggaccaggcccaaggaggcctccttctgcccaaggtctggaggcagagaggggctcgcaggcggcccgagggcgcgcatccaggccccggagcgcaaagccttcctcccagggggaggcagtttcccatccaccgaccaggtttccccggagagtcccagcacaaaagcagcagcgggcggtggcctagaaggctcagagcgcacgcagggggacacaggcggggagctcactcctgggcgagcatcctcgcgaactcctcgtagttcacccgcccgtcctggtccacgtcggcctcgcggatcatggcgtccagctcctcctgcggcagcggctgccccaggcccgccatggcccgcctgagctcgtccacggtgatgtggccgtcgccatcctggtcgaaggcgcggaaagc

SEQ ID NO: 1737 - DNA, 554 bp, Homo sapiens
  misc_feature 417: n = A,T,C or G
tcggcacgaggctgaagactgtgattacatgcacctgccttagaaggtaggattttcttcccaggacctcctatcaccctaccctgcttcttgaggtccctggagccccaggtgggctgaggggcagggagccggctgtgcccagtatgcctcctggaccctccagttctgccacaggtctgccgatgccctgtccactgcctacacatgacagacaagtaaccccctcatgggggatggggacctacctggctcctcagccagcacccagcttaacccctgccatcccatgctgggccctccaggccaagagtctcagctggccgagagtccaggccttgcctcccccgaccgccatggagggggcagcccggcacagctgctgggagcccttgtgtgtctggtcacactttttangcgtcacgccaaaggccagcctcctggccccaatacccattttggaagcccctgtggccgtgtggatgtcggtaacagttgtataaaataaattctatttatcgctattgtaaaaaaaaaaaaaaaaaaaaatgcgg

SEQ ID NO: 1738 - DNA, 519 bp, Homo sapiens
ttcggcactagggatcctcgtccgacaacggggatgcaggccccgggccgtgcacacagggccgtcagaggtgatggtgtgcatctttagcaggtggcacaactggcgctgggaactgggggtcccttccctcacgagtccttatggaggcagaccctcacccagtgagggcacggagcccccgggggccctggagggaggagcgaccgcatgctctctgggccccgtgactgctgtgactcaagttcctttgcaagtgtgcacagcagggacgccctgactctcgccctctccctggcaggaggtggtccaagccacgctggtggtcctggccttggccatggtgcccatcctgctgcttggcacacccctgcacctgctgcaccgccaccgccgccgcctgcggaggaagcccgctgaccgacaggaggaaaacaaggccgggttgctggacctgcctgacgcatctgtgaatggctggagctccgatgaggaaaaggcggggggcctggatgatga

SEQ ID NO: 1739 - DNA, 338 bp, Homo sapiens
tcggcacgaggcattttttttttttttttttaaagcctcgagggctttttccagtgggggctcaacaatctttttaaatcggatggcattttccacctggttgttaaacaaaaccgtctcctcctaaaatcgctaaatctcatgcttaaacccttcgaattcaacctggttctgcttcaacgggaacactattttctgcaatgggatattttttttttccaattcaatatacccctaaaggacccgggcctcccgaaacttatattctcggatttcatccttcatccgaattctctgaacctccaccatctaattgttctccttaaaaacctgcacaa

SEQ ID NO: 1740 - DNA, 353 bp, Homo sapiens
cccttaattttcctggaaaaaaaaccccaggtggaagccaaagcgggagccggagcccgcggcagggaaacccgggggggggccttaacgggggggccagggacccccggaaggggaaactgggggaaaaaagccccctcccaaaggccgggggccgggaacctggaggcctaaaaaagggcaccaaagggggcctggggaagttccccgggggggcattgaacccccgggcgagggtgaaacagtcacggaaaccagccaagatgagcagcttcttaggcacagggggggggaagagccaagtcccccggggtcaaggggagaggggtacaagaacaaagccggagggcctg

SEQ ID NO: 1741 - DNA, 544 bp, Homo sapiens
tcggcacgagggtgggtgcatgtgggtgtttacacacatgcctacaggtatgcgtgattgtgtgtgtgtgcatgggtgtacagccacgtgtctacctatgtgtctttctgggaatgtgtaccatctgtgtgcctgcagctgtgtagtgctggacagtgacaaccctttctctccagttctccactccaatgataatagttcacttacacctaaacccaaaggaaaaaccagctctaggtccaattgttctgctctaactgatacctcaaccttggggccagcatctcccactgcctccaaatattagtaactatgactgacgtccccagaagtttctgggtctaccacactccccaaccccccactcctacttcctgaagggccctcccaaggctacatccccaccccacagttctccctgagagagatcaacctccctgagatcaaccaaggaagatgtgacagcaagggccacggaccccatggcaggggtggcgtcttcatgaaggaagggcccaaagcccttgtgggcggacctcccctg

SEQ ID NO: 1742 - DNA, 600 bp, Homo sapiens
  misc_feature 96, 238, 414: n = A,T,C or G
cggcacgaggaggctcccagcctccttcccgctacagaatcgctcatcggcgaggctcagcagaaagaccctgaaggcaggctgcaaatgacccanaagagggacctgggagtcctggtggggacggggagggagtctcaatactcctttgcagtgcaaggtactctgagtcccctctgtagtgcctctgccagacacacactgcctgagttgaagagacacaggccacacatttcangctggttgccagcggacgtcagcactcacggcctgcagggactcagcacagctctggattctggatctctcctgctgtaaccccacgcacaagcctgcaacccccaaagctctttgacaggctcccaggcctcccagtcctggacaagcatgtgcagtcacgggagctcagctcangccagggctgggctgtgcacctgcctcccactgacccagacccacttcctccagagaggcctctctccgcctgagctatttcccttgctagtgtgcagatatttccctaacatgtccttttttgtatttgtttgtacggaccataaatataactgtagctttaagactaaaaaaaaaaaaaaaaaa

SEQ ID NO: 1743 - DNA, 541 bp, Homo sapiens
tcggcacgaggagagaaccaatggcagaaggaggagtgtagagcttacatgcagatgctgaggaagttgttcacagcaatccgtgccctgttcctggctgtctgtgtcttgaaggtcattgtgtccttggtttccttgggagtaggtcttcgaaacttgtgtggccagagctcccagcccctgaatgaggaaggatcagagaagaggctactgggggagaattcagtgcccccttcgccctctagggagcagacctccactgccattgtcctgtgagccgccaaagaccccacggggtgcccgcatgtccctgtctagggcagcccagggcccccactcctggctcctcacacttgcctcccctatggccgctctccagaccctcctcctttcttctcctcacatccgcacctgctgttcccactccggggttctcaagtccatgaacagatattgttgcattttccacaatgctgattaaacataataaacaatccagaaaagcagttttgcccagaaaaaaaaaaaaaaaaaaaaaaaa

SEQ ID NO: 1744 - DNA, 620 bp, Homo sapiens
  misc_feature 512: n = A,T,C or G
tcggcacgaggctgacttgcttccggagtttattgtgcaggatgaagcccgagtgggcaggggtgctttggcggggagccggggcaggggctcggggaaggaacagagcagagacatccagagcgtgggggtcacctggctggccgggatcccagcttcagccctggggagtcctattgttccgtcatgcacttatcggtttggggcaggaagacaatggtatcctctgtgaagccctgggccttgcagaaggcggtgaatttctcctttaactcagccctgggggtctgggttcggctgtagagggtggccatgcggaagtcctcgccagggcccttgctgccctggctgtacagcagcgcgtactggtcgtagtcggtctccaccactgacacggagtaggtgctgccccagtggggactccggtagctgtaggagccgagggaccccgcgggctgcagcagcatggttcgggtctcacactggtttttcctgaggaaggtggaggtcangttgaggccaccatccgtggcaggggccaccacagacttgcacatggacaacgccgccttcttctcccggagccagctcgagttggcggccgcaagcttattcccttt

SEQ ID NO: 1745 - DNA, 505 bp, Homo sapiens
tcggcacgaggcaatttagcctcagtcgatttgaacatatttttctttttcccttgaatttcccttctttttggctaaatgtcacctgtcctccaactctctagtgatgtctcctctccaggaaattttcccaagcccgactggattgtgtgtccccctccccccggcatagttggggacaaaggggaaaaaggtgctcggggcttaaatggtgaacctgggcctcagggtcttcctggtgcacctggtgatcaaggacagcgaggacctccaggagaagcaggtcccaaaggagatagaggggctgaaggtgctagaggaattcctggtctccctgggcccaaaggagacacgggtttgccaggtgtggatggccgtgatgggatccctggaatgcctggaacaaagggtgaaccaggaaaacctgggcctcctggtgatgcaggattgcaggggttaccaggtgtacctggaattcctggtgcaaagggtgttgctggtgaaa

SEQ ID NO: 1746 - DNA, 528 bp, Homo sapiens
  misc_feature 46: n = A,T,C or G
tcggcacgagggatctgaagacagcatgtacacagccattccccanagtggctctccattcccaggctcagtgcaggatccaggcctgcatgtgtggcgggtggagaagctgaagccggtgcctgtggcgcaagaaaaccagggcgtcttcttctcgggggactcctacctagtgctgcacaatggcccagaagaagtttcccatctgcacctgtggataggccagcagtcatcccgggatgagcagggggcctgtgccgtgctggctgtgcacctcaacacgctgctgggagagcggcctgtgcagcaccgcgaggtgcagggcaatgagtctgacctcttcatgagctacttcccacggggcctcaagtaccaggaaggtggtgtggagtcagcatttcacaagacctccacaggagccccagctgccatcaagaaactctaccaggtgaaggggaagaagaacatccgtgccaccgagcgggcactgaactgggacagcttcaacactggggactgcttcatcct

SEQ ID NO: 1747 - DNA, 370 bp, Homo sapiens
attcggcacgagggcattctcacccgcagcacctttgaaagaaaaagacttctcagagaccacaacttctcttagtccagacaatacttccacccaagtatccccggactctttggataatgctagtgcttttaataccacaggtgtttcatcagtacagacgcctcaccttcccacgcacgcagactcgcagacgccctctgctggaactgacacgcagacattcagcggctccgccgccaatgcaaaactcaaccctaccccaggcagcaatgctatctcagatgtcccaggagagaggagtacagccagcacctttcctacagacccagtttccccattgacaaccaccctcagccttgcacaccac

SEQ ID NO: 1748 - DNA, 535 bp, Homo sapiens
tcggcacgagggctcgttcgagctctcggtgcaggatctcaacgacctgctctcggacggcagcggctgctacagcctcccgagccagccctgcaacgaggtcaccccgcggatctacgtgggcaacgcgtctgtggctcaggacatccccaagctgcagaaactaggcatcacccatgtgctgaacgcggctgagggcaggtccttcatgcacgtcaacaccaatgccaacttctacaaggacctccggcatcacatacctgggcatcaaggccaacgacacacaggagttcaacctcagcgcttactttgaaagggctgccgacttcattgaccaggctttggctcaaaagaatggccgggtgctcgtccactgccgggaaggttatagccgctccccaacgctagttatcgcctacctcatgatgcggcagaaaatggacgtcaagtctgccctgagcatcgtgaggcagaaccgtgagatcggccccaacgatggcttcctggcccagctctgccagctcaatgacagact

SEQ ID NO: 1749 - DNA, 135 bp, Homo sapiens
gagtgaccaggagccgctgtacccagtgcaggtcggctctgcggacgctcggctcatggtctttgacaagacggaagggacgtggcggctgctgtgctcctcgcgctccaacgccagggtagccggactcagctg

SEQ ID NO: 1750 - DNA, 395 bp, Homo sapiens
gagccccaagcttaccacctgcacccggagagctgtgtcaccatgtgggtcccggttgtcttcctcaccctgtccgtgacgtggattggcgctgcgcccctcatcctgtctcggattgtgggaggctgggagtgcgagaagcattcccaaccctggcaggtgcttgtggcctctcgtggcagggcagtctgcggcggtgttctggtgcacccccagtgggtcctcacagctgcccactgcatcatgaacataagcgtggtcttgctgggtcggcacagtctgtttcatactgaagacacaggccaggtatttcaggtcagccacagcttcccacacccgctctacgatatgagcctcctgaagaatcgattcctcaggccaggtgatgactccag

SEQ ID NO: 1751 - DNA, 493 bp, Homo sapiens
  misc_feature 389: n = A,T,C or G
ttcggcacgagcctctgtccagcagagaggaagagaccagacttactttgtgcagccgcagcagctgttcagacttatgagcagacaggaactgccagagggcaatggtgtgttttaactggcatctgtttaaggcctgcagaaggaatagaattcctgagtgggggctgaggtctcacacccccactcatgtcgtgcaccagggagcctgagtgctctccacacaggcattcttctcttcgttctgccctgtactaatgtgatctccctccttgtgaaggccatctctgtcctatctaccagttccctcctgcggcacctcacagcccgctcacatcacgctgtttgcaggggcctcatgtactcagtcacatttgggctctatctanactgctggcatttctagcgcgtgtctgtctctactgtccctggtgtgtcctgtttatgctggactgactgggtgagcagttgttcttgtctccccatccttttc

SEQ ID NO: 1752 - DNA, 504 bp, Homo sapiens
  misc_feature 200: n = A,T,C or G
ttcggcacgagtaaaaggttccctggttgtgaaaatactgagataaatcatgaaggccactatcatcctccttctgcttgcacaagtttcctgggctggaccgtttcaacagagaggcttatttggctttatgctagaagatgaggcttctgggataggcccagaagttcctgatgaccgcgacttcgagccctccctangcccagtgtgccccttccgctgtcaatgccatcttcgagtggtccagtgttctgatttgggtctggacaaagtgccaaaggatcttccccctgacacaactctgctagacctgcaaaacaacaaaataaccgaaatcaaagatggagactttaagaacctgaagaaccttcacgcattgattcttgtcaacaataaaattagcaaagttagtcctggagcatttacacctttggtgaagttggaacgactttatctgtccaagaatcagctgaaggaattgccagaaaaaatgcccaaaactct

SEQ ID NO: 1753 - DNA, 377 bp, Homo sapiens
acagaaggggaagcttaccacctgcacccggagagctgtgtcaccatgtgggtcccggttgtcttcctcaccctgtccgtgacgtggattggtgctgcacccctcatcctgtctcggattgtgggaggctgggagtgcgagaagcattcccaaccctggcaggtgcttgtggcctctcgtggcagggcagtctgcggcggtgttctggtgcacccccagtgggtcctcacagctgccctctgcctcaggaacaaaagcgtgatcttgctgggtcggcacagcctgtttcatcctgaatacacagaccaggtatttcaggtcagccacagcttcccacacccgctctacgatatgagcctcctgaataatcgattcct

SEQ ID NO: 1754 - DNA, 475 bp, Homo sapiens
ccgccgactcacacaaggcaggtgggtgaggaaatccagagttgccatggagaaaattccagtgtcagcattcttgctccttgtggccctctcctacactctggccagagataccacagtcaaacctggagccaaaaaggacacaaaggactctcgacccaaactgccccagaccctctccagaagttggggtgaccaactcatctggactcagacatatgaagaagctctatataaatccaagacaagcaacaaacccttgatgattattcatcacttggatgagtgcccacacagtcaagctttaaagaaagtgtttgctgaaaataaagaaatccaaaaattggcagagcagtttgtcctcctcaatctggtttatgaaacaactgacaaacacctttctcctgatggccagtatgtccccaggattatgtttgttgacccatctctgacagttagagccgatatcactgga

SEQ ID NO: 1755 - DNA, 452 bp, Homo sapiens
ggacagtctgaaatactctctggtgccaacctccaaattctcgtctgtcacttcagacccccactagttgacagagcagcagaatttcaactccagtagacttgaatatgcctctgggcaaagaagcagagctaacgaggaaagggatttaaagagtttttcttgggtgtttgtcaaacttttattccctgtctgtgtgcagaggggattcaacttcaatttttctgcagtggctctgggtccagccccttacttaaagatctggaaagcatgaagaccgggctttttttcctatgtctcttgggaactgcagctgcaatcccgacaaatgcaagattattatctgatcattccaaaccaactgctgaaacggtagcacccgacaacactgcaatccccagtttaagggctgaagatgaagaaaatgaaaaagaaacagcagtatccacaga

SEQ ID NO: 1756 - DNA, 486 bp, Homo sapiens
gctcttttccgtggcgcctcggaggcgttcagctgcttcaagatgaagctgaacatctccttcccagccactggctgccagaaactcattgaagtggacgatgaacgcaaacttcgtactttctatgagaagcgtatggccacagaagttgctgctgacgctctgggtgaagaatggaagggttatgtggtccgaatcagtggtgggaacgacaaacaaggtttccccatgaagcagggtgtcttgacccatggccgtgtccgcctgctactgagtaaggggcattcctgttacagaccaaggagaactggagagagaaagagaaaatcagttcgtggttgcattgtggatgcaaatctgagcgttctcaacttggttattgtaaaaaaaggagagaaggatattcctggactgactgatgctacagtgcctcgccgcctgggccccaaaagagctagcagaatccgcaaacttttcaatctctct

SEQ ID NO: 1757 - DNA, 601 bp, Homo sapiens
tcggcacgaggggtgacacaggacgagcctattcaacaacactacaacaagcagccattcccttacttcctaaaggttttgtgaagaacgttataagggtcggtttacagggagaatgctttgtgctggaaacctccatgaacacaaacgcgtggacagctgccagggagacagcggaggaccactcatgtgtgaacggcccggagagagctgggtggtgtatggggtgacctcctgggggtatggctgtggagtcaaggattctcctggtgtttataccaaagtctcagcctttgtaccttggataaaaagtgtcaccaaactgtaattcttcatggaaacttcaaagcagcatttaaacaaatggaaaactttgaacccccactattagcactcagcagagatgacaacaaatggcaagatctgtttttgctttgtgttgtggtaaaaaattgtgtaccccctgctgcttttgagaaatttgtgaacattttcagaggcctcagtgtagtggaagtgataatccttaaatgaacattttctaccctaatttcactggagtgacttattctaagcctcatctatcccctacctatttctc

SEQ ID NO: 1758 - DNA, 530 bp, Homo sapiens
ttcggcacgaggcggcacgaggcggcgcgcacctgtgcggcggcgtcctggtggcggagcagtgggcgcagtgccccacccggacagccagcccgacaccatcgaccacgacctcctgctgctacagctgtcggagaaggccacactgggccctgctgtgcgccccctgccctggcagcgcgtggaccgcgacgtggcaccgggaactctctgcgacgtggccggctggggcatagtcaaccacgcgggccgccgcccggacagcctgcagcacgtgctcttgccagtgctggaccgcgccacctgcaaccggcgcacgcaccacgacggcgccatcaccgagcgcttgatgtgcgcggagagcaatcgccgggacagctgcaagggtgactccgggggcccgctggtgtgcgggggcgtgctcgagggcgtggtcacctcgggctcgcgcgtttgcggcaaccgcaagaagcccgggatctacacccgcgtggcgagctatgcggcctggatcgacagcgtcctggcct

SEQ ID NO: 1759 - DNA, 446 bp, Homo sapiens
  misc_feature 92: n = A,T,C or G
tttttgatttccatgcactttaatgaggtccagcactcaggaggattagcgcccaccaccagctgcctgggcaggggagggccggagcagtntgcaggcgtcaggcttaggacagggaagggggctcaggatggggaagggtcctcaggacaggggaaggggctcagaagagagcagggggcttaggacaggaaggggcactcaggacggggcagggaaggtgtggggggcagtcgcacctgggtaggaagcagtggtgttttggacagcaggggttggtcctccagtgacccaggtggccaacccaggcctgactcacggctttttggggacatagtggtggatccagtccaagtagtaggtgacacgggtgtagatgccaggccggttgggctgggcacacttacgccccagctgaccacgcccgcctgcagccaggtgccatt

SEQ ID NO: 1760 - DNA, 495 bp, Homo sapiens
ttttaaacagatgcatttaatgggaaatcttaaggcaggggtggcaggagctgcgggctcagttggcggccaggatcttctgcacccagggtatgagcttggcgacacgggcgtacacagcgggcgtggtggtagagcaggtgcggctgccccaggacacaatgcccaccagggtccaggctccgtccttctggcagaccagggggcctccagagtcacccatgcaggaggagacgccactggccccggcacagatcatcacgtcggtgatcctcctgccccaggacttcttgcattcggcattggacaggaggggcagggctgcctgctgcagcttgtcaggggtcttgttggcgttgtacttggtcttgccccagcctgtggtggcacacagtgtccccgcgggaagtcgtcgtcggcgctgggcaggcacacggcggacactgtctgggagaagcgggcaggtgtggccagcttcagcagggtgatgtcatt

SEQ ID NO: 1761 - DNA, 600 bp, Homo sapiens
ttttaatataaattatagctttattttttaaaaagattttataagtctgtcacaacctcaaacacatataggtgaattatttattcctctcttccatcagatgaggcttatcgtgtcaaatcctctgaaaaatataagtaaaaattatttttcacaaatatatatcccctatattactcaacttagttctgaaattttctccttataaatactttaacacagctgctagtggaaggactgtgttgtgcagctgcacatagctataattttataagtctgctttacttttgctagctccctggttcagctccaaggtccaaatcttataaatggttaactgggctgccagaaaagcccactgaatgcatcctgtagtgctctgtgacaagcaagagaagaagtatagcctccagcaaggtcctgtggtgaggcagctctgacatggtttaaatacccaagtcttcctagcatctcaagctcaggaacatgtggtccatatgtctctatctgcagtggctggtattcatacagagcttcttcaagcttgtgaataggtgccagtgaaatatgttgacccattttgatgcctgtggaaaacgt

SEQ ID NO: 1762 - DNA, 467 bp, Homo sapiens
tcggcacgaggcgcagtactatggccaacaggccggggtactccacgaggctcgagtccccataatcaacaatgatgtctgcaatggcgctgacttctatggaaaccaaatcaagcccaagatgttctgtgctggctaccccgagggtggcattgatgcctgccagggcgacagcggtggtccctttgtgtgtgatgacaccatctctcggacgccacgttggcggctgtgtggcattgtgagttggggcactggctgtgccctggcccagaagccatgcgtctacaccaaagtcagtgacttccgggagtggatcttccaggccataaagactcactccgaagccagcggcatggtgacccagctctgaccggtggcttctcgctgcgcagcctccatggcccgatgtgatcccggtggtgggatccacgctgggccgaggatgggacgtttttcttcttgggccc

SEQ ID NO: 1763 - DNA, 369 bp, Homo sapiens
ttttctgcatcagtaattttaatagagactcttagtggttatcaacaactggtcagttgttttttgtttttttttttccacactgctctctggattcgaacctagtgaattctgggctcagtcctcctcctccatctctttcttgatccagtccacgtagttgagcactttggtgtagaagccatagcccctgctgcacccgatgccccaggacacgatgcccgtggccacccagcgatcagtgttcgggtcccttactgcaaaaacgcccccactatccccctggcaggcgtcctgctttagagatgggtgtccagcacagaacatgttttgagagaacacatccatcctattctttccccggagcca

SEQ ID NO: 1764 - DNA, 462 bp, Homo sapiens
tcggcacgaggttttttttttctctgcaaggggcaattattcctggataaggcaagataattgtggtcacaaaaaaagcagccaaatgcaaatctgttgagctaacagggggagtgtctcattcagtctttcccagctttgcaatcagctcatcacaaatttttgtcagttcttcaatttcttggttcttctgctgcagggccctttccagggactccaccttcatctgctctttgcggagtccagcatggaaagctgcactctcaccctttgcttttgttcaaacctgaccaatctcttcattggctttgtccagtttctcttctgcgtggattttcagggcctggtatcgctgctcctcttgtttaactctggctaagtaatcctgagcacatttcttcaaggcttcttcattcttcttgaacccttccagaacacctttcaggttctcatatctcctga

SEQ ID NO: 1765 - DNA, 412 bp, Homo sapiens
  misc_feature 10, 11, 346, 384, 393: n = A,T,C or G
agaaacaacnnttttgtttgatttggggaggagagaaggggtgcagatgggaaatggggaggcaagggctctttagcgtttgccaaaaccactgccacacccctccaccccctcttgccttcctcctccacggtgggtgccagcaggctctcccctttccagtgacctccctctccctcctcccagcaccccacttgggcttcaacctccagtgactgcacagagcccacccagggtctaaagctaggggaaggcagctcaaactcacctttcttctcccttcttccacctcccacctcattcccatctcttgtctaaataaaatacaggaaaagcaagcgcagtnggttaactgggggagaattgggatttaaaccccggggnttggggggnaaggggttgggggaattgg

SEQ ID NO: 1766 - DNA, 482 bp, Homo sapiens
tcggcacgaggagaagggggacaaggaggcacacccaggccggcaaagagcaggtatcagcactgcaagcaccaagtgtgtcttgagctcagtgagtactgggtatgtgtcacattgccaaatcccggatcacaagtctccatgaactgctggtgagctaggataataaaacccctgacatcaccattccagaagcttcacaagactgcatatataaggggctggctgtagctgcagctgaaggagctgaccagccagctgacccctcacactcacctagccaccatggacatcgccatccaccacccctggatccgccgccccttctttcctttccactcccccagccgcctctttgaccagttcttcggagagcacctgttggagtctgatcttttcccgacgtctacttccctgagtcccttctaccttcggccaccctccttcctgcgggcacccagctggtttgacactggactctc

SEQ ID NO: 1767 - DNA, 500 bp, Homo sapiens
  misc_feature 349: n = A,T,C or G
ggtgtacgcggtggaggccattgagatggcacagcacacggggcagctggtcctgcagaacggctttgctgacatcatcaccgtgtaccatcagaatgtggaggatgtggtgctgcccgacaagtggacgtgctggtgtctgaatggatggggacctgcctgctgtttgagttcatgatcgagtccatcctgtatgcccgggatgcctggctgaaggaggacggggtcatttggcccaccatggctgcgttgcaccttgtgccctgcagtgctgataacgattatcgtagcaaggtgctcttctgggacaacgcgtacgagttcaacctcagcgctctgaaatctttancagttaaggagtttttttcaaagcccaagtataaccacattttgaaaccaaaagactgtctctctgaaccgtgcactatattgcagttggacatgagaaccgtgcaaatttctgatctacataccctgaagggcgagctgcgcttcgacat

SEQ ID NO: 1768 - DNA, 405 bp, Homo sapiens
tcggcacgagggggattcaaacttcaacaaaatgtggcaaccagaatggggaatgcatcagcaacccccacacccccctccagatcagccatggatgccaccaacaccaggcccaatggacattgttcctccttattggcaaccaggacctccaggacctccagcacctccccagaatcgaagagaaaggccatcatcattcagggatcgtcagcgttcacctattgcacttcctgtgaagcaggagcctccacaaattgacgcagtaaaacgcaggactcttcccgcttggattcgcgaaggtcttgaaaaaatggaacgtgaaaagcagaagaaattggagaaagaaagaatggaacaacaacgttcacaattgtccaaaaaaaaaaaaaaaaaaaaattttt

SEQ ID NO: 1769 - DNA, 424 bp, Homo sapiens
tcggcacgagggtgatacaccacttcgtggcggtcatcctgatgaccttctcctacagtgccaacctgctgcgcattggctctctggtgctgctgttacacgattcctctgactacctgctggaggcctgtaagatggtcaactacatgcagtatcagcaagtgtgcgacgctctcttcctcatcttctcctttgtcttcttctacacccgactggtcctctttcccacccagatcctctacaccacatactacgagtccatcagcaacaggggccccttcttcggctactacttcttcaacgggcttctgatgttgctgcagctgctgcacgtgttctggtcttgcctcattctgcgcatgctctatagcttcatgaagaagggccagatggagaaggacattcgtagtgatgtagaagaatc

SEQ ID NO: 1770 - DNA, 484 bp, Homo sapiens
acgaatctcagcaaaaactacaactatgatattcatgccaaaataaaatctgtgcaatagagtggctgcaatgaggtcacaacggtggtggatgtaaaagaaatcttcaagtcctcatcacccatccctcaaactcaagtcccgctcattacaaattcttcttgccagtgtccacacatcctgccccatcaagatgttctcatcatgtgttacgagtggcgttcaaggatgatgcttcttgaaaattgcttagttgaaaaatggagagatcagcttagtaaaagatccatacagtgggaagagaggctgcaggaacagcggagaacagttcaggacaagaagaaaacagccgggcgcaccagtcgtagtaatccccccaaaccaaagggaaagcctcctgctcccaaaccagccagtcccaagaagaacattaaaactaggagtgcccagaagagaacaaacccgaaaagagtgtgagctaact

SEQ ID NO: 1771 - DNA, 547 bp, Homo sapiens
tcggcacgagggccgcagggagtctgagcaaggggtgtacacctgcacagcacagggcatttggaagaatgaacagaagggagagaagattcctcggtgcttgccagtgtgtgggaagcccgtgaaccccgtggaacagaggcagcgcataatcggagggcaaaaagccaagatgggcaacttcccctggcaggtgttcaccaacatccacgggcgcgggggcggggccctgctgggcgaccgctggatcctcacagctgcccacaccctgtatcccaaggaacacgaagcgcaaagcaacgcctctttggatgtgttcctgggccacacaaatgtggaagagctcatgaagctaggaaatcaccccatccgcagggtcagcgtccacccggactaccgtcaggatgagtcctacaattttgagggggacatcgccctgctggagctggaaaatagtgtcaccctgggtcccaacctcctccccatctgcctccctgacaacgataccttctacgacctgggcttgatgggctatgtcagtggcttc

SEQ ID NO: 1772 - DNA, 475 bp, Homo sapiens
tcggcacgaggcagtctttggggctgtcctgcacccctacacctgggccgcctgaccttggactgacctcccgttgcctcctggagccctgcataccttctgtgccacaatgcctgccgtctcccgctaatgtctccagctgcctggaaggcagcatggggctgcggtcactctggggcagtcttctggcctcactgactcctccaccattgcctcccccagacccccctgcccctcccactcttcttcataactgccacctttgccagaagctccagagagactccccaacctgccatgcctgcctccaccccaaccgtacagtccccactgcgctgtccagcccctggtaccatacctatggcctggctcccccctggccttggagcccggtgcccctttcacttcctcagcctcagcaatgttcccttttcagtgtcatggagctggctcgcctcaagtctttcgttttccc

SEQ ID NO: 1773 - DNA, 408 bp, Homo sapiens
cctggatgcggcccagcgtggcgtccgcgtcctcgaggtggcctcgggctccggccagcacgcagcgcacttcgcgcgggccttccccctggccgagtggcagccgtcggacgtggaccagcgctgcctggacagcatcgcggccaccacgcaagcccagggcctgaccaacgtgaaggccccgctacacctggacgtgacgtggggctgggagcactggggcgggatcctgccacagtcgctggacctgttgctctgcatcaacatggcccatgtcagccccctgcgctgcacggaggggctcttcagagcagcaggacacctgctcaaacccagggccctgctcatcacctacgggccctatgccatcaatgggaagatctccccccagagcaacgtggactttga

SEQ ID NO: 1774 - DNA, 501 bp, Homo sapiens
attcggcacgaggcttaaacagcttaaagtttagtttaaaagttgtaggtgattaaaataatttgaaggcgatcttttaaaaagagattaaaccgaaggtgattaaaagaccttgaaatccatgacgcagggagaattgcgtcatttaaagcctagttaacgcatttactaaacgcagacgaaaatggaaagattaattgggagtggtaggatgaaacaatttggagaagatagaagtttgaagtggaaaactggaagacagaagtacgggaaggcgaagaaaagaatagagaagatagggaaattagaagataaaaacatacttttagaagaaaaaagataaatttaaacctgaaaagtaggaagcagaagaaaaaagacaagctaggaaacaaaaagctaagggcaaaatgtacaaacttagaagaaaattggaagatagaaacaagatagaaaatgaaaatattgtcaagagtttcagatagaaaatgaaaaacaagc

SEQ ID NO: 1775 - DNA, 603 bp, Homo sapiens
  misc_feature 345: n = A,T,C or G
tcggcacgaggggcggcgttgtccatgtgcaagtctgtggtggcccctgccacggatggtggcctcaacctgacctccaccttcctcaggaaaaaccagtgtgagacccgaaccatgctgctgcagcccgcggggtccctcggctcctacagctaccggagtccccactggggcagcacctactccgtgtcagtggtggagaccgactacgaccagtacgcgctgctgtacagccagggcagcaagggccctggcgaggacttccgcatggccaccctctacagccgaacccagacccccagggctgagttaaaggagaaattcaccgccttctgcaaggcccanggcttcacagaggataccattgtcttcctgccccaaaccgataagtgcatgacggaacaataggactccccagggctgaagctgggatcccggccagccaggtgacccccacgctctggatgtctctgctctgttccttccccgagcccctgccccggctccccgccaaagcacccctgcccactcgggcttcatcctgcacaataaactccggaagcaagtcaaaaaaaaaaaaaaaaaaaaaaaaaaaaaaccggg

SEQ ID NO: 1776 - DNA, 500 bp, Homo sapiens
  misc_feature 317, 318: n = A,T,C or G
gcggccgccactggagacactccctcccgcctcccgggtctcctggcggcggcggagtgaggctgacagcggggaacctgggagacccctccgccctccccgcggtggcagcggccgatccccggctccggcgcgagggacggccgcgatgcctcggcctgaggttacccggcccggcccttcctcgcttccctcgactattccactgcgtctccgcgccccgggtcatcctgcgagtccctctgacgggagggaagatggctgcacggagctggcaggacgagctggcccagcaggctgaggagggctcggcgtcnntgcgggaaatgctctcggtcggcctaggctttctgcgcaccgagctgggcctcgacctggggctggagccgaaacggtaccccggctgggtgatcctggtgggcactggcgcgctcgggctgctgctgctgtttctgctgggctacggctgggcgccggcttgcgcggcgcccgcaaaaagc

SEQ ID NO: 1777 - DNA, 253 bp, Homo sapiens
ggccgcgcagcgctgggggcgccacgcaacgcaggtcgcggtagggacgcacgcgtggggggcgtgccgttcagccaggcgcgcagcggcacaaggcggcagtcgcagcgccaggggttggcgcccaggtgtgcggtgcgcagcgcgggcagcgcgtccagcagccccggcggcagcgccgtcaggttgttgccggtcagcaccagctcggttgtgtcgacagggaaggcggtcggcagtgaggcccaagtca

SEQ ID NO: 1778 - DNA, 406 bp, Homo sapiens
tttttggattaaatattcttattattccatttttttctttataaactattatgttatgcatccttttactatttacttttattttgctattacctttacttttactactattagtgattaccctagaaattataacttgcatccctgatttatcaaggcctaatataaattagtacttataccatttcctgggcaattcaaggaccttaagcttcacttcttccatccacctataccagctgcttgtgctttgttggtgtatatttcaattctatattctaaatcccagaggacattattattgcatacaattaacattcagttaagtttacccacactttattctttccactgctcctcattcctcttagaatctctgtatttccttctgcagtcattctcctct

SEQ ID NO: 1779 - DNA, 544 bp, Homo sapiens
  misc_feature 325: n = A,T,C or G
tcggcacgaggaggaagtccaggagttttacaaggacaccgtacaacaagctgaaaaccaaggatgagccccagcgggaaacgctgaaagccatccactatgcgttgaactgctgtggtttggctgggggcgtggaacagtttatctcagacatctgccccaagaaggacgtactcgaaaccttcaccgtgaagtcctgtcctgatgccatcaaagaggtcttcgacaataaattccacatcatcggcgcagtgggcatcggcattgccgtggtcatgatatttggcatgatcttcagtatgatcttgtgctgtgctatccgcangaaccgcgagatggtctagagtcagcttacatccctgagcaggaaagtttacccatgaagattggtgggattttttgtttgtttgttttgttttgtttgttgtttgttgtttgtttttttgccactaattttagtattcattctgcattgctagataaaagctgaagttactttatgtttgtcttttaatgcttcattcaatattgacatttgtagttg

SEQ ID NO: 1780 - DNA, 369 bp, Homo sapiens
tcggcacgaggtttttttttttttttaattaagaaaattaaatcttttaatataaaagggaatttcaaaaactttccaaatgggccccccatatttaaagccagccccttttaaaccctaaatacctttaaaaaattttttttattgaaggaccaaatcaaatgggctcaaaaaaatcaaatgggggggatccccaaataaaatccttgttaaggctaaccacatggaatacaaattttttttatcctaaaaactttaaaaggcccatgggtaaatttctttgggagggggaaaaatagttggcccaaaaaaacccttttcacagttaaaggaacttgaaagttctgccccagggagccctaagggttt

SEQ ID NO: 1781 - DNA, 504 bp, Homo sapiens
  misc_feature 432: n = A,T,C or G
ggtctttttgtcttttttttttttttccttttaatacctgaatgttctgcgaaaactgaaattgttacaggcatctgaaccacgggaggaggagttgatggcgatcgtggtttaggctctgatggccccaatgattctggacctccttcccccaattttgatgattcagggtatattatctcctgtaattgactgtagtcaacattttgcgttgactgagccattacagactctgctacatatttacaatgtgaactttccgttccttgctgggattctgtccctgcctcttcttcacaatctgttacacagcttttaggggcatcagaaactgaaacaatatcttctcctgtttgaaatggttctaaagttgctttaataatggcccaatcattccatactgtaagtgggatgattttaccttccctattngcttgttttaattctttgccaattttttccaatcttttagatctaaagttccctgttctgaaaacatgggca

SEQ ID NO: 1782 - DNA, 678 bp, Homo sapiens
aatgaaaagaaacatttatttacactttgtacatatcgattccaacaaacaataaaaggcctacacatcagtataatcataatatatgcgaacttccgatcttctcacactttgcagtgatctgatgctttcactcctggttctgatatttgattttttgaacagccttcttgaaaatgacctacacatgaaaaagtaaattattggatccaggcaaacattacacgcagacaagaaaagtgtaatttctttgcagtaatataggattttttgtgcagattcatctaaaagcctgtctaagtgactaaaagtaaaaggaattctgcacaagtgatatggtagaaagcaggtaaaaaacacagccacaacaaccctgatgctctggttatgttttcgctttcggcttgactgacttatgaattgcctgctggatttgtggatgtacctggatatggctatgtaacatccgatcagaatcaccagcacggccacaaacaagcagctgttcacataggtgactgccgtatgccatttgacccccaaaggactgttaagttttgagcagtcatggatattgtgctctgttggctgaccatatgtcatgatgatgtctggcaaagatcaaacagtcatgatcaccccaacacaaacagataaaaccttcgtgaatgttatgct

SEQ ID NO: 1783 - DNA, 499 bp, Homo sapiens
ttcggcacgagggagagaattccagcagggaagaagtacacatttccacgaatggtttgggaattcaagcatcatatggctgaggtttgaactacagctcatgccaataacatgtgcacatgcgccagcattccagcgtccaacagagcatgcgtgcaccattccagcatccggcaacaatgcaccagcattccagcgtccaacagagcatccgtgtaccattccggcatttggcaacaatgcaccagcattccagagtccaacagggcatgcgtgcaccattccagcatccggcaacaatgcaccagcattccagcgtccaacagagcatccgtgtaccattccggcatttggcaacaatgcaccagcattccagagtccaacagggcatgcgtgcaccattccagcatccggcaacaatgcaccagcattccagcgtccaacagagcgtgcgtgcaccattccagcatccggcaacaatgcaccagcattccagcgt

SEQ ID NO: 1784 - DNA, 387 bp, Homo sapiens
gcctactactactatacggctgcgagaagacgacagaagggagttagtggatataattaagggtctcaattagttgactttaggctgggtttatcctgcttggactgtcctaatcaggtgagaccttgaaaggactgggttcttcctgagcatagagactcacagtgtgagagggactcagcatgagggggttcctccagcatgggctttgaaaatgaaagggctgtgggccgggtgcggtgcctcacgcctgtaatcccagcactttgggaggctgaggcgggcggatcatgaggtcaggagatcgagaccatcctggctaacatggtgaaaccctgtctctactaagaatacaaaaaaaaaaaaaaaaaaaaaaaaagtcgtatc

SEQ ID NO: 1785 - DNA, 149 bp, Homo sapiens
gagaagacgacagaagggacaaagagatctggacagaatcgcccctgatgcggcggcatgccgacaagaagcattagaacaaaccattctgggtaataaatggtctctttgccctgagacaaaaaaaaaaaaaaaaaaaagtcttatcg

SEQ ID NO: 1786 - DNA, 536 bp, Homo sapiens
attcggcacgagtggagccaaaacctgtcccagtttttccctgaggccatttctttcatagatgaagcccggggcaagaactgtggtgtcttggtacattgcttggctggcattagccgctcagtcactgtgactgtggcttaccttatgcagaagctcaatctgtcgatgaacgatgcctatgacattgtcaaaatgaaaaaatccaacatatcccctaacttcaacttcatgggtcagctgctggacttcgagaaggacgctgggactcagcagcccatgtgacaacagggttccagcacagcagctgtattttaccaccccttccaaccagaatgtataccaggtggactctctgcaatctacgtgaaagaaccccacacccctccttgctggaatgtgtctggcccttcagcagtttctcttggcagcatcagctgggctgctttctttgtgtgtggccccaggtgtcaaaatgacaccagctgtctgtactagacaaggttaccaagtgcggaattggttaatactaacag

SEQ ID NO: 1787 - DNA, 479 bp, Homo sapiens
  misc_feature 1, 390, 455, 466: n = A,T,C or G
nggaataagaagaagcagcagaaaccagaactcagggatctggtctttagctccccaggggacatcccagctgaagacttcgctgaccacgtcaggaagaatgagagggacagcaactgtggttttgcagacgagtaccagcaactctccctggtgggccacagccagtctcagatggtggcttcggcttcagagaacaacgccaagaaccgctacagaaatgtgctgccctatgactggtcccgggtgcctctgaagcccatccatgaggagccaggctctgactacatcaatgccagcttcatgcccgtgaagtgtgagcattactggcctctggacttcgcagccctgcacccatggggcacctggcgggttaaccctgggtagatnaggaagttgatgggagaactgggacggtgcgggaattgctgcttccttccaggttgaaggacagnaagacactgtnttttgcgccaatt

SEQ ID NO: 1788 - DNA, 318 bp, Homo sapiens
ttttttttttttttttttttttttttttttacaatttcatggcaatttatttaaaaaaggtagagaccatgttttttcttttctttaaatctctgtaccctaccgcttggctcaacattaggctctggatataataaagatttgttgaatgaacaagtacacaagtgaaaaatgcttaaaaacatgttctgctcaattggggtcagattgctgtccaaactcctccagtagaggacaatcgcctcctccttatgggaagatctatataatcacagaacagctggactcaaagaggagcctcagctaaggctaatggtt

SEQ ID NO: 1789 - DNA, 415 bp, Homo sapiens
gtgcaagtggcgaagcttgaccgagagcaggctggagcagccgcccaactcctggcgcgggatctgctgaggggtcacgattttaggtgatgggcaagtcagaaagtcagatggatataactgatatcaacactccaaagccaaagaagaaacagcgatggactccactggagatcagcctctcggtccttgtcctgctcctcaccatcatagctgtgacaatgatcgcactctatgcaacctacgatgatggtatttgcaagtcatcagactgcataaaatcagctgctcgactgatccaaaacatggatgccaccactgagccttgtacagactttttcaaatatgcttgcggaggctggttgaaacgtaatgtcattcccgagaccagctcccgttacggcaactttgacat

SEQ ID NO: 1790 - DNA, 557 bp, Homo sapiens
gacagaggggaggccccacgccaccgcctctgcctccaggccgcccgctgctgcggggccaccatgcacctgcccaggcctggagactgacccgaccccggcactacctcgaggctccgcccccacctgctggaccccagggtcccaccctggcccaggaggtcagccagggaatcattaacaagaggcagtgacatggcgcagaaggagggtggccggactgtgccatgctgctccagacccgaggtggcagctctcactgcggggaccctgctacttctgacagccatcggggcggcatcctgggccattgtggctgttctcctcaggagtgaccaggagccgctgtacccagtgcaggtcggctctgcggacgctcggctcatggtctttgacaagacggaagggacgtggcggctgctgtgctcctcgcgctccaacgccagggtagccggactcagctgcgaggagatgggcttcctcagggcactgacccactccgagctggacgtgcgaacggcgggcgccaatggcacgtcgggcttcttctgtgtgga

SEQ ID NO: 1791 - DNA, 493 bp, Homo sapiens
gggagcgaattccagtctgcagggctgataagcgaggcattagtgagattgagagagactttaccccgccgtggtggttggagggcgcgcagtagagcagcagcacaggcgcgggtcccgggaggccggctctgctcgcgccgagatgtggaatctccttcacgaaaccgactcggctgtggccaccgcgcgccgcccgcgctggctgtgcgctggggcgctggtgctggcgggtggcttctttctcctcggcttcctcttcgggtggtttataaaatcctccaatgaagctactaacattactccaaagcataatatgaaagcatttttggatgaattgaaagctgagaacatcaagaagttcttatataattttacacagataccacatttagcaggaacagaacaaaactttcagcttgcaaagcaaattcaatcccagtggaaagaatttggcctggattctgttgagctagcacattatgatgtcctg

SEQ ID NO: 1792 - DNA, 472 bp, Homo sapiens
tattgatggaattctttcctcaaagtttccaaccagtcgcttggagatgagcgcagttgcagacatctttgacagagatggcgatggatatattgactactatgaatttgtagcagcccttcacccaaataaagatgcatataaacctatcacagatgccgacaaaatcgaagatgaggtgacaaggcaggtagctaagtgtaaatgtgcaaagcgatttcaagttgagcagattggtgataataaatacaggttcttcctgggaaatcagtttggagactcccagcaactgcgactggtccggatcctgcggagtactgtgatggttcgtgttggaggtggatggatggcacttgatgagttcttagtgaaaaatgatccttgcagggccaaaggaaggacaaacatggaactgcgtgagaagttcattttagcagatggtgccagccagggtatggctgctttccgaccc

SEQ ID NO: 1793 - DNA, 491 bp, Homo sapiens
agtcctgcttatcacaatgaatgttctcctgggcagcgttgtgatctttgccacctttcgtgactttatgcaatgcatcatgctattttcattacctaatgagggagttccaggagattcaaccaggaaatgcatggatctcaaaggaaacaaacacccaataaactcggagtggcagactgacaactgtgagacatgcacttgctacgaaacagaaatttcatgttgcacccttgtttctacacctgtgggttatgacaaagacaactgccaaagaatcttcaagaaggaggactgcaagtatatcgtggtggagaagaaggacccaaaaaagacctgttctgtcagtgaatggataatctaatgtgcttctagtaggcacagggctcccaggccaggcctcattctcctctggcctctaatagtcaatgattgtgtagccatgcctatcagtaaaaagatttttgagcaaacaaaaaaaaaaaaaaaaa

SEQ ID NO: 1794 - DNA, 137 bp, Homo sapiens
tggcaccatgtgggtcccggctgtcttcctcaccctgtccgtgacgaggattggtgctgcacccctgatgctgtctcggattgtgggaggctgggagtgctaaaacattcccaaccctggcaggtgcttgtggcctc

SEQ ID NO: 1795 - DNA, 827 bp, Homo sapiens
  misc_feature 365, 617: n = A,T,C or G
aggtttgagggggaatgctggagaatgtaatggggtatgaagacattccatataattattccaagggtgagtggtaggaattttttccataggaggtgtatgatttggtcgtaccggaatcgggggtatgctgtccgaattcataagaacagggaggttagaagtagggtcttggtgacaaaatatgttgtgtagagttcaggggagagtgcgtcatatgttgttcctaggaagattgtagtggtgagggtgtttattataataatgtttgtgtattcggctatgaagaatagggcgaaggggcctgcggcgtattcgatgttgaagcctgagactagttcggactccccttcggcaaggtcganaggggttcggttggtctctgctagtgtggagataaatcatattatggccaagggtcatgatggcaggagtaatcagaggtgttcttgtgttgtgataagggtggagaggttaaaggagccacttattagtaatgttgatagtagaatgatggctagggtgacttcatatgagattgtttgggctactgctccgcagtgcgccgatcaggcgtagtttgagtttgatgctcaccctgatcagaggattgagtnaacgcctaggctagaggtgggctagataaataggaggcctaggttgagggtgaaccaggggttgggtattgggaagggggtttctagtagaagagcgatggttgagagctaaagtcggggcgttgatgtaaaggggaatggtaattgtggcggttttaagggccctttggtgaaaagtttaattgccttacgaggggtttgtagtaaccc

SEQ ID NO: 1796 - DNA, 375 bp, Homo sapiens
tcatagctctgtttgtgtctgaggaggagaaaaagctgactcggaaggaggtctacatcaagaatggggataagaaaggcagctgtgagagagatgctcaatatgccccaggctatgacaaagtcaaggacatctcagaagtggtcacccctcggttcctttgtactggaggagtgagtccctatgctgaccccaatacttgcagaggtgattctggcggccccttgatagttcacaagagaagtcgtttcattcaagttggtgtaatcagctggggagtagtggatgtctgcaaaaaccagaagcggcaaaagcaggtacctgctcacgcccgagactttcacatcaacctctttcaagtgctgccctggctga

SEQ ID NO: 1797 - DNA, 475 bp, Homo sapiens
tggatcccccgggctgcaggcaccgaggagctgcgggtgcgcctcgcctcccacctgcgcaagctgcgtaagcggctcctccgcgatgccgatgacctgcagaagcgcctggcagtgtaccatgccggggcccgcgagggcgccgagcgcgggctcagcgccatccgctagcgcctggggcccctggtggaacatggccgcgtgcgggccgccactgtgggctccctggccggccagccgctacaagagcgggcccatgcctggggcgagcggctgcgcgcgcggatggaggacatgggcagccggacccgcgaccgcctggacgaggtgaacgagcaggtggcggatgtgcgctccaagctggaggagcaggcccagcagatacgcctgcaggccgaggccttccaggcccgcctcaagagctggttcgagcccctggtggaagacatgcagcgccagtgggccgggctggtgg

SEQ ID NO: 1798 - DNA, 266 bp, Homo sapiens
cctcgactcccccaaaatcacaaagaagaccctagacctataatttgtcttcaggtagtaaattcccaataggtctgctggagtgggcgctgagggctccctgctgctcagacctgagccctccaggcagcagggtcccacttaccccctccccaccctgttccccaaaggtgggaaagaggggattccccagcccaaggcagggttttcccagcaccctcctgtaagcagaagtctcagggtccagacccttccctgagccccca

SEQ ID NO: 1799 - DNA, 565 bp, Homo sapiens
cggcacgaggcaaaacaccaaatggcggatgacgccggtgcagcgggggggcccggaggccctggtggccctgggatggggaaccgcggtggcttccgcggaggtttcggcagtggcattcggggccggggtcgcggccgtggacggggccggggccgaggccgcggagctcgcggaggcaaggccgaggataaggagtggatgcccgtcaccaagttgggccgcttggtcaaggacatgaagatcaagtccctggaggagatctatctcttctccctgcccattaaggaatcagagatcattgatttcttcctgggggcctctctcaaggatgaggttttgaagattatgccagtgcagaagcagacccgtgccggccagcgcaccaggttcaaggcatttgttgctatcggggactacaatggccacgtcggtctgggtgttaagtgctccaaggaggtggccaccgccatccgtggggccatcatcctggccaagctctccatcgtccccgtgcgcagaggctactgggggaacaagatcggcaagccccacactgtccctt

SEQ ID NO: 1800 - DNA, 425 bp, Homo sapiens
cggcacgagtcctccgctcgctgcctctcctccgcttccttctctctgcgtagtgggactcttctttggcagcgccatcgtcatgtacatggcccctaagtcccgccatcctgaggagcagcacaaggtcctttttctattttacagttctttcaacccgatgctaaaccccctgatttacaacctgaggaatgtagacgtcaatggtgccctgaggagagcactgtgcaaggaaagtcattcctaagaggtgtgacatttgaactgccagcctcagttgtcacgtggactcttgatgcccaattattgcctcaatccagaaaagtttacttctctttatctgtgctttactgacagaagggcaagtcttctctcgttctttgcagataaaattttacatgtgttgcattcattgggtttctatg

SEQ ID NO: 1801 - DNA, 551 bp, Homo sapiens
tcggcacgaggatgtctagcagcttcagacatttggttaagaaccccatgggaaaaaaaaaaatccttgctaatgtggtttcctttgtaaaccaggattcttatttgtgctgttatagaatatcagctctgaacgtgtggtaaagatttttgtgtttgaatataggagaaatcagtttgctgaaaagttagtcttaattatctattggccacgatgaaacagatttcaactgataaagagctggaaaactccatgtactttggaatctcctccaagatagccagagtttaatacatcttcattctcaacactctccaaagaacttgacctaccttatgggttccatatttttcttcttaaatgtgcatcaatcatgccttgcccccaacctttaaatatattcttagacctggtaaatgcactcagacttgcgtctttaggaatttttaactttctttcactacattggcacttaaattttttctttataaagctttttgaaggtcataaacaaagaccataattgatgatagacctaatacatttcctct

SEQ ID NO: 1802 - DNA, 553 bp, Homo sapiens
  misc_feature 477: n = A,T,C or G
cggcacgaggcggggccccttttcatctacctgctcttctacttccgagtgcccttcatctatggccacaaatatgactttacgtccagtcggcatacagtggtgcacctcgcctgcatctgtcactcattccactacatcaagcgcctgctggagacgctcttcgtgcaccgcttctcccatggcactatgcctttgcgcaacatcttcaagaactgcacctactactggggcttcgccgcgtggatggcctattacatcaatcaccctctctacactccccctacctacggagctcagcaggtgaaactggcgctcgccatctttgtgatctgccagctcggcaacttctccatccacatggccctgcgggacctgcggcccgctgggtccaagacgcggaagatcccataccccaccaagaaccccttcacgtggctcttcctgctggtgtcctgccccaactacacctacgangtggggtcctggatcggtttcgccatcatgacgcagtgtctcccagtggccctgttctccctggtgggtttcaccc

SEQ ID NO: 1803 - DNA, 569 bp, Homo sapiens
tcggcacgagggtcgtccgcgcctcgagggccatgattggacacaccgactcggctgaggctgccccaggaaccataaggggtgacttcagcgtccacatcagcaggaatgtcatccacgccagcgactccgtggagggggcccagcgggagatccagctgtggttccagagcagtgagctggtgagctgggcagacgggggccagcacagcagcatccacccagcctgaggctcaagctgcccttaccaccccatcccccacgcaggaccaactacctccgtcagcaagaacccaagcccacatccaaacctgcctgtcccaaaccacttacttccctgttcacctctgccccaccccagcccagaggagtttgagccaccaacttcagtgcctttctgtaccccaagccagcacaagattggaccaatcctttttgcaccaaagtgccggacaacctttgtggtgggggggggtcttcacattatcataacctctcctctaaaggggaggcattaaaattcactgtgcccagcacatgggtggtacactaaaaaaaaaaaaaaaaaa

SEQ ID NO: 1804 - DNA, 453 bp, Homo sapiens
tcggcacgaggccttgggggaagcctgcccatgtcgggctgtgggaggctgatcagtgcgtgtgagagtggcttcccttctgcctgactccccactccctgacctgccccttccttgtttttcctcctactggtctccaccaaggctttgttagcccccaccctgcctggtgtgcagctaacccctccctccccacagccagaggaggccacagacccctcaggggagttccgcgctggggtctgggctgtgctccctcactaaagggaaggaaaggaagctgggcgtcctccgggccccccaacacacgtcccatttagccctgcacagcggtctccttcccctaagccagcactgctgctccctggagcccgggaaggaggctgcctggctggaggcccgagccgatggcgcctgtgctgaggatttgtgctgtgatttgggcaaatcatt

SEQ ID NO: 1805 - DNA, 613 bp, Homo sapiens
ttcggcacgaggatgaggagggcaagtttgtccggctgcgcaacaagtccaatgaggaccagtccatgggcaattggcagatcaagcgccagaatggagatgatcccttgctgacttaccggttcccaccaaagttcaccctgaaggctgggcaggtggtgacgatctgggctgcaggagctggggccacccacagcccccctaccgacctggtgtggaaggcacacaacacctggggctgcgggaacagcctgcgtacggctctcatcaactccactggggaagaagtggccatgcgcaagctggtgcgctcagtgactgtggttgaggacgacgaggatgaggatggagatgacctgctccatcaccaccatggctcccactgcagcagctcgggggaccccgctgagtacaacctgcgctcgcgcaccgtgctgtgcgggacctgcgggcagcctgccgacaaggcatctgccaacggctcaggatcccaggtgggcggacccatctcctctggctcttctgcctccagtgtcacggtcactcgcatctaccgcattgtggggggcagtgggggtggcagcttcggggacaatctggtcacccgctccta

SEQ ID NO: 1806 - DNA, 347 bp, Homo sapiens
  misc_feature 93, 300: n = A,T,C or G
tcggcacgaggaatctgaagtgggagcatccccctcctctccctgttagaatgttagtgccccgcactgtgccccaagttctaggccccccanaaagctgtcagagccggccgccttctcccctctcccagggatgctctttgtaaatatcggatgggtgtgggagtgaggggttacctccctcgccccaaggttccagaaggccctagcgggatgggctcgctgaacctcgaggaactccaggacgaggaggacatgggacttgcgtggacagtcagggttcacttgggctctctctanctccccaattctgcctgcctcctccctcccagctgcactttaaccct

SEQ ID NO: 1807 - DNA, 518 bp, Homo sapiens
agccaccacaggcacattcaccggtggcgcgtcctggtgggcctccgggtgccgacaccaggcatcagccgcccctccctcccgccacagtaggtctgtgcggcctgtccggccccgctgctgtggcgcaggcaattctcccaaacggttccactgggcgcctggggctgggggcggagccagtgaccacgggagggcgggacctcacccggggcccaggacccctgaacacaagtcctccgagctggaggctactccagaaccacggtgccgcccaccgcctccagggccgccttgatcttctccgcctcagctttggcgacattggctttgatttcctggggcagggactccaccagcttctttgcctggacgaggttgatgccttggatgtagttcttgatttccttgatcagcttcactttgtccacgggcttcgcctcggtcaggcggacggtgaaatgtgtccgttctttcgctatggggatatcttcttccaccgcctcctgggctgctgc

SEQ ID NO: 1808 - DNA, 571 bp, Homo sapiens
tcacgctccccgcctgttcccccgccgcttttctcctctttcctctctttgttctcagctccccctgtcccctcagctccagacgtaggggaggggttgccacaggcctccctgtttgaagcctgcccttgtctgagatgctggtaatggccatggtacccccttctgggcatctgttctggtttttaaccattgtcttgttctgtgatgaggggaggggggcacatgctgagtctcccaaggctgcgtctggaggggcccctgcttctccagcctggacccccagctttgcccaacaccagcccctgccccagcccaagtccaaatgtttacagggagcctcctgcccagtcccccaaccccagccgctcggaggccccaaaggaaaaagcacaagaagcgtgagacgccaccattcctggaaaccacagtccacctgctcattctcgtagctttttaaaaaaatgaaagtaaaggaaaaaaaaaaaactgcaaatctagaaaactttttagagaaaaactatttaaaactgtcagatcctgaccagcaagcccccccccagcccccctt

SEQ ID NO: 1809 - DNA, 561 bp, Homo sapiens
  misc_feature 433: n = A,T,C or G
tcggcacgaggattatttcagaggtcactgaagactgtgattacatgcacctgccttagaaggtaggattttcttcccaggacctcctatcaccctaccctgcttcttgaggtccctggagccccaggtgggctgaggggcagggagccggctgtgcccagtatgcctcctggaccctccagttctgccacaggtctgccgatgccctgtccactgcctacacatgacagacaagtaaccccctcatgggggatggggacctacctggctcctcagccagcacccagcttaacccctgccatcccatgctgggccctccaggccaagagtctcagctggccgagagtccaggccttgcctcccccgaccgccatggagggggcagcccggcacagctgctgggagcccttgtgtgtctggtcacactttttangcgtcacgccaaaggccagcctcctggccccaatacccattttggaagcccctgtggccgtgtggatgtcggtaacagttgtataaaataaattctatttatcgctattaaaaaaaaaaaaaaaaaaa

SEQ ID NO: 1810 - DNA, 572 bp, Homo sapiens
  misc_feature 436: n = A,T,C or G
cttcctggtgtgggtcaacgaggaggaccacctgcgggtcatctccatgcagaaggggggcaacatgaaggaggtgttcacccgcttctgcaccggcctcacccagattgaaactctcttcaagtctaaggactatgagttcatgtggaaccctcacctgggctacatcctcacctgcccatccaacctgggcaccgggctgcgggcaggtgtgcatatcaagctgcccaacctgggcaagcatgataagttctcggaggtgcttaagcggctgcgacttcagaagcgaggcacatgcggtgtggacacggctgcggtgggcggggtcttcgacgtctccaacgctgaccgcctgggcttctcaaaggtggagctggtgcaaatggtggtggacggagtgaagctgctcatcgagatggaacagcggctggagcanggccaggccatcgacgacctcatgcctgcccagaaatgaatcccggcccacacccgacaccagccctgctgcttcctaacttattgcctgggcagtgcccaccatgcacccctgatgttcgccgtctggcgagccc

SEQ ID NO: 1811 - DNA, 530 bp, Homo sapiens
  misc_feature 134, 420: n = A,T,C or G
tcggcacgaggattaccactcaggcatttgactgaagatgcagctcactaccctattctctctttacgcttagttatcagctttttaaagtgggttattctggagtttttgtttggagagcacacctatcttantggttccccaccgaagtggactggcccctgggtcagtctggtgggaggacggtgcaacccaaggactgagggactctgaagcctctgggaaatgagaaggcagccaccagcgaatgctaggtctcggactaagcctacctgctctccaagtctcagtggcttcatctgtcaagtgggatctgtcacaccagccatacttatctctctgtgctgtggaagcaacaggaatcaagagctgccctccttgtccacccacctatgtgccaactgttgtaactaggctcanagatgtgcacccatgggctctgacagaaagcagatacctcaccctgctacacatacaggatttgaactcagatctgtctgataggaatgtgaaagcacggactcttactg

SEQ ID NO: 1812 - DNA, 470 bp, Homo sapiens
  misc_feature 248, 261, 448: n = A,T,C or G
ttttttaaagtgacccagttttattttggttttggaggccagacagggcattgctccacgggttcgggctgtacaaccttcccctccttgaggtgggaggcccagcaaccacagggcccaggcagcggggtgggaggctcaggaaatggtggctctggggacccgatcccgaggagagagggggcagcaggcaaaggcctgcaatggctcaaattgggggaagagggcggcgagggggagaggacacnatccaagaaccanagtccgaaagctgaagctggtccggtctctttcactttacggccgaggctggggtcagagaagtgaagccaaactgtcctcccgcaggaggcaaggcctggagggacgccagggtcccagtccggtgccgggccctgcgcacacagccgccgcctccaccctcgcggagggcgcgcgcggggcccantcgctgggtgcagggtccggcg

SEQ ID NO: 1813 - DNA, 585 bp, Homo sapiens
tcggcacgaggcggcaacactagagaaggcaccttgcagatattttcaatacaaatgccatcaactctgacacagtcaaacgcttagttcattttgttctggcaaaatttaccacatctttggccaaagaggggggaacaagcaagagggagtcacatctgagcacagcagctcatcccacaagctacaagctgctcagaggctcgaagcccccaggggcctcccttctcccctcacttggattctcccagcccgcgtccttcctccccctctcacatccgccatcctttcctctcgccggccccctgacggtgcaggccggagcggcacctacgtcctgatcgacatggttctcaacaagatggccaaaggtgctaaagagattgatatcgcagcgaccctggagcacttgagggaccagagacccggcatggtccagacgaaggagcagtttgagttcgcgctgacagccgtggctgaggaggtgaacgccatcctcaaggcccttccccagtgagcggcagcctcaggggcctcaggggagcccccacccacggatgttgtcaggaatcatgatctgacttt

SEQ ID NO: 1814 - DNA, 289 bp, Homo sapiens
gagaagacgacagaagggtctcttcttcagatttgcagtctggggaagacacagcctctactgtactttagaacctgagatatggtggtggagggagccctgggtcgagtggtaagattcacccttaggttagtattgacgtaaggtgacgaggagctgtagacaaaagattgtaaccataagaacttcatagtttttgcattttcaccgagcttatatttggtgtgttttttgtcttttctttatgattatcaataaaatgcaaaaaaaaaaaaaaaaaaaaaaaagt

SEQ ID NO: 1815 - DNA, 443 bp, Homo sapiens
gcttcactttttccgttgctagcagtggaagggtcacagaccaaacactaaggcctgagcggtgacaatcgaggcgagatgatggtcaacagggaatgcctcgtgggagaaaaaagacaattttattctcagcgctgattttgagatgatgggcttgggaaacgggcgtcgcagcatgaagtcgccgcccctcgtgctggccgccctggtggcctgcatcatcgtcttgggcttcaactactggattgcgagctcccggagcgtggacctccagacacggatcatggagctggaaggcagggtccgcagggcggctgcagagagaggcgccgtggagctgaagaagaacgagttccagggagagctggagaagcagcgggagcagcttgacaaaatccagtccagccacaacttccagctggggagcgtcaacaagctgtacc

SEQ ID NO: 1816 - DNA, 515 bp, Homo sapiens
gagtggtgtgtgagagtcaggcgtccctctgcctgcccactcagtggcaacacccgggagctgttttgtcctttgtggagcctcagcagttccctctttcagaactcactgccaagagccctgtacaggagccaccatgcagtgcttcagcttcattaagaccatgatgatcctcttcaatttgctcatctttctgtgtggtgcagccctgttggcagtgggcatctgggtgtcaatcgatggggcatcctttctgaagatcttcgggccactgtcgtccagtgccatgcagtttgtcaacgtgggctacttcctcatcgcagccggcgttgtggtctttgctcttggtttcctgggctgctatggtgctaagactgagagcaagtgtgccctcgtgacgttcttcttcatcctcctcctcatcttcattgctgaggttgcagctgctgtggtcgccttggtgtacaccacaatggctgagcacttcctgacgttgctggtagtgcctgccatca

SEQ ID NO: 1817 - DNA, 485 bp, Homo sapiens
ggtacctgtctataaggagtcctgcttatcacaatgaatgttctcctgggcagcgttgtgatctttgccaccttcgtgactttatgcaatgcatcatactatttcatacctaatgagggagttccaggagattcaaccaggaaatgcatggatctcaaaggaaacaaacacccaataaactcggagtggcagactgacaactgtgagacatgcacttgctacgaaacagaaatttcatgttgcacccttgtttctacacctgtgggttatgacaaagacaactgccaaagaatcttcaagaaggaggactgcaagtatatcgtggtggagaagaaggacccaaaaaagacctgttctgtcagtgaatggataatctaatgtgcttctagtaggcacagggctcccaggccaggcctcattctcctctggcctctaatagtcaatgattgtgtagccatgcctatcagtaaaaagatttttgagcg

SEQ ID NO: 1818 - DNA, 618 bp, Homo sapiens
ttcggcacgagctcgtgccgcgggcccagaggaattcagagttaaaccttgagtgcctgcgtccgtgagaattcagcatggaatgtctctactatttcctgggatttctgctcctggctgcaagattgccacttgatgccgccaaacgatttcatgatgtgctgggcaatgaaagaccttctgcttacatgagggagcacaatcaattaaatggctggtcttctgatgaaaatgactggaatgaaaaactctacccagtgtggaagcggggagacatgaggtggaaaaactcctggaagggaggccgtgtgcaggcggtcctgaccagtgactcaccagccctcgtgggctcaaatataacatttgcggtgaacctgatattccctagatgccaaaaggaagatgccaatggcaacatagtctatgagaagaactgcagaaatgaggctggtttatctgctgatccgtatgtttacaactggacagcatggtcagaggacagtgacggggaaaatggcaccggccaaagccatcataacgtcttccctgatgggaaaccttttcctcaccaccccggatggagaagatggaatttcatctacgtcttccacacacttg

SEQ ID NO: 1819 - DNA, 69 bp, Homo sapiens
gcttctatccagcagaagtgactatcacgtggaggaagaacgggaagcttgtcatgcctcacagcagtg

SEQ ID NO: 1820 - DNA, 399 bp, Homo sapiens
gatagttctccctgagtgagacttgcctgcttctctggcccctggtcctgtcctgttctccagcatggtgtgtctgaagctccctggaggctcctgcatgacagcgctgacagtgacactgatggtgctgagctccccactggctttggctggggacacccgaccacgtttcctgtggcagcctaagagggagtgtcatttcttcaatgggacggagcgggtgcggttcctggacagatacttctataaccaggaggagtccgtgcgcttcgacagcgacgtgggggagtaccgggcggtgacggagctggggcggcctgacgctgagtactggaacagccagaaagacttcctggaagacaggcgcgccgcggtggacacctactgcagacacaacta

SEQ ID NO: 1821 - DNA, 495 bp, Homo sapiens
  misc_feature 414: n = A,T,C or G
tcggcacgagggcaaccgctccggcaacgccaaccgctccgctgcgcgcaggctgggctgcaggctctcggctgcagcgctgggtggatctaggatccggcttccaacatgtggcagctctgggcctccctctgctgcctgctggtgttggccaatgcccggagcaggccctctttccatcccctgtcggatgagctggtcaactatgtcaacaaacggaataccacgtggcaggccgggcacaacttctacaacgtggacatgagctacttgaagaggctatgtggtaccttcctgggtgggcccaagccaccccagagagttatgtttaccgaggacctgaagctgcctgcaagcttcgatgcacgggaacaatggccacagtgtcccaccatcaaagagatcagagaccanggctcctgtggctcctgctgggccttcggggctgtggaagccatctctgaccggatctgcatccacaccaatgcgcacgtc

SEQ ID NO: 1822 - DNA, 582 bp, Homo sapiens
ccgaggatggccgtcatggcgccccgaaccctcgtcctgctactctcgggggccctggccctgacccagacctgggcgggctcccactccatgaggtatttctacacctccgtgtcccggcccggccgcggggagccccgcttcatcgccgtgggctacgtggacgacacgcagttcgtgcggttcgacagcgacgccgcgagccagaggatggagccgcgggcgccgtggatagagcaggaggggccggagtattgggaccggaacacacggaatgtgaaggcccactcacagactgaccgagagagcctgcggatcgcgctccgctactacaaccagagcgaggacggttctcacaccatccagaggatgtatggctgcgacgtggggccggacgggcgcttcctccgcgggtaccagcaggacgcttacgacggcaaggattacatcgccctgaacgaggacctgcgctcttggaccgcggcggacatggcggctcagatcacccagcgcaagtgggagacggcccatgaggcggagcagtggagagcctacctggagggccggtgcgtggagtggctc

SEQ ID NO: 1823 - DNA, 57 bp, Homo sapiens
tcgcgcgcctgcaggtcgacactagtggatccaaagaattcggcacgagctctttct

SEQ ID NO: 1824 - DNA, 645 bp, Homo sapiens
  misc_feature 512: n = A,T,C or G
tcggcacgaggaaacacaagtatctctggtcagagcctcagaattgctcagccaccaaaagtaactaccttcgaggtactggtccctacccaccttccgtggactggcggaaaaaaggaaattttgtctcacctgtgaaaaatcagggtgcctgcggcagttgctggactttctccaccactggggccctggagtctgcgatcgccatcgcaaccggaaagatgctgtccttggcggaacagcagctggtggactgcgcccaggacttcaataatcacggctgccaagggggtctccccagccaggctttcgagtatatcctgtacaacaaggggatcatgggtgaagacacctacccctaccagggcaaggatggttattgcaagttccaacctggaaaggccatcggctttgtcaaggatgtagccaacatcacaatctatgacgaggaagcgatggtggaggctgtggccctctacaaccctgtgagctttgcctttgaggtgactcangacttcatgatgtatagaacgggcatctactccagtacttcctgccataaaactccagataaagtaaaccatgcagtactggctgttgggtatggagaaaaaatgggatcccttactggatcgtgaaaaactc

SEQ ID NO: 1825 - DNA, 635 bp, Homo sapiens
ttcggcacgaggagtactttgtgctgacagcagcacattgtttcactgtggatgacaaggaacactcaatcaaggtcagcgtaggaggggagaagcgggacctggagatagaagtagtcctatttcaccccaactacaacattaatgggaaaaaagaagcaggaattcctgaattttatgactatgacgttgccctgatcaagctcaagaataagctgaaatatggccagactatcaggcccatttgtctcccctgcaccgagggaacaactcgagctttgaggcttcctccaactaccacttgccagcaacaaaaggaagagctgctccctgcacaggatatcaaagctctgtttgtgtctgaggaggagaaaaagctgactcggaaggaggtctacatcaagaatggggataagaaaggcagctgtgagagagatgctcaatatgccccaggctatgacaaagtcaaggacatctcagaggtggtcacccctcggttcctttgtactggaggagtgagtccctatgctgaccccaatacttgcagaggtgattctggcggccccttgatagttcacaagaaaagtcgtttcattcaagttggtgtaatcagctggggagtagtggatgtctgc

SEQ ID NO: 1826 - DNA, 327 bp, Homo sapiens
  misc_feature 53, 60, 86, 106, 138, 141, 143, 177, 198, 210, 228, 230,258, 272, 280, 288, 304, 319: n = A,T,C or G
ttttttttggagtttcaacgtttattgaggtcacggtggggtgaggtgcaggncggcctntctcccggagccccgtggagggagtntggggggacgggtggggccntccggacgccacagttttcggggaagagctgnttntntccaaagatccgcctcgagggtttggagccaggntcggggtcccggccagcgttntgggaggggcgnttcaggggcggcccttgntnccacacggcgcagtggaaacggatccantccacgtagagggntacccgcntgaagaantcagggaaaaggcggntggcacatccccagntcacgaag

SEQ ID NO: 1827 - DNA, 442 bp, Homo sapiens
cctggtttctggtggcctctatgaatcccatgtagggtgcagaccgtactccatccctccctgtgagcaccacgtcaacggctcccggcccccatgcacgggggagggagatacccccaagtgtagcaagatctgtgagcctggctacagcccgacctacaaacaggacaagcactacggatacaattcctacagcgtctccaatagcgagaaggacatcatggccgagatctacaaaaacggccccgtggagggagctttctctgtgtattcggacttccttctctacaagtcaggagtgtaccaacacgtcaccggagagatgatgggtggccatgccatccgcatcctgggctggggagtggagaatggcacaccctactggctggttgccaactcctggaacactgactggggtgacaatggcttctttaaaatactc

SEQ ID NO: 1828 - DNA, 394 bp, Homo sapiens
caggagaggatgacttcattgctggggacttggaagcttgggggaccctgaccttcaggcccgggaaccctaggccaggacgctggcaatccaggccgaatagctcgccacgcgggtgtagatcccgggcttgttgcggttgccgcaaacgcgcgagcccgaggcgaccacgccctggagcacgcccccgcacaccagcgggcccacggaggcaccctggcagctgacccggggattgctgtccgcgcacatcaagcgctcggggatggcgccgcccaggtgcgtgctccgagagcaggtggtgcggaccagcactgacaagagcacgtgctgcaagcatgccggacggcggcccgcgtgtatgactatgccccaggcggacacgtggcaaaga

SEQ ID NO: 1829 - DNA, 493 bp, Homo sapiens
ttcggcacgagggggtggggggccaccgaggagaagggaagacctcagaagtgctgaacgctgccaaggtgcttctcattgagacacagagatgcaacagcagatatgtctatgacaacctgatcacaccagccatgatctgtgccggcttcctgcaggggaacgtcgattcttgccagggtgacagtggagggcctctggtcacttcgaagaacaatatctggtggctgataggggatacaagctggggttctggctgtgccaaagcttacagaccaggagtgtacgggaatgtgatggtattcacggactggatttatcgacaaatgagggcagacggctaatccacatggtcttcgtccttgacgtcgttttacaagaaaacaatggggctggttttgcttccccgtgcatgatttactcttaaagatgattcagaggtcacttcatttttattaaacagtgaacttgtaaaaaaaaaaaaaaaaaaaaa

SEQ ID NO: 1830 - DNA, 433 bp, Homo sapiens
gaaccccacttcggcaaacgagtcggtctggatcatctacagaggttgacagcaaatctcgactatcccctcggcgcagtaggtctggttcctcccctgaagtgaaagataagccaagagcagcacccagggcacagagtggttctgattcctctcctgaacctaaagctccagcccctcgggcccttcccacacgaagcagatcaggttcatcaagcaaaggcagaggcccttctcctgaatgaagcagcagtaccgagtcctctcctgaacatccgcccaaatccataactgctcgcataggttccaggtcatcaccagagcccaagaccaagtctcgtacaccacctcgacgtcgcagctctcgatcatctccggagctaacaaggaaggccagactgtcccgtagaagccgctctgcctcatcctcacc

SEQ ID NO: 1831 - DNA, 454 bp, Homo sapiens
  misc_feature 12, 13, 17, 19, 214, 370: n = A,T,C or G
acctgcagagcnnggantnatgcagccctcgcagaatgaatgccggcacttctccaatgtcttggcattctggatctcccccagacagatggggcaggtgctctcctgctcttctgcctcctcccgaagcgaggaggaagaggtgggggcagggggggaggaggaggggggagccccgaggctcctgggggcagaagtggggctgctcggaganggggtgggcctgcgcggtgcatctcagggtgctcccctccaccccccagagccaggcagcccatcagctccccctgcctctgagctttcttcagctctttctctgcctcttttagcagccccttgagagccttccgggctaggtagagcccatttngaggggccgggggaggaccctgtgggaaagcttgagaacatagatgtcagaagtttcgccatctatgaggattggacacacggt

SEQ ID NO: 1832 - DNA, 633 bp, Homo sapiens
  misc_feature 107, 197: n = A,T,C or G
ttcggcacgaggtccgcgggtaccggcaggacgcctacgacggcaaggattacatcgccctgaacgaggacctgcgctcttggaccgcggcggacatggcggctcanatcacactgacctggcagcgggatggggaggaccagacccaggacacggagctcgtggagaccaggcctgcaggggatggaaccttccanaagtgggcggctgtggtggtgccttctggagaggagcagagatacacctgccatgtgcagcatgagggtctgcccaagcccctcaccctgagatgggagctgtcttcccagcccaccatccccatcgtgggcatcattgctggcctggttctccttggagctgtgatcactggagctgtggtcgctgccgtgatgtgtccctcacagcttgtaaagtgtgagacagctgccttgtgtgggactgagaggcaagagttgttcctgcccttccctttgtgacttgaagaaccctgactttgtttctgcaaaggcacctgcatgtgtctgtgttcgtgtaggcataatgtgaggaggtggggagaccaccccacccccatgtccaccatgaccctcttcccacgctgacctgtgctccctccccaatcatctttcctgt

SEQ ID NO: 1833 - DNA, 519 bp, Homo sapiens
  misc_feature 135, 224: n = A,T,C or G
ttcggcacgagggaaatagtctggcagcctctacagcagaagaaacggcaggcagtgcccagggtcgtgcccaggaggctgagcagctgctacgcggtcctctgggtgatcagtaccagacggtgaaggccctanctgagcgcaaggcccaaggtgtgctggctgcacaggcaagggcagaacaactgcgggatgaggctcgggacctgttgcaagccgctcangacaagctgcagcggctacaggaattggaaggcacctatgaggaaaatgagcgggcactggagagtaaggcagcccagttggacgggttggaggccaggatgcgcagcgtgcttcaagccatcaacttgcaggtgcagatctacaacacctgccagtgacccctgcccaaggcctaccccagttcctaacactgccccacatgcatgtctgcctatgcactgaagagctcttggcccggcagggcccccaataaaccagtgtgaacccccaaaaaaaaaaaaaaaaaaaaaaaaa

SEQ ID NO: 1834 - DNA, 531 bp, Homo sapiens
gtgcaggccatttacaaaatggtttcgtccgtgatgaagatgccggaggacgagtcgaccccggaaaagaggactgagaaaatcttccgccaaatggacacaaacaacgacggcaagctgtccttggaggagttcatccgcggggccaaaagcgacccgtccatcgtgcgtctgctgcagtgcgaccccagcagcgcctcccagttctgagaggagccaggttccccttcctccctcccttcaccggccccctcccggctcttaacttccactcccttgtgtgtattctggctgggggccagattggggaagcccttctccccgggtctgccctgtggggggcttccggaaaagggaaccctgcggtacccccaggccaaagcaagtaagcggttagcaccccccaatcccagaggcaacaatagagacacaggctgggttggtctgcccctcagtcaggcccccttacccacccaccagccccaaggcccgacccctcccccaaaggggcagtccccttcttgcaggtct

SEQ ID NO: 1835 - DNA, 375 bp, Homo sapiens
  misc_feature 309, 359, 368: n = A,T,C or G
ctgcagcttactcataacaagatcacaaagctgggctcttttgaaggattggtaaacctgaccttcatccatctccagcacaatcggctgaaagaggatgctgtttcagctgcttttaaaggtcttaaatcactcgaataccttgacttgagcttcaatcagatagccagactgccttctggtctccctgtctctcttctaactctctacttaggacaacaataagatcaggcaacatccctgatgagtatttcaaggcgtttttaatggcatttgcaggtatctgcggtttatcttcaccacgggacngggcttaaggtggggatcccgggggggaattcttttccaagtggttcatncccgggggnttaggcc

SEQ ID NO: 1836 - DNA, 503 bp, Homo sapiens
attcggcacgaggaaaggaggctggggggcggcggaagcgagtagagtttgtgacatttgcgccagcccctccagcccagtcacctgaggagcctgtaggggcccctgctgtgcagtccatccttgtggcaggcgaggaggacatccgctgggtgtgtgaggacatggggctgaaggaccctgaggagcttcgcaactacatggagaggatccggggcagctcctgaccctccacagccacctggtcagccaccagctggggcaacgagggtggaggtcccactgagcctctcgcctgcccccgccactcgtctggtgcttgttgatccaagtcccctgcctggtcccccacaaggactcccatccaggccccctctgccctgccccttgtcatggaccatggtcgtgaggaagggctcatgccccttatttatgggaaccatttcattctaacagaataaaccgagaaggaaaccagaaaaaaaaaaaaaaaaaaggggggc

SEQ ID NO: 1837 - DNA, 372 bp, Homo sapiens
ttcggcacgaggcctcgtgccgtgtacagcagttctacgacctgctctccggttctctggaggtcatccgcaagtgggcggagaagatccctggctttgctgagctgtcaccggctgaccaggacctgttgctggagtcggccttcctggagctcttcatcctccgcctggcgtacaggtctaagccaggcgagggcaagctcatcttctgctcaggcctggtgctacaccggctgcagtgtgcccgtggcttcggggactggattgacagtatcctggccttctcaaggtccctgcacagcttgcttgtcgatgtccctgccttcgcctgcctctctgcccttgtcctcatcaccgaccggcatgggctgc

SEQ ID NO: 1838 - DNA, 525 bp, Homo sapiens
attcggcacgagggtggtccaggagccaggtgactacgaagtctcattcaagttcaacgcaggaacacatctcccgacagccccttcgtggtgcctgtggcttctccgtctggcgacgcccgccgcctcactgtttctagccttcgggagtcagggctaaaggtcaaccagccagcctcttttgcagtcagcctgaacggggccaagggggcgatcgatgccaaggtgcacagcccctcacgagccctggaggattgctatgtcacagaaattgaccaagataagtatgctgtgcgcttcatccctcgggagaatggcgtttacctgattgacgtcaagttcaacggcacccacatccctggaagccccttcaagatccgagttggggagcctgggcatggaggggacccaggcttggtgtctgcttacggagcatgtctggaaggcggtgtcacagggaacccagctgagttcgtcgtgaacacgaacaatgcgggagctggtgccctgtcggtgaccattgac

SEQ ID NO: 1839 - DNA, 636 bp, Homo sapiens
attcggcacgagggcagccaacaagaacaacgacgccctgcgccaggccaagcaggagatgatggaataccgacaccagatccagtcctacacctgcgagattgacgccctgaagggcactaacgattccctgatgaggcagatgcgggaattggaggaccgatttgccagtgaggccagtggctaccaggacaacattgcgcgcctggaggaggaaatccggcacctcaaggaggagatggcccgccatctgcgcgagtaccaggacctgctcaacgtgaagatggccctggatgtggagattgccacctatcggaagctgctggagggagaggagagccggatcaatctccccatccagacctactctgccctcaacttccgagaaaccagccctgagcaaaggggttctgaggtccataccaagaagacggtgatgatcaagaccatcgagacacgggatggggaggtcgtcagtgaggccacacagcagcagcatgaagtgctctaaagacagagaccctctgccaccagagaccgtcctcacccctgtcctcactgctccctgaagccagccttcttccatcccaggacaccacacccagcctcagccctcccctccctgctgcagggctc

SEQ ID NO: 1840 - DNA, 451 bp, Homo sapiens
acatgttcataccaactttattcatgatagccccaaactagaaacagcccattgttcaccagttagttgttcacctaacaggtgaaacgttaaaatgtggcattcatacatagaacactgctcagccataaaaaggaacaaagcttaaacacactgatgaacatacaaacatgctgagtaaaaggaacttacagaatacatactgcataagtgagtccgttatatgaagttctagaataggcaaaattaatctacagtgaacaaaatcctaacagtagctgactgccaggggagggaagaagggacaggagagagaggtgcaggaattgactaggtgaaaaaattcagatgtaatacagatgttccagacataggggtttgagttacatgcttttacatcaaaactcatcaaatgagtctgggtatggtggctcacacctgtaatcccagc

SEQ ID NO: 1841 - DNA, 359 bp, Homo sapiens
gtcaatgggctgctggacctggtgaaggcccgggctgtggagacctgcgtgccgggaagccagcctgtgccctgtgtcccctggtgggtggcaccagcaccggggggccggccaccggatagcctaggaacagtgccgatgacttgtgccaggcctgtgccgacgggcacgctgcacccgccagacccacacccaccgcgtcgtggacctggtgggctacagggccgggtggtatgatgaggaggcccgggagcgccaagcgcaccagtgtccccagcaccccggggaggcactgcgcttcctgtgccagccctgctcacagttgctgtgcagagagtgccgcctagacccccatctgg

SEQ ID NO: 1842 - DNA, 568 bp, Homo sapiens
  misc_feature 431: n = A,T,C or G
tcggcacgagggtaatcttgctctgcttttgcaaagcggctgagctgcgcaaagcaagcccaggcagtgtgagaagccgagtgaatcatggccgggcgggtggaggccggagaggctccaacccggtcaaacgctacgcaccaggcctcccgtgtgacgtgtacacatatctccatgagaaatacttagattgtcaagaaagaaaattagtttatgtgctgcctggttggcctcaggatttgctgcacatgctgctagcaagaaacaagatccgcacattgaagaacaacatgttttccaagtttaaaaagctgaaaagcctggatctgcagcagaatgagatctctaaaattgagagtgaggcgttctttggtttaaacaaactcaccaccctcttactgcagcacaaccagatcaaagtcttgacggangaagtgttcatttacacacctctcttgagctacctgcgtctttatgacaacccctggcactgtacttgtgagatagaaacgcttatttcaatgttgcagattcccaggaaccggaatttggggaactacgccaagtg

SEQ ID NO: 1843 - DNA, 485 bp, Homo sapiens
  misc_feature 144, 443: n = A,T,C or G
gggccgcggagcccaccccgcccacgtcgccggagccgccgcgcacgagccccaggcagacccccgcgcccggccccgcccggagaaagagcgccggcaagaggggcccggaccgcggcaccccgagtaccggcagcggcgcancgcaacaacatcgccgtgccaagagccgcgacaaggccaagcgggcaaccaggagatgcagcagaagttggtggagctgtcggctgagaacgagaagctgcaccagcgcgtggagcagctcacgcgggacctggccggcctccggcagttcttcaagcagctgcccagcccgcccttcctgccggccgccgggacagcagactgccggtaacgcgcggccggggcgggagagactcagcaacgacccatacctcagacccgacggcccggagcggacctgccctgccctggcgcacgangaccgccgggtgccgctgcagtttcttgggacataggagcgc

SEQ ID NO: 1844 - DNA, 517 bp, Homo sapiens
  misc_feature 214, 328: n = A,T,C or G
ttcggcacgagggtaggccagaagagcagcttcacagtagactgcagcaaagcaggcaacaacatgctgctggtgggggttcatggcccaaggaccccctgcgaggagatcctggtgaagcacgtgggcagccggctctacagcgtgtcctacctgctcaaggacaagggggagtacacactggtggtcaaatggggggacgagcacatcccangcagcccctaccgcgttgtggtgccctgagtctggggcccgtgccagccggcagcccccaagcctgccccgctacccaagcagccccgccctcttcccctcaaccccggcccangccgccctggccgcccgcctgtcactgcagccgcccctgccctgtgccgtgctgcgctcacctgcctccccagccagccgctgacctctcggctttcacttgggcagagggagccatttggtggcgctgcttgtcttctttggttctgggaggggtgagggatgggggtcctgtacacaaccacccact

SEQ ID NO: 1845 - DNA, 389 bp, Homo sapiens
gcggtcgcctactactactatacggctgcgagaagacgacagaagggagttagtggatataattaagggtctcaattagttgactttaggctgggtttatcctgcttggactgtcctaatcaggtgagaccttgaaaggactgggttcttcctgagcatagagactcacagtgtgagagggactcagcatgaggggtttcctccagcatgggctttgaaaatgaaagggctgtgggccgggtgcggtgcctcacgcctgtaatcccagcactttgggaggctgaggcgggcggatcatgaggtcaggagatcgagaccatcctggctaacatggtgaaaccctgtctctactaagaatacagaaaaaaaaaaaaaaaaagtcgtatcga

SEQ ID NO: 1846 - DNA, 125 bp, Homo sapiens; identical to SEQ ID NO: 1051

SEQ ID NO: 1847 - DNA, 609 bp, Homo sapiens
ttcggcacgaggcggagcggcacctacgtcctgatcgactggttctcaacaagatggccaaaggtgctaaagagattgatatcgcagcgaccctggagcacttgagggaccagagacccggcatggtccagacgaaggagcagtttgagttcgcgctgacagccgtggctgaggaggtgaacgccatcctcaaggcccttccccagtgagcggcagcactcagtgaggccgcccggcacacaaggcacgtttggcatttctctttgagagagtttatcattgggagaagccgcggggacagaactgaacgtcctgcagcttcggggcaagtgagacaatcacagctcctcgctgcgtctccatcaacactgcgccgggtaccatggacggccccgtcagccacacctgtcagcccaagcagagtgattcaggggctccccgggggcagacacctgtgcaccccatgagtagtgcccacttgaggctggcactcccctgacctcacctttgcaaagttacagatgcaccccaacattgagatgtgtttttaatgttaaaatattgatttctacgttatgaaaacagatgcccccgtgaatgcttacctgt

SEQ ID NO: 1848 - DNA, 159 bp, Homo sapiens
ccggtgggaaaagaccaccgaagggaccaagagatctggaccgaatcgcccgaccgggggcagctggccaccagaagcatttaaaccaaccatgcttggttaattaattggcttattcctgaacaaaaaaaaaaaaaaaaaaaaaaaaagtcgtatcga

SEQ ID NO: 1849 - DNA, 459 bp, Homo sapiens
gtctcttcctcggcgctgcctacggaggtggcagccatctccttctcggcatcatggccgccctcagaccccttgtgaagcccaagatcgtcaaaaagagaaccaagaagttcatccggcaccagtcagaccgatatgtcaaaattaagcgtaactggcggaaacccagaggcattgacaacagggttcgtagaagattcaagggccagatcttgatgcccaacattggttatggaagcaacaaaaaaacaaagcacatgctgcccagtggcttccggaagttcctggtccacaacgtcaaggagctggaagtgctgctgatgtgcaacaaatcttactgtgccgagatcgctcacaatgtttcctccaagaaccgcaaagccatcgtggaaagagctgcccaactggccatcagagtcaccaaccccaatgccaggctgcgcagtgaagaaaatgagt

SEQ ID NO: 1850 - DNA, 510 bp, Homo sapiens
acagaggggcttcactttttccgttgctagcagtggaagggtcacagaccaaacactaaggcctgagcggtgacaatcgaggcgagatgatggtcaacagggaatgcctcgtgggagaaaaaagacaattttattctcagcgctgattttgagatgatgggcttgggaaacgggcgtcgcagcatgaagtcgccgcccctcgtgctggccgccctggtggcctgcatcatcgtcttgggcttcaactactggattgcgagctcccggagcgtggacctccagacacggatcatggagctggaaggcagggtccgcagggcggctgcagagagaggcgccgtggagctgaagaagaacgagttccagggagagctggagaagcagcgggagcagcttgacaaaatccagtccagccacaacttccagctggggagcgtcaacaagctgtaccaggacgaaaaggcggttttggtgaataacatcaccacaggtgagaggctcatccgagtg

SEQ ID NO: 1851 - DNA, 564 bp, Homo sapiens
gcgccatggtgaagtgacgttcaactccgctctggcccagaggaggccaagaaggacgagcccaagagcggcgaggaggcgctcatcatcccccccgacgccgtcgcggtggactgcaaggacccagatgatgtggtaccagttggccaaagaagagcctggtgttggtgcatgtgctttggactagcatttatgcttgcaggtgttattctaggaggagcatacttgtacaaatattttgcacttcaaccagatgacgtgtactactgtggaataaagtacatcaaagatgatgtcatcttaaatgagccctctgcagatgccccagctgctctctaccagacaattgaagaaaatattaaaatctttgaagaagaagaagttgaatttatcagtgtgcctgtcccagagtttgcagatagtgatcctgccaacattgttcatgactttaacaagaaacttacagcctatttagatcttaacctggataagtgctatgtgatccctctgaacacttccattgttatgccacccagaaacctactggagttacttattaacatc

SEQ ID NO: 1852 - DNA, 451 bp, Homo sapiens
  misc_feature 412: n = A,T,C or G
acagaaggggatagttctccctgagtgagacttgcctgcttctctggcccctggtcctgtcctgttctccagcatggtgtgtctgaagctccctggaggctcctgcatgacagcgctgacagtgacactgatggtgctgagctccccactggctttggctggggacacccgaccacgtttcctgtggcagcctaagagggagtgtcatttcttcaatgggacggagcgggtgcggttcctggacagatacttctataaccaggaggagtccgtgcgcttcgacagcgacgtgggggagtaccgggcggtgacggagctggggcggcctgacgctgagtactggaacagccagaaggacttcctggaagacaggcgcgccgcggtggacacctactgcagacacaactacggngttggtgagagcttcacagtgcagcggcgagtccaacct

SEQ ID NO: 1853 - DNA, 104 bp, Homo sapiens
ggtctcccgcccggcgcccccagtgttttctgagggcggaaatggccaattcgggcctgcagttgctgggcttctccatggccctgctgggctgggtgggtctg

SEQ ID NO: 1854 - DNA, 396 bp, Homo sapiens
tttcagatcacgacaacaggtaacctttagtcagaactcaccacccactgtgttaagccttacatgacaatcaccatgaagatttacatacacatgttatatcatagtctcctcacaacatgtctaagaggtaggcacgtcattgttcccattttgcagatgaggaaactgaggttcagagagggcacttggcttgcccaaagtcacacagcagggagtggcagaggaagtcaggttgggtgaccccagtaactgctctcagaggctgggtgatgaccggcttcctggcttctctggaataaacctttgccaccacttcctgcatttcagcttcagtacaggcagagaatggggataggtgggggaatgaggtgagaggggagatgtttagaggtg

SEQ ID NO: 1855 - DNA, 442 bp, Homo sapiens
tcggcacgaggtgggcttgcacgaccagagccagcgcagcgcccctggggtgcaggagcgcaggctcaagcgcatcatctcccaccccttcttcaatgacttcaccttcgactatgacatcgcgctgctggagctggagaaaccggcagagtacagctccatggtgcggcccatctgcctgccggacgcctcccatgtcttccctgccggcaaggccatctgggtcacgggctggggacacacccagtatggaggcactggcgcgctgatcctgcaaaagggtgagatccgcgtcatcaaccagaccacctgcgagaacctcctgccgcagcagatcacgccgcgcatgatgtgcgtgggcttcctcagcggcggcgtggactcctgccagggtgattccgggggacccctgtccagcgtggaggcggatgggcggatcttc

SEQ ID NO: 1856 - DNA, 544 bp, Homo sapiens
aatccactttatttatccatccccccccaacattagcaaaattaaacccaaggaggaggaggggggtgaggtaaaaaatgacctggaggaccccaaaaggggtaggccccctgggaaaaaagggtcaaaggccaaaggatgggagggggtcaggctgaaactgaggagcaggtgggggcacttcccccccaaaaacccccccctgttgaagctttttgtgaggggggagcccaggccctgaggggggacttcccaggggaaaacttttgtgtttctcgaattctgctttccccaccccaagggggctgctaaggctgaaggtgctgtccttgctgtcctgctctgtaaacacccccggggatttacccgattggagggggttatccacctccatggtactttgggcctccggggataaaagttattcagcaggaacacaacaggggggagttccaatttcatctgctcatcagatggcggaaaaatgaaaaacaatgggccacccacagttcgtttgatctcctaacttggcccccggccaaag

SEQ ID NO: 1857 - DNA, 464 bp, Homo sapiens
atttatctgtagagatcaagtcgcgctacgtggcccatgctgatctcgaactcctgagatccaatgatcctcccacctcggcctccccttctgcatatagtaggtgctcaataaagaccaaccagatgcaggagtggatgacttcattgctcgggactttgttgcttgggtgaccctgaccttcaggccccggcaccctaggccaggacgctgtcgatccaggccgcatagctcgccacgcgggtgtagatcccgggcttcttgcggttgccgaaacgcgcgaccctgaggtgaccacgccctcgagcacgcccccgcacaccagcgggcccccggagtcacccttgcagctgtcccggcgattgctctccgcgcacatcaagcgctcggtgatggcgccgtcgtggtgcgtgcgccggttgcaggtggcgcggtccagcactggcaagagcacgtgctgcagg

SEQ ID NO: 1858 - DNA, 266 bp, Homo sapiens
ggcaggttcggctggaaggaaccgctctcgcttcgtcctacacttgcgcaaatgtctccgagcttactcacatagcatattggtatatcaaaatgaaatgcaaggaaccaaaaataacataattgaaggcagtaaaagtgaaattaaataggaagatcatcagtcaaggaagacccactggagaggacagaaaatgaagcagtgttttatcatgtgtatttcagcaggtcttcttgaaatttaactaaaaatatgactgctctctc

SEQ ID NO: 1859 - DNA, 511 bp, Homo sapiens
gcttgtgtttttccttcagtataaaaccactgtagaaaataacttctcttagaaaaaaaaatacagaagaaaaaaaccaaagggttatttttctttggcttcaagccccctcccatgacgtgcagggcagggggtgggcatgaggtgaggaggacgcaggaagcctccacccccacccctgcctggcagatcccagattacatgatgctgcagttctgggggctctgggttcgggggctggagttgcccaggaggtaggagcgggtgaccagattgtccccgaagctgccacccccactgccccccacactgcggtagtgcgagtgaccgtgacactggaggcagaagagccagaggagatgggtccgcccacctgggctcctgagccgctggcagatgacttgtcggcaggctgcgcgcaggtcccgcacagcacggtgcgcgagcaggtgtgtactcagcggggtcaccgagctgctgcagtgggagccatggtggtgatggagcaggt

SEQ ID NO: 1860 - DNA, 387 bp, Homo sapiens
attttatgggccccggagaaaggaaggcaaactctgccccccgctcagagtccccccaacccccacggtttcccgttgccattgagggggaggttcacgaactcaggggaggccagaaaggctctgagcttgggccgggcactgaggcgccccacatatgctgagaccagggggaacgcatccaggaagccaggggctgggaccccatggatcagcagcaatcccaccaggttttagtccgcgaaggaaatctgggcccccaaaatgaaggtcttgccccccgggttttggaaaaaaagggtcccaaaagggttaagttgcccgggaagtgccttaaaaaagcaacccttgcccccccaaaatggggaaagataagggaggtgattt

SEQ ID NO: 1861 - DNA, 552 bp, Homo sapiens
tcggcacgagggcgttctgggtccgagggtccaggtaggggttgagccaccatctgaccgcaagctgcgtcgtgtcgccggttctgcaggcaccatgagccaggacaccgaggtggatatgaaggaggtggagctgaatgagttagagcccgagaagcagccgatgaacgcggcgtctggggcggccatgtccctggcgggagccgagaagaatggtctggtgaagatcaaggtggcggaagacgaagcggaggcggcagccgcggctaagttcacgggcctgtccaaggaggagctgctgaaggtggcaggcagccccggctgggtacgcacccgctgggcactgctgctgctcttctggctcggctggctcggcatgcttgctggtgccgtggtcataatcgtgcgagcgccgcgttgtcgcgagctaccggcgcagaagtggtggcacacgggcgccctctaccgcatcggcgaccttcaggccttccagggccacggcgcgggcaacctggcgggtctgaaggggcgtctcgattacctgagctctct

SEQ ID NO: 1862 - DNA, 605 bp, Homo sapiens
  misc_feature 325, 474, 545: n = A,T,C or G
tcggcacgaggcaccatggaggtctcctgttgaatggcccttgttgccctagagtgggacccagccctcacctcccccagagctaacctgggaggtgctgaaggggcattgggccaccgtaagcaagggaaaaagggcagatcatgcggggagatgaccttgatctttgattgctaccctaaccttgacctttaacccgtgattccccccagctcctggaagagatgtcctaatatctcttaaggacccagacccctaaattctcctcctcccccattttgatgttaaggtggagagggcatatgcatcctctgtcctgatctangtgtctatagctgaggggtaagaggttgttgtagttgtcctggtgcctccatcagactctccctacttgtcccatatttgcaaggggaggggatttggggctggggctccattcaccaaagctgaggtggcttctcattaaccctttangactctgaagggtatggacctacgtgaatgtgtgtcagggggagacttgctggtgggttagtggtcctcangatgtgatagaaacatccagtgtaaaaaggaagttggaatgggagttggcgggcagtgaa

SEQ ID NO: 1863 - DNA, 361 bp, Homo sapiens
  misc_feature 54, 88, 331: n = A,T,C or G
cgcccgcaacacgcccctgctggaccactcggcgcccttcgtggcccgtgcccngcgcatccgcagcagcctggcagtgctgcacttngagaacgccagcctgtcggggcggcccctcatgctgctcgccacggccctgaagatgaacatgaacctgcgggactggtacctggcggacaacaagctcaacggcctgcaggactcggcccagctgggtaacctgctcaagttcaactgctccctgcagatcctggacctccggaacaaccacgtgctagactcgggtctggcctacatctgcgagggcctcaaggagcagaggaaggggctngtgaccctgggtgctgtggaacaaccagct

SEQ ID NO: 1864 - DNA, 498 bp, Homo sapiens
  misc_feature 451: n = A,T,C or G
cccgtggaaaggagcagctggccaagcggaagaccttctcgctggtcaaggagaagaaggcggctcggaccctgagtgccatcctcctggccttcatcctcacctggacaccgtacaacatcatggtgctggtgtccaccttctgcaaggactgtgttcccgagaccctgtgggagctgggctactggctgtgctacgtcaacagcaccatcaaccccatgtgctacgcactctgcaacaaagccttccgggacacctttcgcctgctgctgctttgccgctgggacaagaaacgctggcgcaagatccccaagcgccctggctccgtgcaccgcactccctcccgccaatgctgatagtcccctctcctgcatccctccaccccagtccccgggaaaggccggtgggaagagggcaggggctgcatcctcagccccagggccctgctcangcctcacctggcttcccaggaccctgggtcaccttcctgggcagccc

SEQ ID NO: 1865 - DNA, 266 bp, Homo sapiens
cccgcggagaagacgtggaacatctcgttcgcgggctagcggcttcctcggcgtctactacgtcggcgtggcctcctgcctccgcgagcacgcgcccttcctggtggccaacgccacgcacatctacggcgcctcggccggggcgctcacggccacggcgctggtcaccggggtctgcctgggtgagcggggccgggggcggcaggcggggggctggcgggaaggccgtgcggggccgggggatggtctccgtgagcggaggggcc

SEQ ID NO: 1866 - DNA, 475 bp, Homo sapiens
  misc_feature 21, 22, 23, 24, 385: n = A,T,C or G
gcgaccgctgctccttccccnnnngcgggggtcgcgctgccagccggggcgggacaggctgctgggacgtcagccccgaggccccgcgccaccccttcctgccccatttctaccgtagctctcaagcacccaaaagatgtcttcgcccttaaccccctgcagcccagcgcccccactccacgggtctctgagggtccccagcaagcagggtcttccctctgggccacccggcatcctctgggagcagcccacttctccccggcgctgcgcagcccctccgaggacaccttctcttccctaggccgcccattgccgcgccccagggagtgtctgcagccacgggtccctccaaccccgcacttgtgtccagcaccagcactttctngggctctcgcccatttcctttgaggatttgcttcttttgacttgctccagaatgttcgtcgggctcatcattttctctgctccctgagtt

SEQ ID NO: 1867 - DNA, 357 bp, Homo sapiens
  misc_feature 195, 231, 289, 294, 333, 341: n = A,T,C or G
ttttttttttttaatggtaccatacatctattaaataatttgaaaaataggcaaacacctttccaacccaatatgcttttatgaagagctgccaagtactagcaacactgatcaacagtgacctcatttatgcatcaaaatcttaagccaagccatcagcacagacagtatgacaacaaattaaaacttaaagantacagtatgtacagttaaaaggatacaattctctgnaattagtttaaatcctaatcacaatgttacaacaaaacctactttgaggctcagttgnagggntgggaaggaacactgggtcttacaaaacacacaaggaancacttaantttaacgggtgttact

SEQ ID NO: 1868 - DNA, 433 bp, Homo sapiens
tcggcacgaggctcacccttgacttggaaaaaccagtttctcttttattgtctgttactaatctctattctaaaaatgcagctcaatgctcaaccatactccaaactctctcttttccagctacctttactccctctccttcaattccactttcctctgcttactttttttttttttcggacggggcctaacttggccgccggggcaggagggcaggggctaaatctggggctcacgggagcctaaacctcccaggttaaagggattttccggcctaagcccctaaagtaggggggactacaagggcacaccaccacgccggacaaatttttggaattttttggaaaagggggggtttcaccagggggcccaaacggggctggaactccggagctaaagcaatccaccggcctgggcctcccaaagggggggg

SEQ ID NO: 1869 - DNA, 652 bp, Homo sapiens
  misc_feature 199, 410, 563: n = A,T,C or G
ttcggcacgaggctcagtggagaaggagttggaccagtcaacatctctgttgtcacaagcagtgtttcctctggatatggcagtggcagtggctatggcggtggcctcggtggaggtcttggcggcggcctcggtggaggtcttgccggaggtagcagtggaagctactactccagcagcagtgggggtgtcggcctangtggtgggctcagtgtggggggctctggcttcagtgcaagcagtggccgagggctgggggtgggctttggcagtggcgggggtagcagctccagcgtcaaatttgtctccaccacctcctcctcccggaagagcttcaagagctaagaacctgctgcaagtcactgccttccaagtgcagcaacccagcccatggagattgcctcttctangcagttgctcaagccatgttttatccttttctggagagtagtctaaaccaagccaattgcagaaccacattctttggttcccaggagagccccattcccagcccctggtctcccgtgccgcagttctatattctgcttcaaatcagccttcangtttcccacagcatggcccctgctgacacgagaacccaaagttttcccaaatctaaatcatcaaaacagaatccccaccccaatcccaa

SEQ ID NO: 1870 - DNA, 535 bp, Homo sapiens
  misc_feature 211: n = A,T,C or G
ggcgggaacccactggagaacagtggctttgaacctggagccttcgatggcctgaagctcaactacctgcgcatctcaaaggccaagctgactggcatccccaaagacctccctgagaccctgaatgaactccacctagaccacaacaaaatccaggccatcgaactggaggacctgcttcgctactccaagctgtacaggctgggcctangccacaaccagatcaggatgatcgagaacgggagcctgagcttcctgcccaccctccgggagctccacttggacaacaacaagttggccagggtgccctcagggctcccagacctcaagctcctccaggtggtctatctgcactccaacaacatcaccaaagtgggtgtcaacgacttctgtcccatgggcttcggggtgaagcgggcctactacaacggcatcagcctcttcaacaaccccgtgccctactgggaggtgcagccggccactttccgctgcgtcactgaccgcctggccatccagtttggcaactacaaaaagt

SEQ ID NO: 1871 - DNA, 361 bp, Homo sapiens
  misc_feature 336, 344: n = A,T,C or G
agaaacaactaggttttttgatttggggaggagagaaggggtgcagatgggaaatggggaggcaagggctctttagcgtttgccaaaaccactgccacacccctccaccccctcttgccttcctcctccacggtgggtgccagcaggctctcccctttccagtgacctccctctccctcctcccagcaccccacttgggcttcaacctccagtgactgcacagagcccacccggggtctaaagctaggggaagggcagctcaaactcacctttcttctcccttctttccacctcccacctcattcccatctcttgtctaaataaaatacaggaaangcagcgcntggggtactgggggaga

SEQ ID NO: 1872 - DNA, 674 bp, Homo sapiens
  misc_feature 82: n = A,T,C or G
tcggaacgaggctttgtaagatttctgtgatgctgttttataccaacatgtacggaagcattctgttcttaacctgtattantgtagatcgatttctggcaattgtctacccatttaagtcaaagactctaagaaccaaaagaaatgcaaagattgtttgcactggcgtgtggttaactgtgatcggaggaagtgcacccgccgtttttgttcagtctacccactctcagggtaacaatgcctcagaagcctgctttgaaaattttccagaagccacatggaaaacatatctctcaaggattgtaattttcatcgaaatagtgggattttttattcctctaattttttatgtaattgttctagtatggtgctaaaaactttaaccaaacctgttacattaagtagaagcaaaataaacaaaactaaggttttaaaaatgatttttgtacatttgatcatattctgtttctgttttgttccttacaatatcaatcttattttatattctcttgtgagaacacaaacatttgttaattgctcagtagtggcagcagtaaggacaatgtacccaatcactctctgtattgctgtttccaactgttgttttgaccctatagtttactactttacatcggacacaattcagaattcaataaaaatgaaaaactggtctg

SEQ ID NO: 1873 - DNA, 375 bp, Homo sapiens
  misc_feature 2, 180, 271, 333: n = A,T,C or G
gngcaacttcaactacgtggagttcacccacatcctcaaacatggcgccaaggataaagacgactaggccaccccagccccctgacaccccagcccccgccagtcacccctccccgcacacacccgtccataccagctccctgcccatgaccctcgctcagggatccccctttgagggtntagggtcccagttcccagtggaaggaaacagggccagggagaagtgcgtgccgagctggaggcagatgttcccacagtgaccccagagccnggggttattagtcttttgacccttccaagggaaaggaccactttttgggggacatggggctnggaggggcagggaccttagaaggcaccaaggggaagggcccc

SEQ ID NO: 1874 - DNA, 579 bp, Homo sapiens
aagctgcatataaaccacaacaacctgacagagtctgtgggcccacttcccaaatctctggaggatctgcagcttactcataacaagatcacaaagctgggctcttttgaaggattggtaaacctgaccttcatccatctccagcacaatcggctgaaagaggatgctgtttcagctgcttttaaaggtcttaaatcactcgaataccttgacttgagcttcaatcagatagccagactgccttctggtctccctgtctctcttctaactctctacttagacaacaataagatcagcaacatccctgatgagtatttcaagcgttttaatgcattgcagtatctgcgtttatctcacaacgaactggctgatagtggaatacctggaaattctttcaatgtgtcatccctggttgagctggatctgtcctataacaagcttaaaaacataccaactgtcaatgaaaaccttgaaaactattacctggaggtcaatcaacttgagaagtttgacataaagagcttctgcaagatcctggggccattatcctactccaagatcaagcatttgcgtttggat

SEQ ID NO: 1875 - DNA, 250 bp, Homo sapiens
gcccaaaaaaaagttttattaaattagttgcatgcaggagaaattgggttctccccaggggaagcagagcggggtgtaagggggcaggatccagggcggggaaaggcggggcggatttgggggcctggaggctggggcctggtaactgggggaggtgaagagccccctctgggggggctgaaacccatccttgggggggccctgggactcagagtgcccccgcaagtgtgacaaaagacaaatatccaca

SEQ ID NO: 1876 - DNA, 472 bp, Homo sapiens
ggaccatagcagttctggcacttacttgtaatgctttggtgacttcaacagttttcagatcccctctgtacatttcccccattaaactgttaattggggtcatcgcagcagtgaacatgctcacgggagtctccagtgccgtgctggctggtgtggatgcgttcacttttggcagctttgcacgacatggtgcctggtgggagaatggggttggttgccatgtcattggttttttgtccatttttgcttcagaatcatctgttttcctgcttactctggcagccctggagcgtgggttctctgtgaaatattctgcaaaatttgaaacgaaagctccattttctagcctgaaagtaatcattttgctctgtgccctgctggccttgaccatggccgcagttcccctgctgggtggcagcaagtatggcgcctcccctctctgcctgcctttgccttttggggagcccagcac

SEQ ID NO: 1877 - DNA, 358 bp, Homo sapiens
gaaggagggcgagaaggacgcggcggctgcaaggaggaggccccgaagcggaccgcagaagacggagggcgcggcagaggccaaggctgagcccccgagagcgcccgagcaggagcaggcggcccccggcaccgctgcgggcggcgaggcccccaaatctgctgaggccgccgcggcccgggcgatcagcgcggcgcctgccgcgtgggaggatgccagcaaggaggaaggggaaccaaaaagactgaggcgcccgcagctcctgccgcccaggagaccaaaagtgacgggggcccatcttcagactcaaaacccggcagctcggaggctgcccctcttccaaggagacccccgcagc

SEQ ID NO: 1878 - DNA, 548 bp, Homo sapiens
  misc_feature 415, 441, 467: n = A,T,C or G
tcggcacgaggggagacctccaggcgcagggaaggacggccagggtgacacggaagcatgcgacggctgctgatccctctggccctgtggctgggcgcggtgggcgtgggcgtcgccgagctcacggaagcccagcgccggggcctgcaggtggccctggaggaatttcacaagcacccgcccgtgcagtgggccttccaggagaccagtgtggagagcgccgtggacacgcccttcccagctggaatatttgtgaggctggaatttaagctgcagcagacaagctgccggaagagggactggaagaaacccgagtgcaaagtcaggcccaatgggaggaaacggaaatgcctggcctgcatcaaactgggctctgaggacaaagttctgggccggttggtccactgccccatanagacccaagttctgcgggaggctgangagcaccaggagacccagtgcctcanggtgcagcgggctggtgaggacccccacagcttctacttccctggacagttcgccttctccaaggccctgccccgcagcta

SEQ ID NO: 1879 - DNA, 443 bp, Homo sapiens
  misc_feature 57, 86, 87, 93, 166, 244, 250, 251: n = A,T,C or G
gttaacattgaccaagaactgcatggacctaacattcgatctcattcagtattaaanttcggtcgcgccgcgggttccgcgctgcnntggggnttgtggtttgcttctgttgtgctccgttaggacacagagtgtgggtgcgcgtcgccgggccctgtcggatgtngttttgtgtggggggtggtgtgcctgtgggtgtgcgtctgctggcggcttgcgttgctgggctctggtggttgcatcnacgagnngccggcggtggcacctggcgggggcgggtggaggcggtggtgtgccgcggtgtgttgtgtgggtggctgggggtggggtgggggtggcggtgtgggggtggtggtcgccgtgggtgcgcgggtggttcgttggtttcgggcgggttcgggaggggtttgggagggcgggggtggggatgtgccgggccgttg

SEQ ID NO: 1880 - DNA, 507 bp, Homo sapiens
tttattattttttttttttttctataaaacggaaggggaaaggggaccagaccaacaaaccccaaaaaaaagaaacagacagagggacagagaaggcagcaggggccgggggaaaaccgggaaaggggggggggggggggggggggaaggggggggggggggggaaaaggccccccccaggccaggaagggccccgggaaaaaggcccacccggcaagaacccccccccaggggggggccccgggcggaaaccagcgcccacaccaaaccccccaaggaagaaaggggggccccccggaagggaagacgcggaccgcaagcaagccccaaaaaacccccgggccccacgcgggcctgggggcagaggggggtgggggacagccccaggggcacccgcaaaaaggggggcccccggcccaaagccgggcccccggggccaaagccccccaagggggggccgataaaaggcgaaagcagggccaaggcgggtgcccggggaaaaaggga

SEQ ID NO: 1881 - DNA, 172 bp, Homo sapiens
tatacggctgcgagaagacgacagaagggtaaccagttgttggagagatctggcccctccccacaaattctctgtgtccctctaggatacctcaaataacaataatgatagcaacgataaaaagaagacccaaaaaaaaaaaaaaaaaaaaaaaaaaaagtcgtatcgatgt

SEQ ID NO: 1882 - DNA, 178 bp, Homo sapiens; identical to SEQ ID NO: 1040

SEQ ID NO: 1883 - DNA, 579 bp, Homo sapiens
ctgtatccagcgccaggtcccgccagtcccagctgcgcgcgccccccagtcccgcacccgttcggcccaggctaagttagccctcaccatgccggtcaaaggaggcaccaagtgcatcaaatacctgctgttcggatttaacttcatcttctggcttgccgggattgctgtccttgccattggactatggctccgattcgactctcagaccaagagcatcttcgagcaagaaactaataataataattccagcttctacacaggagtctatattctgatcggagccggcgccctcatgatgctggtgggcttcctgggctgctgcggggctgtgcaggagtcccagtgcatgctgggactgttcttcggcttcctcttggtgatattcgccattgaaatagctgcggccatctggggatattcccacaaggatgaggtgattaaggaagtccaggagttttacaaggacacctacaacaagctgaaaaccaaggatgagccccagcgggaaacgctgaaagccatccactatgcgttgaactgctgtggtttggctgggggcgtggaacagtttatctc

SEQ ID NO: 1884 - DNA, 100 bp, Homo sapiens
gtgtcaccatgtgggtcccggttgtcttcctcaccctgtccgcgacgtggattggtgctgcacccctcatcctgtctcggattgtgggaggctgggagtg

SEQ ID NO: 1885 - DNA, 244 bp, Homo sapiens
gatagtcggcgagcaacgctggagcatcccgctctggtgccgctgcagcaggcagagatggttgagctcatgttcccgctgttgctcctccttctgcccttccttctgtatatggctgcgccccaaatcaggaaaatgctgtccagtggggtgtgtacatcaactgttcaacttcctgggaaagtagttgtggtcacaggagctaatacaggtgtcgggaaggagacagccaaagagctggctc

SEQ ID NO: 1886 - DNA, 601 bp, Homo sapiens
  misc_feature 254, 464, 473: n = A,T,C or G
tcggcacgaggcatgggagccgcgcgctctctcccggcgcccacacctgtctgagcggcgcagcgagccgcggcccgggcgggctgctcggcgcggaacagtgctcggcatggcagggattccagggctcctcttccttctcttctttctgctctgtgctgttgggcaagtgagcccttacagtgccccctggaaacccacttggcctgcataccgcctccctgtcgtcttgccccagtctaccctcaatttanccaagccagactttggagccgaagccaaattagaagtatcttcttcatgtggaccccagtgtcataagggaactccactgcccacttacgaagaggccaagcaatatctgtcttatgaaacgctctatgccaatggcagccgcacagagacgcaggtgggcatctacatcctcagcagtagtggagatggggcccaacaccgagactcanggtcttcangaaagtctcgaaggaagcggcagatttatggctatgacagcaggttcagcatttttgggaaggacttcctgctcaactaccctttctcaacatcagtgaagttatccacgggctgcaccggcaccctg

SEQ ID NO: 1887 - DNA, 314 bp, Homo sapiens
cctgcctccgtgtctgggtctcctggacagtcgatcaccatctcctgcactggaaccagcagtgacgttggtggttataactatgtctcctggtaccaacaacacccaggcaaagcccccaaactcatgatttatgatgtcagtaatcggccctcaggggtttctaatcgcttctctggctccaagtctggcaacacggcctccccgaccatctctgggctccaggctgaggacgaggctgattattactgcagctcatatacaagcagcagcactctcgatgtcttcggaactgggaccaaggtcaccgtcct

SEQ ID NO: 1888 - DNA, 452 bp, Homo sapiens
tcggcacgaggttttttttttttccgggttatactttattatcattgcttaacattcggggtcccaccctgattgtgacctgggggcaggcaaaattgattcctgttttacttcactgcagtatctgcagcacccaggatgaagtccaggacaccaaaaatcaaggggcttcatgagtgaaactgtaagggctggctgtaacccccgtttttgggatgggaaaaggtgaggctgatctccaaagcaggtcccccccaccccacactttatcaaagtacctgaggcaaaatccccaatgatgcacccccaggggtctggctcctggggaaggcaatcaactttgccccaccaggtccagcaaataggccaagtggagtttcagggtcccgtggatggacaggggttcaccaatacccgcaaaaggaaccctaaggccatccaggttctccaaa

SEQ ID NO: 1889 - DNA, 613 bp, Homo sapiens
tcggcacgaggcaggctttcaaggtggaaggtggccagtttggctctgtggaggagtgtctgctggacgagaacagcatgctgatccccatcgctgtgggtggtgccctggcggggctggtcctcatcgtcctcatcgcctacctcgtcggcaggaagaggagtcacgcaggctaccagactatctagcctggtgcacgcaggcacagcagctgcaggggcctctgttccttccccagggcctgtgcttgaacctgaggcactgcacacccccacactcatgaccacaccctccctaactcctttcacccccagcctggtcttcacctaccccagcactcctgagccttgtgcctcagctcatcgcaagagtagcagcagcagcggagacccatcctctgacctcctgaaccgcacagctcaggaggcgcccttggcttctgtgatgagctgatctgcggatctcagctttgagaagccttcagctccagggaatccaagcctccacagcgagggcagctgctatttattttcctaaagagagtatttttatacaaacctaccaaaatggaataaaaggcttgaagctgtgaaaaaaaaaaaaaaaaaaaaaa

SEQ ID NO: 1890 - DNA, 129 bp, Homo sapiens
  misc_feature 16, 67, 86, 88, 89, 98: n = A,T,C or G
tcaccccaggagacanctccttggagctgtccattgcagaccacagggccaccagaatcaccctganaggaatcctggcctccctnanngaagcccgnacagaacatgttgctggtaatcttgccaggg

SEQ ID NO: 1891 - DNA, 386 bp, Homo sapiens
  misc_feature 1, 13, 27, 30, 38, 42, 45, 82, 85, 102, 123, 127, 140, 148,149, 232, 267, 341, 360, 373, 379: n = A,T,C or G
ngtcggatcctgngcggcagagaggcnatngcgcacgnggcnctnacatggcgtcggtgcagctgaacggcgcgcacctgtntcngcgtcactggtggcggnagttgggtgctgagcgcggcnactncctggaggacgcngccgacgnnaaggtgcaggttctcctgggcgcgcactccctgtcgcagccggagccctccaagcgcctgtacgacgtgctccgcgcagtgcnccacccggacagcaagcccgacaccatcgaccacnacctcctgctgctacagctgtcgaaaaaggcacactgggccctgctgtgcgccccctgccttggaacgcgttgnaccgaacgttgcaacgggnaattttctgcgangttgcnggttggg

SEQ ID NO: 1892 - DNA, 650 bp, Homo sapiens
  misc_feature 491: n = A,T,C or G
cggcacgaggcccggcgatgtcgcccccaaaacggacaaagagttggcagtgcaatacctgaacaccttctatggctgccccaaggagagctgcaacctgtttgtgctgaaggacacactaaagaagatgcagaagttctttggactgccccagacaggtgatcttgaccagaataccatcgagaccatgcggaagccacgctgcggcaacccagatgtggccaactacaacttcttccctcgcaagcccaagtgggacaagaaccagatcacatacaggatcattggctacacacctgatctggacccagagacagtggatgatgcctttgctcgtgccttccaagtctggagcgatgtgaccccactgcggttttctcgaatccatgatggagaggcagacatcatgatcaactttggccgctgggagcatggcgatggatacccctttgacggtaaggacggactcctggctcatgccttcgccccangcactggtgttgggggagactcccattttgatgacgatgagctatggaccttgggagaaggccaagtggtccgtgtgaagtatgggaacgccgatggggagtactgcaagttccccttcttgttcaatggcaaggagtacaacagctgcactgataccg

SEQ ID NO: 1893 - DNA, 450 bp, Homo sapiens
  misc_feature 7, 35, 111, 321, 429: n = A,T,C or G
atgaatntggagttagcttttattaaacacaaatntaccagacactgtgccaggcacttcacatacagtatttcatttagtgcaacaatcctgcagtactggtcttaaccnaatgttgcaaatggggaatctgagattcaacaaggttaattagcttgcccgtaatcataagcacataaatgtgattctcaaggattccaaggcccttgctcagtttactggccatgctgttttcttgcattttatgtaggaagaacaggacccaggcatctccctccaccattgacctccagagaagagatgacacagttggaagggctntctaagacagacaggaaatggagttgggggccaaatctaagttaggggttctgagttaggggagcactttttcaggagtgaaaatgcacagggaagtggtggccgganttgggaagttttagaggcccg

SEQ ID NO: 1894 - DNA, 525 bp, Homo sapiens
tcggcacgagggcagaccgtactccatccctccctgtgagcaccacgtcaacggctcccggcccccatgcacgggggagggagatacccccaagtgtagcaagatctgtgagcctggctacagcccgacctacaaacaggacaagcactacggatacaattcctacagcgtctccaatagcgagaaggacatcatggccgagatctacaaaaacggccccgtggagggagctttctctgtgtattcggacttcctgctctacaagtcaggagtgtaccaacacgtcaccggagagatgatgggtggccatgccatccgcatcctgggctggggagtggagaatggcacaccctactggctggttgccaactcctggaacactgactggggtgacaatggcttctttaaaatactcagaggacaggatcactgtggaatcgaatcagaagtggtggctggaattccacgcaccgatcagtactgggaaaagatctaatctgccgtgggcctgtcgtgccagtcctg

SEQ ID NO: 1895 - DNA, 475 bp, Homo sapiens
ttcggcacgaggcccttgtccctcctccctcccctgttgtctggccgtcgtcaaccccaccttgactgagtgttgagcccgtccttgggctctggtccctgcggggcaggctctcccgggcccacggggcggacgctgcataccaatttgccctgcaccgcctgtcccggagacggagcccgaaggcctgccatggcggctgtgtcgaggatgcgtggcgcctgccgtggcgggacagcgtgggcaggctcatttctgcccccaacccgggccccaggacaggtcagcgcgccctgccccggtgcccaccgctgccccccatccgccctcctgccacttgcccctgacccccctgccgtgcctcccgcagccctcccatgccgttccactcctccctgcctctgagccgaacatgataataaaagctattattgagcgcttactgcatgccaaaaaaaaaaaaaaaaaaaaaaaa

SEQ ID NO: 1896 - DNA, 553 bp, Homo sapiens
  misc_feature 325, 431: n = A,T,C or G
tcggcacgagggggaagagcctgctacggtggactgtgagactcagtgcactgtcctcctcccagcgaccccacgctggaccccctgccggaccctccacccttcggcccccaagcttcccaggggcttcctttggactggactgtccctgctcatccattctcctgccacccccaaacctcctcagctccaggttgccacctcctctcgccagagtgatgaggtcccggcttctgctctccgtggcccatctgcccacaattcgggagaccacggaggagatgctgcttgggggtcctggacaggagcccccaccctctcctancctggatgactacgtgaggtctatatctcgactggcacagcccacctctgtgctggacaaggccacggcccagggccaacccaggccaccccacaggccagcccangcctgccggaagggccgccctgctgtgtccctgcgagacatcaccgcacgtttcagtggccagcagcccacactgcccatggctgatactgtggaccccctggactggctttttggggagtc

SEQ ID NO: 1897 - DNA, 509 bp, Homo sapiens
cggcacgaggattccctacagcctagggcagacaatagtatagaagtctgggaaaaaaacaaaaacagaatttgagaaccttggaccactcctgtccctgtagctcagtcatcaaagcagaagtctggctttgctctattaagattggaaatgtacactaccaaacactcagtccactgttgagccccagtgctggaagggaggaaggcctttcttctgtgttaattgcgtagaggctacaggggttagcctggactaaaggcatccttgtcttttgagctattcacctcagtagaaaaggatctaagggaagatcactgtagtttagttctgttgacctgtgcacctaccccttggaaatgtctgctggtatttctaattccacaggtcatcagatgcctgcttgataatatataaacaataaaaacaactttcacttcttcctattgtaatcgtgtgccatggatctgatctgtaccatgaccctacataaggctggatggcacctc

SEQ ID NO: 1898 - DNA, 560 bp, Homo sapiens
  misc_feature 437: n = A,T,C or G
tcggcacgagggtgggccatcatcttctttggtggaatacttgtccgcctgggcctccagggatttcaagttgttggtaacaattttcagctcctcctctaggtccccacatttactctcggccacctcagccctctcctccgagcgctccagctctccttccaggatcaccagcttcctggccacctcttcatatttgcggtctgaatcctcagcgatgtgcttggcctccttcagctgcatctcctgcagttccatcttctcctcatccttcatggcccggttttcgatgaccttcattcctctctcgctctcatcagccgccttctcggcctcctccagcttctgcagggctgtagccaggcgctcctgggcccggtccagctcctcctcaaccagctgaatgcggcggttcagggaggccacatctgcctcancatcagtggccttcttctcggcctgctccagtttctcctgggcctccttcacggattcagaatacttttccacctcatcctctgtccccttcagcttcttctggagggcctgctgctcctcct

SEQ ID NO: 1899 - DNA, 397 bp, Homo sapiens
  misc_feature 31, 229, 336, 345, 353, 359, 375, 386: n = A,T,C or G
gctatttctcccgtcccacagggcctgaccnggcccagggtggggtggggggctctggggacaggacatgcagggaggaaggggggggcaggattttcccgtgttttatccatttgcaagttggtcaccaatagaaatgggactctgagggctaacagaaatgggactctgagggctaacaggagagggcggcctggctctgggccccagccaggccccaggagtcctntcccctctgagaaggggagggagagagctctagaaaccaacggagaaacagagaagggggcaggggctcatttcagcaaacacggctacatcacgtgacacgccagnaccacaganacacacgncaacgnacacggctgcacagcnggcaggggctnttaaggggaaa

SEQ ID NO: 1900 - DNA, 622 bp, Homo sapiens
  misc_feature 197, 221: n = A,T,C or G
cggcacgaggcgcaccaacccccccaaataccccagcaagcaggtaggccagccctttcagctcagcacaccccaacccctaccccacccctaccacggagccatctggaccgaggtgtgggagtgatggagcaggtttactgtgcctgcccgtgttgggggccagcctgagccaacagtgggaggtggggccttantgcctcaccgggcacacggattangctgagtgaagattaagggagggtgtgctctgtggtctcctccctgccctctccccactggggagagacctgtgatttgccaagtccctggaccctggaccagctactgggccttatgggttgggggtggtaggcaggtgatcgtaagtggggagggaaatgggtaagaagtctactccaaacctacgtctctatgtcagaccatacctacgtgcttctctatgagggaaacagggagacctggggtcctgtggataactgagtggggagtctgccacgggagggcaccttcccattgtgccttctgtgtgtattgtgcattaacctcttcctcaccactaggcttctggggctgggtcccacatgcccttgaccctgacataaagttctctatttttgga

SEQ ID NO: 1901 - DNA, 543 bp, Homo sapiens
  misc_feature 252, 297, 367, 426, 478, 492, 511, 530, 541: n = A,T,C or G
tttgaaccaaattctcacttacccaggctggagtgcagtggatgatcatagctcactgcagccttgaactactaggctcaagcaatcctctcacctcagcctcgcaggtggctgggaccacaggcatgtgccaaatgcctagataatttttaaatactttttggaaagatggggtctcagtatgttgctcaggctggtctcaaactcctgggttttagcctcccaaattgttgggattacaggcgtgcactngtgcatagctaggaatgtgatctattcctaaagcacagtcagganttctcaccactggggcacccatttaggttgatgcaggcaggacacctgtggggctggcctggggaggggnatgggagtgggggagggagccatgttccccctcttgcaggggtccccctccctctgctngagtttaatcagggggcaaaacaatagagatgggcatctcagggtaggagtnatccagaagggggncaagggtagggagggcttnaccattgcatttttggggnagggaccaagnaa

SEQ ID NO: 1902 - DNA, 515 bp, Homo sapiens
  misc_feature 406, 417: n = A,T,C or G
acttctgggggggtacccgcacatcaccatggtgtggaccatcgccaggatccattttgaggattatgggtgctgggacaccatcaactcctcactgtggtggatcataaagggccccatcctcacctccatcttggtaaacttcatcctgtttatttgcatcatccgaatcctgcttcagaaactgcggcccccagatatcaggaagagtgacagcagtccatactcaaggctagccaggtccacactcctgctgatccccctgtttggagtacactacatcatgttcgccttctttccggacaattttaagcctgaagtgaagatggtctttgagctcgtcgtggggtctttccagggttttgtggtggctatcctctactgcttcctcaatggtgaggtgcangcggagctgangcggaagtggcggcgctggcacctgcagggcgtcctgggctggaaccccaaataccggcacccgtcgggaggcagcaacggcgccacgtgcagcacgc

SEQ ID NO: 1903 - DNA, 563 bp, Homo sapiens
tcccaccaacctgcacctttccgtgtccatggacagggacacagaccaggcactgttgacgctgctgcaaggcaaacgttttcaaaacctcgattccattatcatttactgcaaccggcgcgaggacacagagcggatcgctgcgctcctccgaacctgcctgcacgcagcctgggtcccagggtctggaggtcgtgcccccaaaaccacagccgaggcctaccacgcgggcatgtgcagccgggaacggcggcgggtacagcgagccttcatgcagggccagttgcgggtggtggtggccacggtggcctttgggatggggctggaccggccagatgtgcgggctgtgctgcatctggggctgcccccaagcttcgagagctacgtgcaggccgtgggccgggccgggcgtgacgggcagcctgcccactgccacctcttcctgcagccccagggcgaaaacctgcgagagctgcgcagacatgtgcacgccgacagcacggacttcctggctgtgaagatgctggtacagcgcgtgttcccagcctgcacctgcacctgca

SEQ ID NO: 1904 - DNA, 410 bp, Homo sapiens
cccagcgcgtttcttctcctgtatgcgtcactacttcctgaagtggacctcctcctggtcatgggtacctccttgcaggtgcatccctttgcctccctcatcatcaaggcacccctctccacccctcgcctgctcatcaacaatgagaaagctggccactcggaccctttcctggggatgattatgggcctcggaggaggcatggactttcactccaagaaggcctacaaggacgtggcctggctgggtgaatgccaccagggctgcctggcccttgctgagctccttggatggaagaatgagctggatgaccttgcccggatggagcacgccagcataaatgcccagtcgggggcgggggtccccaaccccatcacttcagcttcccccaagaagtccccgccacctgc

SEQ ID NO: 1905 - DNA, 535 bp, Homo sapiens
  misc_feature 446: n = A,T,C or G
cttggggagcccaagcagaaacgcaagctggtggctgaggtgtccctgcagaacccgctccctgtggccctggaaggctgcaccttcactgtggagggggccggcctgactgaggagcataagacggtggagatcccaaaccccgtggaggcatgggaggaagttaaggtgagaatggacctgctgccgctccacatgggcctccacaagctggtggtgaacttcgagagcgacaagctgaaggctgtgaagggcttccggaatgtcatcattggccccgcctaagggacccctgctcccagcctgctgagagcccccaccttgatcccaatccttatcccaagctagtgagcaaaatatgccccttcttgggccccataccccagggcagggtgggcagcctatgggggctctcggaaatggaatgtgcccctggcccatctcancctcctgagcctgtgggtccccactcaccccctttgctgtgaagaatgctctgtgccataaacagtgggagccctgaccttggctgact

SEQ ID NO: 1906 - DNA, 603 bp, Homo sapiens
aaaatgacaatacctactatgcaatgaaggtgctgtccaaaaagaagctgatccggcaggccggctttccacgtcgccctccaccccgaggcacccggccagctcctggaggctgcatccagcccaggggccccattgagcaggtgtaccaggaaattgccatcctcaagaagctggaccaccccaatgtggtgaagctggtggaggtcctggatgaccccaatgaggaccatctgtacatggtgttcgaactggtcaaccaagggcccgtgatggaagtgcccaccctcaaaccactctctgaagaccaggcccgtttctacttccaggatctgatcaaaggcatcgagtacttacactaccagaagatcatccaccgtgacatcaaaccttccaacctcctggtcggagaagatgggcacatcaagatcgctgactttggtgtgagcaatgaattcaagggcagtgacgcgctcctctccaacaccgtgggcacgcccgccttcatggcacccgagtcgctctctgagacccgcaagatcttctctgggaaggccttggatgtttgggccatgggtgtgacactatactgctttgtctttg

SEQ ID NO: 1907 - DNA, 340 bp, Homo sapiens
tttttttttctcttagtgtgttagaatttgaagttcaaagttgaataaaagcaactgcagcataaaagtataaatagctttctgtttaccacaatgatttggggagggctatactctgagtaatgcttccagcttttagaattgtaaactcaagccttacctgggaggccaggacttccaggacttccaggggctccctcaggtccagcaggccccaaatgtccaggtgggccaggttgccccatttctcctttctttcccatatcacccggcagtcctggatcccccttaaatgtagtcaaatacctttaaaattctcatataagcaggatatgtggta

SEQ ID NO: 1908 - DNA, 620 bp, Homo sapiens
  misc_feature 431: n = A,T,C or G
tcggcacgaggtcaatccaggactacaaacacctgtgccaagacctgagcttctgccaggacctgtcatcctccctccattcggacagctcctacccaccggatgcgggcctgtctgacgacgaggagcctcccgatgccagcctgcctcctgacccgccaccccttactgtgccccagacgcacaatgcccgtgaccagtggctgcaggatgccttccacatcagcctctgaagggctggggggcagggggcatgcacccatgcaaaaggctcagaaactccccctccggcaagccctcagacttcggagcctgcgccttcccccctaccgcctcacctcacaggagggccaggcatgtattcctcagaggcgaaactgccaaactctttctcctgtcttgggttggctggcactggggcgggcatctanggtacagcctctgctcatggcactgggcctccagttcttccacatgtgtgcacccccagcttggccaaccctcagccttgcggtggggcccgaagcatcttcccttccgcttggcgtctctgggattgggatgagtgcctggctcccatctcctcctcaccttttgttgctatcggcagctgctggctc

SEQ ID NO: 1909 - DNA, 516 bp, Homo sapiens
cacagcaaacggagtgccaggcctgtcatttcacacctgtctcactcactccatgtgctcagaaaagaacacgtccaccgcggaggccgcaatgcccacctagagcaggtcgtagaagtagtccaggccctggcccagctcccagatagagaccccaacgcccagctcccgggccagctccagccgcacctgcagggacttcagggttgggtagaagacgacgtgcctcccactgcggctcttcttgtactcgaagaagtgctctgagacctggctgtcccacaccatccggggcctgtggtccttcagtgtctggatgtacctggccccgacaacaggctcacgggcatccttggaggtcgcgtagtccataccatagaagttgagccccaggaggattttgcttcgccacttggacttcgggtccaggacctggacgcaggctcgaacccaggacaggggtgcattagggccaggctgatgcgctgtagagtagtcgtaggtcatgaggctgaa

SEQ ID NO: 1910 - DNA, 287 bp, Homo sapiens
aagacccccgggggtaaagtttgcttgggaaaggagggtttttaggggggggaaaccagtatagggggggaaaccggttggattgcccaatcggggagggaaaagaaggggcccgggcgggcccaaagaaggggggagggagtgtttcttgagggccaaggaatgtggttagggaagggggggagggaatgtgaaggggaaattgagcacgggggggaaggttcccggggaaaaggggccccagaagatgagggggcccccgtgggcagggttaatgggaatagtac

SEQ ID NO: 1911 - DNA, 490 bp, Homo sapiens
ctttttttttttttttttaagtagagacaaggtcctgtgatgttgctcaggctggtcttgaaatcctgagctcaagtgatcctcttgcctcagccttccaaagtgctgggattacaggtgtgagccaccatggctggctgtgtatgtcttgtgtatgtcatggcatccttatatgtcttgtgtatttactcaatattgtatatgttttgtataactgtgccatctttattcattcccctgtcaataagtatttattatatctttctcttgtatttgtccttataaacaacgttgccatagcattcttgtaaatgtcttttttttttttttttttttaagtcagtgtcttgttctgtcacccaggctggaatacagcagcatgatcatagttactgtaacttcaaactcctgggctcatgtcatccttccacctcagcctcctgagtgccaagaccacaggtgcatgcctctatgcctggctcatttttaa

SEQ ID NO: 1912 - DNA, 601 bp, Homo sapiens
tcggcacgaggcacagactccacacatgcgcgcgcgcacacacacacacacacacacacacactgaaggcgaccctgagcagggtgtggtgcgggagtggggtggtaggacgcgaggggcacgctggtggccggagcctggctctcctcgagtccgtgtacctccacaacaaccagctgagcaacgctggcctgccccccgacgccttccgcggctccgaggccatcgccaccctcagcctctccaacaaccagctcatctacctgccgcccagcctgccgccctcactcgagcggctccacctgcaggtagccctgctaacaatctcatctccaaggtgccccgaggagccctgagccgccagactcaactccgtgagctctacctccagcacaaccagctgacagacagtggcctggatgccaccaccttcagcaagctgcatagccttgaatacctggatctctcccacaaccagctgaccacagtgcccgccggcctgccccggaccctggctatcctgcacctgggccgcaaccgcatccggcaggtggaggcggctcggctgccggggcgcgtggtctgcgctatttgttgctgc

SEQ ID NO: 1913 - DNA, 484 bp, Homo sapiens
ttggaagatcaaattttatttactacctgcatacaaaaacatattgcacatcaaacaaccgaaataaaaaaaaaaaaaggaaaaaaaaaagatactctactgaagactaacatgtagtttatacagaataaaccttctggaaattgatcttttcagtagttcaggttatgtctgaatggacatgactaattcagcttagtgttttaactaaagctatgtttgatttttaaatactgtacactttaataaataaaccaaacaaagcctcaaggtagaacagtcactgccaagtatcgcccagtgtccctgcagatgagagtttaacaaatgtattccagtggtctgcagattttcctctacatacagcatttaaaaaacacattaaaacagaccagtttccagactaaactaatgaagaaattacaattcagtgcaaaatattttagactgcatttcattctagttttcctcaggtgaagaagtg

SEQ ID NO: 1914 - DNA, 545 bp, Homo sapiens
  misc_feature 187: n = A,T,C or G
tcggcacgaggtccaagccaacatttattgttgcacaagcctgttgcagtcctgaggggatcttctggcagaggtgtgggtaggaagctgagtggccactggggtgaagggcagacagaggaggctgtgaccagcaggctcctatccagatgatacatgagatggaggcctcctcagccacactccnaggagggtggggtggcaagggggattcagggataatggcattaataatacaagtggtaaacaaataaccaagaggatctggctggttacgatacacaaaagttagcagtaagagtccgtgctttcacattcctatcagacagatctgagttcaaatcctgtatgtgtagcagggtgaggtatctgctttctgtcagagcccatgggtgcacatctctgagcctagttacaacagttggcacataggtgggtggacaaggagggcagctcttgattcctgttgcttccacagcacagagagataagtatgggctggtgtgacagatcccacttgacagatgaagccactgagacttgga

SEQ ID NO: 1915 - DNA, 252 bp, Homo sapiens
gagaagacgacagaagggatggtcaccacctgtcacaccacatccaagagcaggggacagaaagagagagatgcagctgtgagatgcaaaagcaggccgggcgtggtggctcacgcctataatcctagcactttgcagggctgaggcaggaggattgcttgaggccaggagttcgaagccagcctgggcaacatagcaaaaccttagtctcttactaaaaaaaaaaaaaaaaaaaaaaaaaagtcgtatcga

SEQ ID NO: 1916 - DNA, 398 bp, Homo sapiens
ccttcattgaggacctgaagaagtacggggctaccactgtggtgcgtgtgtgtgaagtgacctatgacaaaacgccgctggagaaggatggcatcaccgttgtggactggccgtttgacgatggggcgcccccgcctggcaaggtagtggaagactggctgagcctggtgaaggccaagttctgtgaggcccccggcagctgcgtggctgtgcactgcgtggcgggcctgggcgggctccagtccttgtggcgctggcgcttattgagagcgggatgaagtacgaggacgccatccagttcatccgccagaagcgccgcggacgcatcaacagcaagcagctcacctacctggagaaataccggcccaaacagaggctgcggttcaaagacccacaca

SEQ ID NO: 1917 - DNA, 166 bp, Homo sapiens; identical to SEQ ID NO: 1090

SEQ ID NO: 1918 - DNA, 363 bp, Homo sapiens
aaggtgacacatattctgtctgtccacgatagtgccaggcctatgttggagggagttaaatacctgtgcatcccatcagcggattcaccatctcaaaacctgacacgacatttcaaagaaagtattaaattcattcacaaatgccgactccgcggtgagagctgccttgtacactgcctggccagggtcttcaggagcgtgacactggtgatcgcatacatcatgaccgtcactgactttggctgggaggatgccctgcacaccgtgcgtgctgggagatcctgtgccaaccccaacgtgggcttccagagacagctccaggagtttgagaagcatgaggtccatcagtatcggcagtggctg

SEQ ID NO: 1919 - DNA, 635 bp, Homo sapiens
tcgcgcgcctgcaggtgcgacactagtgggatccaaagaattcggcacgaggctgaagggcagggaacaacttgatggtgctactttgaactgcttttcttttctcctttttgcacaaagagtctcatgtctgatatttagacatgatgagctttgtgcaaaaggggagctggctacttctcgctctgcttcatcccactattattttggcacaacaggaagctgttgaaggaggatgttcccatcttggtcagtcctatgcggatagagatgtctggaagccagaaccatgccaaatatgtgtctgtgactcaggatccgttctctgcgatgacataatatgtgacgatcaagaattagactgccccaacccagaaattccatttggagaatgttgtgcagtttgcccacagcctccaactgctcctactcgccctcctaatggtcaaggacctcaaggccccaagggagatccaggccctcctggtattcctgggagaaatggtgaccctggtattccaggacaaccagggtcccctggttctcctggccccccctggaatctgtgaatcatgccctactggtcctcagaactattctccccagtatgattcatatgatgtcaagtctggagt

SEQ ID NO: 1920 - DNA, 566 bp, Homo sapiens
cgcctgcatctgtatccagcgccaggtcccgccagtcccagctgcgcgcgccccccagtcccgcacccgttcggcccaggctaagttagccctcaccatgccggtcaaaggaggcaccaagtgcatcaaatacctgctgttcggatttaacttcatcttctggcttgccgggattgctgtccttgccattggactatggctccgattcgactctcagaccaagagcatcttcgagcaagaaactaataataataattccagcttctacacaggagtctatattctgatcggagccggcgccctcatgatgctggtgggcttcctgggctgctgcggggctgtgcaggagtcccagtgcatgctgggactgttcttcggcttcctcttggtgatattcgccattgaaatagctgcggccatctggggatattcccacaaggatgaggtgattaaggaagtccaggagttttacaaggacacctacaacaagctgaaaaccaaggatgagccccagcgggaaacgctgaaagccatccactatgcgttgaactgctgtggtttggctg

SEQ ID NO: 1921 - DNA, 109 bp, Homo sapiens
gtgcccagctctcggaatgactgtggctccactgtccctgacaaccccttcgtccggaccctcccccacacaactatgtctggtcaccagctccctcctgctggcaccc

SEQ ID NO: 1922 - DNA, 513 bp, Homo sapiens
gggagccccaagcttaccacctgcacccggagagctgtgtcaccatgtgggtcccggttgtcttcctcaccctgtccgcgacgtggattggtgctgcacccctcatcctgtctcggattgtgggaggctgggagtgcgagaagcattcccaaccctggcaggtgcttgtggcctctcgtggcagggcagtctgcggcggtgttctggtgcacccccagtgggtcctcacagctgcccactgcatcaggaacaaaagcgtgatcttgctgggtcggcacagcctgtttcatcctgaagacacaggccaggtatttcaggtcagccacagcttcccacacccgctctacgatatgagcctcctgaagaatcgattcctcaggccaggtgatgactccagccacgacctcatgctgctccgcctgtcagagcctgccgagctcacggatgctgtgaaggtcatggacctgcccacccaggagccagcactggggaccacctgctacgcctcaggct

SEQ ID NO: 1923 - DNA, 375 bp, Homo sapiens
gaaaacaaacaagctgggagaagcaggaatctgcgctcgggttccgcagatgcagaggttgaggtggctgcgggactggaagtcatcgggcagaggtctcacagcagccaaggaacctggggcccgctcctcccccctccaggccatgaggattctgcagttaatcctgcttgctctggcaacagggcttgtagggggagagaccaggatcatcaaggggttcgagtgcaagcctcactcccagccctggcaggcagccctgttcgagaagacgcggctactctgtggggcgacgctcatcgcccccagatggctcctgacagcagcccactgcctcaagccccgctacatagttcacctggggcagcacaacct

SEQ ID NO: 1924 - DNA, 471 bp, Homo sapiens
ggtgtgaggatccgaacccaggggtggggggtggaggcggctcctgcgatcgaaggggacttgagactcaccggccgcacgccatgagggccctgtgggtgctgggcctctgctgcgtcctgctgaccttcgggtcggtcagagctgacgatgaagttgatgtggatggtacagtagaagaggatctgggtaaaagtagagaaggatcaaggacggatgatgaagtagtacagagagaggaagaagctattcagttggatggattaaatgcatcacaaataagagaacttagagagaagtcggaaaagtttgccttccaagccgaagttaacagaatgatgaaacttatcatcaattcattgtataaaaataaagagattttcctgagagaactgacttcaaatgcttctgatgctttagataagataaggctaatatcactgactgatgaaaatgctctttctggaaatg

SEQ ID NO: 1925 - DNA, 480 bp, Homo sapiens
ttttttttgataatagattttcttttagtgatgaaattaatcttgttttggtaatctacagcctgttagggataggtggagggatgaagtccttaaaactaaattgttcctctacgaatcttcgacctgagcctgcggagagagtagccccaaatccatctctctgctgaaaggtcgcctgttttggtaggtgtgaggacattccgaaacacggccatccacattctgatacatatttaatcttatgttgatttcaccatgtggctgctcctgcttcagaacttctgcagtgtcccaggacttcttgctgcctttgtgttacccttgtccttgtttttcccaggcatcctctgtggtgggttttccctctgcggtgcaattttaactgctttcattgtctcagggattttccacagtttcgcttcttctgcatctgccagctgacatcctaaaaacgaagtcaaattagggaaggatggc

SEQ ID NO: 1926 - DNA, 592 bp, Homo sapiens
tcggcacgaggtgctgaatgcctcccacgaggactccggggcctacagctgccggcagcggctcacgcagcgcgtactgtgccacttcagtgtgcgggtgacagacgctccatcctcgggagatgacgaagacggggaggacgaggctgaggacacaggtgtggacacaggggccccttactggacacggcccgagcggatggacaagaagctgctggccgtgccggccgccaacaccgtccgcttccgctgcccagccgctggcaaccccactccctccatctcctggctgaagaacggcagggagttccgcggcgagcaccgcattggaggcatcaagctgcggcatcagcagtggagcctggtcatggaaagcgtggtgccctgggaccgcggcaactacacctgcgtcgtggagaacaagtttggcagcatccggcagacgtacacgctggacgtgctggagcgctccccgcaccggcccatcctgcaggcggggctgccggccaaccagacggcggtgctgggcagcgacgtggagttccactgcaaggtgtacagtgacgcacagccccacatccagtggctcaag

SEQ ID NO: 1927 - DNA, 511 bp, Homo sapiens
tcggcacgagggaggaaagtcagtctactcccttcttcctccccccaaacacgtgttctcttttgtcaggaaactcagccagtggactgtggcagagaaagtcctccactcagaggcagagactgagttaagtcataggtggccttaggcatctgcattgtttgcaggggttaagttttccttccagtgagggctggagggatgaattagctggtacctgaagccccgcttagctctgacactctgccaacatcctctgattctaggtgtggtgttgactgtcctttcaaggaaaaacttgcaatagagggaaaagccattaaagcagctccctgcttcatcattaagtcctgtcatccctaccagccaatcccagtcaaagaagttatgctttattcacttctgtggaattacaagtgagagacacttttaggacctgatggacaaagcaggagattcactgtcagctttcctggtcctctccttacttctgtgggccttgcaccgtctt

SEQ ID NO: 1928 - DNA, 546 bp, Homo sapiens
  misc_feature 509: n = A,T,C or G
gagtgggatctcactttaatggagaggacgttatgacctccggggcatggctcttggccttgggcaagcccctggttttcatggacctgtcgatccacttgaggaaggcggtgaccttggtgtagatcccgtacttccccttacgggcacagcctcctccccagctgacgatgcctgtcacgaagtaggtgtccttgaagcgggtgacgtgcgggcccccgctgtccccctggcaggcatcctcctgcttggtgtcgtagccggcacagaacatgttctgggtgatgatgaagctgctggacagcttgcagctgttgcggtccacgtagggcacctccagcatcttgagcctggtggactgccggcccttctcgtgggtgcgccgaagccgctcacaatccccgtcttctgcgtcatcagcgtggactcggcccagtcacgctcggggaggcaggcaggcgcaacgttcatgcggaaggtgatgggggtcttgagccggagcagggagntgtcgaagtcataggtctcctttgtgaacgggtgtgc

SEQ ID NO: 1929 - DNA, 429 bp, Homo sapiens
  misc_feature 420: n = A,T,C or G
tggccaagttggttgcctttcggtgatcagccccacacaccccatcccacatccccgcccgactccccccactctctcttgccttccaccccagccggggctgcaccagcaccgcgagcacctgtggtcgcagcagcaccggcgcagcagccacccacgcacatgcatcagcccagaacgccttccccttctcagcaactggcaaggtgcaatccgtccccacacaccacgccacgactcgcttgcacccgcctgatcacagcatggcgtacccacgcaacactcggctagccactctgcagacagacactggcaacaccgcgcgacacctccagcaagcgacactgcaccacctcccctgtgatatccagcacctcagggtcgctacacgcctgcactgtcgcacacccgctccatcanccgcccaaa

SEQ ID NO: 1930 - DNA, 545 bp, Homo sapiens
tcggcacgagcggcacgagcatagggctcggcgtggagtcttggcagcagcctccactcctgggcatggcagggagcagcacctcagggacttgggaagttcctttggtctgggggcggcctggggcttttttctgggtatgccctgagaccagccctcccgcaggcacaatgacaataagaccttcctggtgtgggtcaacgaggaggaccacctgcgggtcatctccatgcagaaggggggcaacatgaaggaggtgttcacccgcttctgcaccggcctcacccagattgaaactctcttcaagtctaaggactatgagttcatgtggaaccctcacctgggctacatcctcacctgcccatccaacctgggcaccgggctgcgggcaggtgtgcatatcaagctgcccaacctgggcaagcatgaaaagttctcggaggtgcttaagcggctgcgacttcagaagcgaagcacaggcggtgtggacacggctgcggtgggcggggtcttcgacgtctccaacgctgaccgcctgggcttct

SEQ ID NO: 1931 - DNA, 455 bp, Homo sapiens
gtccaggaagaattgtgtcttttttggagagaccagaggcgaagggaaggtcgcaacaacagttatctccaagatgctattcgttgaacccatcctggaggtttccagcttgccgacaaccaactcaacaaccaattcagccaccaaaataacagctaataccactgatgaacccaccacacaacccaccacagagcccaccacccaacccaccatccaacccacccaaccaactacccagctcccaacagattctcctacccagcccactactgggtccttctgcccaggacctgttactctctgctctgacttggagagtcattcaacagaggccgtgttgggggatgctttggtagatttctccctgaagctctaccacgccttctcagcaatgaagaaggtggagaccaacatggccttttccccattcagcatcgccagcctccttaccc

SEQ ID NO: 1932 - DNA, 473 bp, Homo sapiens
tcggcacgagcgaaatggcttctgggcaagaaaaagcttattctaggaagaaatgctagtgagcagattttaaaacaatatattctaattattctacaccattttcttttgctctagtttcttactgctcatggattacatcggtattaacttggcaaccatgaattcatgtataaaccccatagctctgtattttgtgagcaagaaatttaaaaattgtttccaggtaagatgatttttcaagtattttttaaagacaacaaaatgagtatattaaacagtcaacagacacagccaattccagttgtaatattactttgatcagctatactactttttagcagtgaagtgaaaatcatgttttattacccagaaagagagtcagattgtcggcataacagaaaagcagttcctatttagacaaccacatacaaagaggttaaaatcaaaaggactaaatcacatgccagttt

SEQ ID NO: 1933 - DNA, 577 bp, Homo sapiens
ttcggcacgaggaccagcacactgaccatcaaagagagcgactggctcggccagagcatgttcacctgccgcgtggatcacaggggcctgaccttccagcagaatgcgtcctccatgtgtggccccgatcaagacacagccatccgggtcttcgccattcccccatcctttgccagcatcttcctcaccaagtccaccaagttgacctgcctggtcacagacctgaccacctatgacagcgtgaccatctcctggacccgccagaatggcgaagctgtgaaaacccacaccaacatctccgagagccaccccaatgccaccttcagcgccgtgggtgaggccagcatctgcgaggatgactggaattccggggagaggttcacgtgcaccgtgacccacacagacctgccctcgccactgaagcagaccatctcccggcccaagggggtggccctgcacaggcccgatgtctacttgctgccaccagcccgggagcagctgaacctgcgggagtcggccaccatcacgtgcctggtgacgggcttctctcccgcggacgtcttcgtgcagtggatgc

SEQ ID NO: 1934 - DNA, 505 bp, Homo sapiens
  misc_feature 370: n = A,T,C or G
tcggcacgaggaggccatggacttcctggggaagtcacctttgatacaaccaagtcggatgggcagtttaagaagacagccagtaacagcaagctgaggacctacctgcccgacttccggttcacacccttcaagcaggcggtgaaggagacctgtgcttggttcactgacaactacgagcaggcccggaagtgaagctggaagacaggatcaggtgccagcggaccatcggctggcagagcccagcggccaccacccgtcaaccctgccaggagctgagggcaccacccagcaacctgggcctgcattccatccgctctgcagccccaagcatctttccagtggggcccccattcacgttggtcctcanggaaaccagggtccggggcaggcccggcgctttgctccccacaccagccccctgcgcgtgtccactctgatcctgcatcccactccctgggagccaataaagtgcattttcacaggcaaaaaaaaaaaaaaaaaa

SEQ ID NO: 1935 - DNA, 500 bp, Homo sapiens
  misc_feature 314: n = A,T,C or G
acagattacagcttccacaagttccattacctgacctttgtgccctcagcagaggacttctatgactgcagggtggagcactggggcttggaccagccgctcctcaagcactgggaggcccaagagccaatccagatgcctgagacaacggagactgtgctctgtgccctgggcctggtgctgggcctagtgggcatcatcgtgggcaccgtcctcatcataaagtctctgcgttctggccatgacccccgggcccaggggaccctgtgaaatactgtaaaggtgacaaaatatctgaacagaagaagacttangagagatctgaactccagctgccctacaaactccatctcagcttttcttctcacttcatgtgaaaactactccagtggctgactgaattgctgacccttcaagctctgtccttatccattacctcaaagcagtcattccttagtaaagtttccaacaaatagaaattaatgaataaatgttgacac

SEQ ID NO: 1936 - DNA, 561 bp, Homo sapiens
ccgtcctctccccaacggctgtctttggcaccctggcctctctctatctgggagccttggaccacacagctgacaggctacaggcaatcctgggtgttccttggaaggacaagaactgcacctcccggctggatgcgcacaaggtcctgtctgccctgcaggctgtacagggcctgctagtggcccaaggcagggctgatagccaggcccagctgctgctgtccatggtggtgggcgtgttcacagccccaggcctgcacctgaagcagccgtttgtgcagggcctggctctctatacccctgtggtcctcccacgctctctggacttcacagaactggatgttgctgctgagaagattgacaggttcatgcaggctgtgacaggatggaagactggctgctccctgacgggagccagtgtggacagcaccctggctttcaacacctacgtccacttccaagggaagatgaagggcttctccctgctggccgagccccatgagttctgggtggacaacagcacctcagtgtctgttcccatgctctctggcatgggcacct

SEQ ID NO: 1937 - DNA, 523 bp, Homo sapiens
  misc_feature 460: n = A,T,C or G
tccaccttaccagggcctcccatatgggcctgagttgtacccaccacctgcgctaccctacgacccctacccaccgccacctgggcccttcgcccgccgggaggctccttatggggcaccccgcttcgacatgccagactttgaggacgatggtggcccctatggcgaatctgaggctcctgcgccacctggcccgggcacccgctggccctatcggtcccgggacacccgccgctccttcccagagcccgaggagcctcctgaaggtggaagctatgctggttccctggctgagccctacgaggagctggaggcggaggagtgcgggatcctggacggctgcaccaacggccgctgcgtgcgcgtccccgaaggcttcacctgccgttgcttcgacggctaccgcctggacatgacccgcatggcctgcgttgacatcaacgagtgtgatgaggccgangctgcctccccgctgtgcgtcaacgcgcgttgcctcacacggatggctccttccgctgcatct

SEQ ID NO: 1938 - DNA, 586 bp, Homo sapiens
tcggcacgaggatgattttctctccacgttcatcacctcagggatgcgcttcctcctcaaccagcagatctgccctgtcctctaccacgcagggacggtcctgctcaactccctcctggacaccgtgcctgtgcgcagttctgtggacgagcttgttggcattgactattccctcatgaaggatcctgtggcttccaccagcaacctggacatggacttccggggggccttcttccccctgactgagaggaactggagcctccccaaccgggcagtggagccccagctgcaggaggaagagcggatggtgtatgtggccttctctgagttcttcttcgactctgccatggagagctacttccgggcgggggccctgcagctgttgctggtgggggacaaggtgccccacgacctggacatgctgctgagggccacctactttgggagcattgtcctgctgagcccagcagtgattgactccccattgaagctggagctgcgggtcctggccccaccgcgctgcaccatcaagccctctggcaccaccatctctgtcactgctagcgtcaccattgccctggtccca

SEQ ID NO: 1939 - DNA, 671 bp, Homo sapiens
  misc_feature 472, 494: n = A,T,C or G
tcggcacgaggcaaagacctctgaggccccgtccacccaggacccctccacccaggcctccactgcgtcctccccagccccagaggagaatgctccgtctgaaggccagcgtgtgtggggtcagggacagagccccaggccagaaaactctctggagcgggaggagatgggtcccgtgccagcgcacacggatgccttccaggactgggggcctggcagcatggcccacgtctctgtggtccctgtctcctcagaagggacccccagcagggagccagtggcttcaggcagctggacccctaaggctgaggaacccatccatgccaccatggacccccagaggctgggcgtccttatcactcctgtccctgacgcccaggctgccacccggaggcaggcggtggggctgctggccttccttggcctcctcttctgcctgggggtggccatgttcacctaccagagcctccanggctgccctcgaaagatggcangagagatggcggagggccttcgctacatcccccggagctgtggtagtaattcatatgtcctggtgcccgtgtgaactcctctggcctgtgtctagttgtttgattcaaacagctgcctgggatccctcatcctcatacccacccccacccaagggcctggcctgagctgggatgatt

SEQ ID NO: 1940 - DNA, 303 bp, Homo sapiens
  misc_feature 230: n = A,T,C or G
agctcctggggatggtcctgtccatctgcttgtgccggcacgtccattccgaagactacagcaaggtccccaagtactgaggcagctgctatccccatctccctgcctggcccccaacctcagggctcccaggggtctccctggctccctcctccaggcctgcctcccacttcactgcgaagaccctcttgcccaccctgactgaaagtagggggctttctggggcctancgatctctcctggcctatccgctgccagccttgagccctggctgttctgtggttcctctgctcaccgcccatc

SEQ ID NO: 1941 - DNA, 568 bp, Homo sapiens
cggcacgagggcatgctggcggcagggggtgcggggctggccgtggctctgcattcggctgtgagtgccagtgacctggagctgcacccccccagctatccgtggtctcaccgtggcctcctctcttccttggaccacaccagcatccggaggggtttccaggtatataagcaggtgtgcgcctcctgccacagcatggacttcgtggcctaccgccacctggtgggcgtgtgctacacggaggatgaagctaaggagctggctgcggaggtggaggttcaagacggccccaatgaagatggggagatgttcatgcggccagggaagctgttcgactatttcccaaaaccataccccaacagtgaggctgctcgagctgccaacaacggagcattgccccctgacctcagctacatcgtgcgagctaggcatggtggtgaggactacgtcttctccctgctcacgggctactgcgagccacccaccggggtgtcactgcgggaaggtctctacttcaacccctactttcctggccaggccattgccatggcccctcccatctacacag

SEQ ID NO: 1942 - DNA, 402 bp, Homo sapiens
  misc_feature 292, 317: n = A,T,C or G
gttgggggaggtatcatttattcatattactttctcccatgtactttttgaaagacagcttattctttcccttttagagatgagggaccagatttaagagcttattttgtgctttacattcattaactcacttgatctccacagcaactccatgagaagggtgctaatattaccactgggtactgagtagtacctctctttcactagttgcataataagaattaacccagagagtgacctgagggcgggattttggacacacttgacaagagaggaagaggctggagcgcangaggtagctggtgctgggctcctantcttggcagaggagcccaaagcacttggctgccctgcgtgtcactcatctccctttgcctcccagctggagtccctggatgccct

SEQ ID NO: 1943 - DNA, 576 bp, Homo sapiens
  misc_feature 367, 490: n = A,T,C or G
tcggcacgagggtggctcccgcggtagcctcggtggcagggggcagcggcagcggcggcttcagcgccagcctgcacagcgagccgccggtctacgcaaacctcagcaacttcaacccaggcgcgctgagcagcggcggcggggcgccctcctacggcgcggccggcctggcctttcccgcgcaaccccagcagcagcagcagccgccgcaccacctgccccagcagatgcccgtgcagcacccgcggctgcaggccctgaaggaggagcctcagacagtgcccgagatgcccggcgagacaccgcccctgtcccccatcgacatggagtcccaggagcggatcaaggcggagaggaagcgcatgangaaccgcatcgctgcctccaagtgccgaaaaaggaagctggagagaatcgcccggctggaggaaaaagtgaaaaccttgaaagctcaaaactcggagctggcgtccacggccaacatgctcanggaacaggtggcacagcttaaacagaaagtcatgaaccacgttaacagtgggtgccaactcatgctaacgcagcagttgcaaacat

SEQ ID NO: 1944 - DNA, 383 bp, Homo sapiens
ttatttagtttttatttcataatcataaacttaactctgcaatccagcgaggcatgggagggaacaaggaaaacatgggacccaaaggggaccgccggggggcgccaagaatccagggaaccggcgaccaaaggggggggaggggggcccccctgaccaccagagggaaggaccggggggtaaagaaaaaacacaggccaaactaatccgggtggcccaaggtcgccatgggggacctcctggcgggcctggcaatcccgggcccaaagcggcccaagggcccccacaaaaatcatgccttccttcactttgccaaacaccacatgcttgccatcccaccactcacgcttggcagtgcagatgaaaaactgggaaccatttgt

SEQ ID NO: 1945 - DNA, 434 bp, Homo sapiens
  misc_feature 376, 385: n = A,T,C or G
gcggccgcagcaccgcagcgtagcgctcgctgctcatgacggtcagcgtgaagatgctggcgtgcatggtcaggaagtccaggccgaagagcacgcggcagcccacgtccccgaagtgccactccttggtgacgtaggtggccacgatgaaggggatgctgagcaggtacagcaggtcggccagcgccaggttgaccacgtagacgtacatggaggccaccgcacgcagggagcggcaggtgaccaccagcgtgtaggcgttgcccaccacgcccaccacgcccatggccgacagcagagtcccaatggtgcccgtggccaccaggtcctccagggagctgggctcggtcgggctggcccaggagctgttgaggtntgctttggnggccgccaggcggctccggcacagagctgccagtgggcggccagcccag

SEQ ID NO: 1946 - DNA, 580 bp, Homo sapiens
  misc_feature 424: n = A,T,C or G
tcggcacgaggctgaggtccttcacagcctgcagacacaactcaaggctcagaacagcaggatccagcaactcttccacaaggtggcccagcagcagcggcacctggagaagcagcacctgcgaattcagcatctgcaaagccagtttggcctcctggaccacaagcacctaaaccatctggaaacttgtggacagagaagaagaccacgactggagaagccccctttctgagtgcaggggggctgcatgcgttgcctcctgagatcgaggctgcaggatatgctcagactctagaggcgtggaccaaggggcatggagcttcactccttgctggccagggagttggggactcagagggaccacttggggccagccagactggcctcaatggcggactcagtcacattgactgacggggaccanggcttgtgtgggtcgagagcgccctcatggtgctggtgctgttgtgtgtaggtcccctggggacacaagcaggcgccaatggtatctgggcggagctcacagagttcttggaataaaagcaacctcagaacaaaaaaaaaaaaaaaaaaaaaaaaa

SEQ ID NO: 1947 - DNA, 350 bp, Homo sapiens
  misc_feature 64: n = A,T,C or G
acgcaacaaggcgagggacctggccctggccatccgggacagtgagcgacagggcaaggcccangtggagattgtcactgatggggaggagcctgctgagatgatccaggtcctgggccccaagcctgctctgaaggagggcaaccctgaggaagacctcacagctgacaaggcaaatgcccaggccgcagctctgtataaggtctctgatgccactggacagatgaacctgaccaaggtggctgactccagcccatttgcccttgaactgctgatatctgatgactgctttgtgctggacaacgggctctgtggcaagatctatatctggaaggggcgaaaagcgaatg

SEQ ID NO: 1948 - DNA, 433 bp, Homo sapiens
tataaatataaatttccatatgatttattgttgttccttgtacataagaaacagtaatatacaacttacactgctttagaatgtaaaatggataaaaatgtgtacaaaaaaaagcacactcctagaaaaaggtattggcaaatagtaaaaatgggaggtcaaaagcaaaaaaaaaaaaaacaaaacaaaaaaaagaaaaaaccaacaattcttcaattcagtgtgcaaacattatataaaaatagaaatactaactctacaggcagtatttcctgataaattatttaaatagcatatctacacaatctgagatatctattccaatggcaatgagaaaataatttataaaaataaagcaatggtataccagatgatagaaaaaaaacataactttcagaaattgtatttaacatttcaatgctatttccttatt

SEQ ID NO: 1949 - DNA, 536 bp, Homo sapiens
  misc_feature 508: n = A,T,C or G
atacaaaaaccttttattgactgtatttcttctccccataacctggaacccagccagcatctatggcttcctgctgtctgattcttgaaagtggggccttgggaacatgtttggaggctatggaaggtgggaatctcctcacccaccggctatgcaggttgaaggaagctttcttgcctggctgaagctacggcagcttcccagggtagcccctcaagtctagaggacccatcccccactaaatgggtgtgaggaagagatgatgcatctttcagaggctttgtcactcactgctcctatcccactccagactgaggccctagagccgaaccagtctctcctgtggagatggggcccagcagcgaggggagggggttagaggtgagtgtgtgcagcagctctgggtcctcatcaacaaaaaggaaacgcaaagaggttggcaccgctgaaactgaactgaaatggaacaggagaaggaggatataggagaacaaaagatgggtttggngtagtgccacctattaagagaggacatg

SEQ ID NO: 1950 - DNA, 445 bp, Homo sapiens
  misc_feature 410: n = A,T,C or G
tttgtaaagtgacccagttttattttggttttggaggccagacagggcattgctccacgggttcgggctgtacaaccttcccctccttgaggtgggaggcccagcaaccacagggcccaggcagcggggtgggaggctcaggagatggtggctctggggacccgatcccgaggagagagggggcagcaggcagaggcctgcaatggctcagattgggggaagagggcggcgagggggagaggacacgatccaagaaccagagtccgaaagctgaagctggtccggtctctttcactttacggccgaggctggggtcagagaagtgaagccaaactgtcctcccgcaggaggcaaggcctggagggacgccagggtcccagtccggtgccgggccctgcgcacacagccgncgcctccaccctcgcggaggggcgcgcgcgggccc

SEQ ID NO: 1951 - DNA, 221 bp, Homo sapiens
gagaagacgacagaaggggaagctgccaaaaatccctacaaacggagggttgggccacctgtggccaccagaaaagccaaggttggggttggttcaccacccaatttccagttaaaaggcggattgggccgggaccgtggccagccacttaattaaaatgggaaaggatcttttggcttggattaaccttccggccaaaaaaaaaaaaaaaaaaaaaaaaa

SEQ ID NO: 1952 - DNA, 399 bp, Homo sapiens
cgtgggcggagcggggctggccagcctcggcccccagacccgctgtcctgtgccctttcccagcgatgggcgtgcagccccccaacttctcctgggtgcttccgggccggctggcgggactggcgctgccgcggctccccgcccactaccagttcctgttggacctgggcgtgcggcacctggtgtccctgacggagcgcgggccccctcacaagcgacagctgccccggcctcaccctgcaccgcctgcgcatccccgacttctgcccgccggcccccgaccagatcgaccgcttcgtgcagatcgtggacgaagccaacgcacggggagaagctgtgggagtgcactgtgctctgggctttggccgcactggcaccatgctggcctgttacctggtg

SEQ ID NO: 1953 - DNA, 601 bp, Homo sapiens
  misc_feature 230: n = A,T,C or G
ttcggcacgagcctccgcgccttctccgccgggacctcgagcgaaagagcccgcccgccgcccagccctcgcctccctgcccaccgggcacaccgcgccgccaccccgaccccgctgcgcacggcctgtccgctgcacaccagcttgttggcgtcttcgtcgccgcgctcgccccgggctactcctgcgcgccacaatgagctcccgcatcgccagggcgctcgccttantcgtcacccttctccacttgaccaggctggcgctctccacctgccccgctgcctgccactgccccctggaggcgcccaagtgcgcgccgggagtcgggctggtccgggacggctgcggctgctgtaaggtctgcgccaagcagctcaacgaggactgcagcaaaacgcagccctgcgaccacaccaaggggctggaatgcaacttcggcgccagctccaccgctctgaaggggatctgcagagctcaatcagagggcagaccctgtgaatataactccagaatctaccaaaacggggaaagtttccagcccaactgtaaacatcagtgcacatgtattgatggcgccgtgggctgcattcctctgtgtccc

SEQ ID NO: 1954 - DNA, 122 bp, Homo sapiens
gaaggcggcaacagctatggggaggtcaaggtcaagctcatcgtgcttgtgcctccatccaagcctacagttaacatcccctcctctgccaccattgggaaccgggcagtgctgacatgctc

SEQ ID NO: 1955 - DNA, 485 bp, Homo sapiens
gactcatttggggggtcaagggacccgggcaatatagtattctgctcagtgtctggagatcatctacccaggctggggcttctgggacaggcgaggacccacggaccctggaagagctggtccaggggactgaactcccggcatctttacagagcagagcatgatcacattcctgccgctgctgctggggctcagcctgggctgcacaggagcaggtggcttcgtggcccatgtggaaagcacctgtctgttggatgatgctgggactccaaaggatttcacatactgcatctccttcaacaaggatctgctgacctgctgggatccagaggagaataagatggccccttgcgaatatggggtgctgaatagcttggcgaatgtcctctcacagcacctcaaccaaaaagacaccctgatgcagcgcttgcgcaatgggcttcagaattgtgccacacacacccagcccttctggggatcactga

SEQ ID NO: 1956 - DNA, 290 bp, Homo sapiens
tcggcacgagctgcagcgggcctctgcgtgggcggcgggaatccgcggacatcgggtcgggtctaggctcccgagtccgcgctcctgggcgggagcccttgtctgggtctcgcggggggctgccagatgcgtaggccacactgactagttccttcttgtcgcttttcccagcaaatggcggatgacgccggtgcagcgggggggcccgggggccctggtggccctgggatggggaaccgcggtggcttccgcggaggtttcggcagtggcatccggggccggggccgagg

SEQ ID NO: 1957 - DNA, 519 bp, Homo sapiens
tcggcacgagggggagattagcaggaacagcctccttcactgactggttgctcctgaggcttttccagttttatgtcaatcatatcttctctgcttctgtcctgtgtgctttccattcccggcaaagctgctgctacacgtcgaaagagctgctttacattgtatccagcttttgcactagtttcaataaacataacattcagctctttggctttcctctctccctcctcaattgacacttgcctcttgtcagcaagatctgttttatttcctactagcatgatgataacatcacttcctctttctgttctgacatcatcaatccactttgtagtttgctggaatgagttaacatttgtgatatcataaacaacaactgccacagtggagtcacgaatgtagctaggaatcaagctcctgaaccgctcttgacctgctgtgtcccataattgcaatcgtactgttcgatcctccaagtacatagtttttgataaaaagtcaatgccaattgttgcctga

SEQ ID NO: 1958 - DNA, 386 bp, Homo sapiens
gcggccgccttgcgctcggtcatgatggctgggtacttgagtgagtggcgcacgcccacgtaccggtccacggagatggtgcagaggctgaggatggaggccgtgcagcacagcacgtccacggcggcccatacgtcgcagaaggcgcggccaaaggcccagaagcccagaacctccatggtggccgagaagggcagtacggtggcgctcagcagcaggtcggccacggccaggttcacgatgaaatagttggtgacggtctgcaggtggcggttgcaggccactgagaggatgacaagcaggttacctgccacggccataaggatgaaggctgccaggaagacgcccacgcccacgccctgcgcgctcaccaccagtcccccgac

SEQ ID NO: 1959 - DNA, 734 bp, Homo sapiens
  misc_feature 300, 387, 628, 649, 673, 675: n = A,T,C or G
gcggccgctacagatgcgtcagtttgggagcctccggcagtcgtccctgagacgagtggtgggccgagagatctgtgtaggtgggatgagggtcgcaaggtccatggtggtggttgcctggaatctgcgcggcgcaactgtagtccacgctggccgacgacgggtgcgagaggtggcccaggttgaagacaggcccggacgcgggcgccatggactcgacgaagttgccgcccacgtacaccgggctgccctgcaggttggcgctggcgaagccgccgccgttgctcgccatgggatggngctcgaactccggcgctgcgtagcgcttctgttgtggcaggcagctgctgagtggcgccgtgtaggcggccaggccgtacatattgngctgtgatttggcgaaagcaggcggcgagggcgcgtcgtaggccaggccgggcactggcggcagctggccggagtaggccacgtggccagcggcgccgccgagcggtgggctgcgctcaggggactggctagccggcgagtgcaggatgcccttggccttctggtccttcttgtacttcatgcgccggttctgaaccagatcttgatctggcgttcgtgagattcagcagtttgccatctncacgctgcgcggtcggcacangtagcgggtgaagtgtatttcttntncaattcaccagctgcgcgctcggtatgccggcgtacccgcttggatgctggcctggcgg

SEQ ID NO: 1960 - DNA, 475 bp, Homo sapiens
  misc_feature 104, 111, 332, 438: n = A,T,C or G
gcgacagcggtggtccctttgtgtgtgaggacagcatctctcggacgccacgttggcggctgtgtggcattgtgagttggggcactggctgtgccctggcccanaaaccangcgtctacaccaaagtcagtgacttccgggagtggatcttccaggccataaagactcactccgaagccagcggcatggtgacccagctctgaccggtggcttctcgctgcgcagcctccagggcccgaggtgatcccggtggtgggatccacgctgggccgaggatgggacgtttttcttcttgggcccggtccacaggtccaaggacaccctccctccanggtcctctcttccacagtggcgggcccactcagccccgagaccacccaacctcaccctcctgacccccatgtaaatattgttctgctgtctgggactcctgtctangtgcccctgatgatgggatgctctttaaataataaag

SEQ ID NO: 1961 - DNA, 467 bp, Homo sapiens
tcggcacgagggaggccgctgcgcggccctgcgcatgctgctggcagatcagggccagagctggaaggaggaggtggtgaccgtggagacgtggcaggagggctcactcaaagcctcctgcctatacgggcagctccccaagttccaggacggagacctcaccctgtaccagtccaataccatcctgcgtcacctgggccgcacccttgggctctatgggaaggaccagcaggaggcagccctggtggacatggtgaatgacggcgtggaggacctccgctgcaaatacgtctccctcatctacaccaactatgaggcgggcaaggatgactatgtgaaggcactgcccgggcaactgaagccttttgagaccctgctgtcccagaaccagggaggcaagaccttcattgtgggagaccagatctccttcgctgactacaacctgctggacttgctgctgatccatg

SEQ ID NO: 1962 - DNA, 510 bp, Homo sapiens
tcggcacgaggtgagaacatctactttggactctggggtttcaacagctctctggcctgcattgcaatgggaggaatgttcatggcgctcacctggcaaacccacctcctggctcttggctgtgccctgttcacggcctatcttggagtcggcatggcaaactttatggctgaggttggattgccagcttgtacctggcccttctgtttggccacgctattgttcctcatcatgaccacaaaaaattccaacatctacaagatgcccctcagtaaagttacttatcctgaagaaaaccgcatcttctacctgcaagccaagaaaagaatggtggaaagccctttgtgagaacaagccccatttgcagccatggtcacgagtcatttctgcctgactgctccagctaacttccagggtctcagcaaactgctgtttttcacgagtatcaactttcatactgacgcgtctgtaatctgttcttatgctcattttgtattttcctttcaactc

SEQ ID NO: 1963 - DNA, 450 bp, Homo sapiens
ggccgcctgtgctggctctgcttccgtggtcggatcctgtgtgtcggctgagaggccgatgcgcactgccggcccctacatggctgtcggtgcagctgaacggcgcgcacctttgcggcggctgtcctggtggcggacagtcgggtgctgagcgcggcgcactgctttggaggacgcggtcgacttgaaggtgcaggttctcctgggctcgcactccctgtcgcagccgtagcccttcaagcgcctgtacgacgtgctccgcgcagtgacccacccggacagctagctctacaccatctactacgacctcctgctgctacagctgtcgtagaaggtcacactgggccctgctgtgctccacctgccctggcagtcgcgtgtgactgcgacgtggcaccgggaacttctctgtcgacgtggcctgctggtgcatagtcaaaccacgctggg

SEQ ID NO: 1964 - DNA, 579 bp, Homo sapiens
  misc_feature 458: n = A,T,C or G
tcggcacgaggtgggcccagaaggttgcgatgaagaaaagcgggccagtgtgggaatgcggcaagaaggaattgacttcgactgtgacctgtggggatttctcccagctctagacaaccctgcaaaggactgttttttcctgagcttggccagaagggggccatgaggcctcagtggactttccaccccctccctggcctgttctgttttgcctgaagttggaatgagtgtggctcccctctatttagcatgacaagccccaggcaggctgtgcgctgacaaccaccgctccccagcccagggttcccccagccctgtggaagggactaggagcactgtagtaaatggcaattctttgacctcaacctgtgatgaggggaggaaactcacctgctggcccctcacctgggcacctggggagtgggacagagtctgggtgtatttattttcctccccancaggtggggagggggtttgggggcttgcaagtatgttttaacatgtgtttggttctggggcccctttttactccccttgagctgagatggaacccttttggcccccgagctgggggccatg

SEQ ID NO: 1965 - DNA, 476 bp, Homo sapiens
  misc_feature 85, 360, 396: n = A,T,C or G
ggagcggacatcgccctgctggagctggaggagccggtgaaggtctccagccacgtccacacggtcaccctgccccctgcctcanagaccttccccccggggatgccgtgctgggtcactggctggggcgatgtggacaatgatgagcgcctcccaccgccatttcctctgaagcaggtgaaggtccccataatggaaaaccacatttgtgacgcaaaataccaccttggcgcctacacgggagacgacgtccgcatcgtccgtgacgacatgctgtgtgccgggaacacccggagggactcatgccagggcgactccggagggcccctggtgtgcaaggtgaatggcacctggctgcangcgggcgtggtcagctggggcgagggctgtgcccancccaaccggcctggcatctacacccgtgtcacctactacttggactggatccaccactatgtccccaaaaagccgtgagt

SEQ ID NO: 1966 - DNA, 437 bp, Homo sapiens
tgggcaagaccaagtacaacgccaacaaaacccctgacaagctgcagcaggcagccctgcccctcctgtccaatgccgaatgcaagaagtcctggggcaggaggatcaccgacgtgatgatctgtgccggggccagtggcgtctcctcctgcatgggtgactctggaggccccctggtctgccagaaggacggagcctggaccctggtgggcattgtgtcctggggcagccgcacctgctctaccaccacgcccgctgtgtacgcccgtgtcaccaagctcataccctgggtgcagaagatcctggccgccaactgagcccgcagctcctgccacccctgccttaagatttcccattaaatgcatctgtttagaaaaaaaaaaaaaaaaaaaaaaaagggggggcccaaattttttcccttttagggggggtaattt

SEQ ID NO: 1967 - DNA, 218 bp, Homo sapiens
cctcctgccatatgcctctcacggactatgaagtatggttgggcaccctgttccataacccacaacatggagagccaggcctacagcgggtcccagtagccaagatgctgtgtgggccctcaggctcccagcttgtcctgctcaagctggagagatctgtgaccctgaaccagcgtgtggccctgatctgcctgccgcctgaatggtatgtggtgcct

SEQ ID NO: 1968 - DNA, 409 bp, Homo sapiens
gggcgtacacacggtcatgctgccccctgcctcggagaccttccccccggggatgccgtgctgggtcactggctggggcgatgtggacaatgatgaccccctcccaccgccatttcccctgaaccatgtgaaggaccacataatggcaaaaccacatttgtgacgcaaaataccaccttggcgcctacactgaatacgacgtccgcatcatccgtgacgacatgctgtgtgccgggaacacccggatggactcatgccaaggcgactctggagggcccctggtgtgcaaggtgaatggcacctggctacaggcgggcgtggtcagctgggacgagggctgtgcccatcccaaccggcctggcatctacacccgtgtgcacctactacttggactggatccaccactatg

SEQ ID NO: 1969 - DNA, 658 bp, Homo sapiens
  misc_feature 383, 582: n = A,T,C or G
tcagaaaaatcacattttattgatcacttttatttaaaattacaaaaatataaataaaaatagtgaaatataaatattcagtgtacaggagtggtcctcaccccacccagtgaggattggatgaactaggctaaaaggaagggataactggccaagaaagggacatctatgtgaaagtgaaactgagacagtgctggtcacaggtcatgctgcagaataatacattcccaggcactgtcacgtgggggacccaagaggccccaggagtgacctataacctctccagaaagaccactctgtgtggcatcacagtccacacagtttaaggaaatatttagacttaacaatcagacaccagctcttactcacacttacactcacangccacacacaagtgtgcaaacatacacacacatatatatttcctgatacattcatggaatatcagagccctgccctgaagtcgttagtgtctctgctccccaaaccgctgctcccacattggctaagctccctcaagagacctcagctgttacacttcctaattgggaaattatcatttctcaaccatgggcctcacanatgcccaccgtcgggggagctggttctccctcacccatgcaccagagatgccctgccctttttactcctgcaggct

SEQ ID NO: 1970 - DNA, 156 bp, Homo sapiens
tcggcacgaggccgacccatcctcaccaggccgggcccctctgctcatgaccaggccccaccccatagccgccctgaggcctggcaggggcctctggagcccgcacacccctctccttggcaaccccctccatcctgggcccttcggctttcccac

SEQ ID NO: 1971 - DNA, 486 bp, Homo sapiens
  misc_feature 58, 369, 379, 387, 392, 435, 473: n = A,T,C or G
cgccaccatgccgccctacaccgtggtctatttcccagttcgaggccgctgcccgtgncggcattgctgctggcagatcagggccagagctggaaggaggaggtggtgaccgtggagacgtggcaggagggctcactcaaagcctcctgcctatacgggcagctccccaagttcaaggacggagacctcaccctgtaccagtccaataccatcctgcgtcacctgggccgcacccttgggctctatgggaaggaccagcaggaggcagccctggtggacatggtgaatgacggcgtggaggacctccgctgcaaatacatctccctcatctacaccaactatggaggcgggcaagggatgactatggtnaaaggcactncccggggncaaantggaaagccttttttgagaacccctggcttggttcccaggaancaaggggaaaggccaagaactttttaattggttggggnagaaccaggattt

SEQ ID NO: 1972 - DNA, 420 bp, Homo sapiens
tcggcacgaggaatacctggagggcattatgagcgaggccccggggcccatcaacttcaccatgttcctcaccatgtttggggagaagctgaacggcacggaccccgaggatgtgattcgcaacgcctttgcctgcttcgacgatgaatcctcatgtttcatccatgacgaccacctccgggagctgctcaccaccatgggtgaccgcttcacagatgaggaagtggacgagatgtaccgggaggcacccattgataagaaaggcaacttcaactacgtggagttcacccgcatcctcaaacatggcgccaaggataaagacgactaggccaccccagccccctgacaccccagcccccgccagtcacccctccccgcacacacccgtccataccagctccctgcccatgaccctcgctc

SEQ ID NO: 1973 - DNA, 466 bp, Homo sapiens
attcggcacgaggcagcgcggcggcgccggccgtattctccgggctgcggaggggttgccattaggggactcctgaggtcctatctccaggctgcggtgactgcactttccctggagtggaagctgctggaaggcggaccggccgccatgtccacgttcaggcaggaggacgtggaggaccattatgagatgggggaggagctgggcagcggccagtttgcgatcgtgcggaagtgccggcagaagggcacgggcaaggagtacgcagccaagttcatcaagaagcgccgcctgtcatccagccggcgtggggtgagccgggaggagatcgagcgggaggtgaacatcctgcgggagatccggcaccccaacatcatcaccctgcacgacatcttcgagaacaagacggacgtggtcctcatcctggagctggtctctggcggggagctctttgacttcctggcgg

SEQ ID NO: 1974 - DNA, 444 bp, Homo sapiens
  misc_feature 366, 398, 439: n = A,T,C or G
ctcggcgtgaacatcccgtctgatgagggccacatccccctgcacctggcggcccagcatggtcactatgatgtgtctgagatgctgctacagcaccagtctaacccgtgcatggtggacaactcggggaagacgcccctggacctggcctgcgagttcggccgcgttggggtggtccagctgctcctcagcagcaatatgtgtgcggcgctgctggagccccggccgggagacgccaccgaccccaacggcaccagccctttgcacctcgcagctaaaaacggccacatcgacatcatcaggtaggagccggtagcaggggaggggcctcagccttaggggtccccaggggtttcagcagcagcngggggtttcaggggcaccagtttttgggtttnggggataaggggcgggacaagggcagggttcccagggtccntggtt

SEQ ID NO: 1975 - DNA, 502 bp, Homo sapiens
ttcggcacgagggtgcacccctggataacgcccccaagagtaccccccccccaagaacagcagcgtgaaaaaaacgttgaagatccaggatgtcgggcttgtgccgatgggtggtgtgatgtctggggctgtccctgctgcagcagcccaggaggcggtggaagaagatatccccatagcgaaagaacggacacatttcaccgtccgcctgaccgaggcgaagcccgtggacaaagtgaagctgatcaaggaaatcaagaactacatccaaggcatcaacctcgtccaggcaaagaagctggtggagtccctgccccaggaaatcaaagccaatgtcgccaaagctgaggcggaaaaaatcaaggcggccctggaggcggtgggcggcaccgtggttctggagtagcctccagctcggaggacttgtgttcaggggtcctgggccccgggcgaggtcccgccctcccgtggtcactggctccgcccccagcaccaggcgccc

SEQ ID NO: 1976 - DNA, 452 bp, Homo sapiens
aaaattatacagcagacttggaacagaacatttgaaggtatcgccgggcaggtgtccatagatgccaacggagaccgatatggggatttctctgtgattgccatgactgatgtggaggcgggcacccaggaggttattggtgattattttggaaaagaaggtcgttttgaaatgcggccgaatgtcaaatatccttggggccctttaaaactgagaatagatgaaaaccgaattgtagagcatacaaacagctctccctgcaaatcatcaggtggcctagaagaatcggcagtgacaggaattgtcgtgggggctttactaggagctggcttgctaatggccttctactttttcaggaagaaatacagaataaccattgagaggcgaacccagcaagaagaaagtaaccttggaaaacatcgggaattacgggaagattccatcagatccca

SEQ ID NO: 1977 - DNA, 504 bp, Homo sapiens
tcggcacgagggggaagctggtgagaaggcacactctctccacagttagatttgggaggaggcctgacttgggagagggatccaggctcacaccgccctgtcctgtgtcctgtctgcagacagaggaactgaaccgcgaggtggccaccaacagtgagctggtgcagagtggcaagagtgagatctcggagctccggcgcaccatgcaggccttggagatagagctgcagtcccagctcagcatgaaagcatccctggagggcaacctggcggagacagaaaaccgctactgcgtgcagctgtcccagatccaggggctgattggcagcgtggaggagcagctggcccagcttcgctgcgagatggagcagcagaaccaggaatacaaaatcctgctggatgtgaagacgcggctggagcaggagattgccacctaccgccgcctgctggagggagaggatgcccacctgactcagtacaagaaagaaccggtgaccacccgtc

SEQ ID NO: 1978 - DNA, 459 bp, Homo sapiens
  misc_feature 19, 22, 23, 29, 69, 91, 319, 353, 423, 428, 455: n = A,T,C or G
catgagggggcccggcatngcnngtactntcctggcagatggcaaggtgttcaccacaggcttcagcanaatgagcgagcggcatggcgcntctgggacccagaaaacctcgaggaacccatggccctgcaggaactggactcgagcaacggggccctgctgcccttctacgaccccgacaccagtgtggtctacgtctgcggcaagggtgactccagcatccggtactttgagatcacagaggagcctccctacatccacttcctgaacacgttcaccagcaaggagccgcagcggggtatggggcagcatgcaaagncggggcctgggaggtcagcaagtgcgagattcgnccggtttttacaaattgcatgagcgcaatgttgagcccttcgtcatgattgttgccaagaaattcggacnttttncaggttgtttttttaccccgacaaagncggg

SEQ ID NO: 1979 - DNA, 430 bp, Homo sapiens
  misc_feature 405: n = A,T,C or G
ctaaggaaaaatttaatgatggaaatatcgacaaatattcaacatcatttaaaaacaaagtagcttctcttatttcacatagcttagtttgggatagaaatagaactaatgtttacaatgattcttacatttagcattaatcagaaacgagggtttgttaagtgcccttgctgggtcccaacccccagagattccgattcagcaagtctgggatgcggcttgagaatttgcatttctaacaagtttctagggtgatgctgatgtcaatagtctgtgtaccgtttgaggaaccgctgggattggattctttgacagtttttgaaggtcccgctggctcacccatatccacttcatccctcttattaaacttttcactatggggattgccctaaggggcccctgctngttgggctgctcccccatttttcac

SEQ ID NO: 1980 - DNA, 546 bp, Homo sapiens
tcggcacgaggtacacagaacacacgctccttcaacttatctttgataaacccaagcaaggatacaaaaagttggacgacattgagtagagtcatggtatacggtgctgaccctacagtatcagtggaaaagataaggaaaatgtcactactcacctatgttatgcaaaacagttaggtgtgctggggctggatactgctcttttacttgagcattggttgattaaagtttaggtaccatccaggctggtctagagaagtctttggagttaaccatgctctttttgttaaagaagagagtaatgtgtttatcctggctcatagtccgtcaccgaaaatagaaaatgccatccataggtaaaatgctgacctatagaaaaaaatgaactctacttttatagcctagtaaaaatgctctacctgagtagttaaaagcaattcatgaagcctgaagctaaagagcactctggtggttttggcataatagctgcatttccagacctgacctttggccccaaccacaagtgctccaagccccaccagctga

SEQ ID NO: 1981 - DNA, 534 bp, Homo sapiens
  misc_feature 379: n = A,T,C or G
cggcacgaggggatatccttcacttcaaaatagcttcataaagtcaggtccttctgtacctcccttagtgaatccacctctgcctacaacttttcaaccaggagctcctcatgggccccctccagctggaggcccacccccagtgagggccctcacgcccctgacatcatcatatagagatgtaccccagcccttatttaattcagctgtcaaccaagaaggtaagtgaaccaagaaacaaagtcaaatcctcaagttttgacttagggtagaaagatgaatattagctgaattctgtgcattaaaatcacattttttccagaaaatctagttttggttagggatgggctacaggaatttacaatttaaagttcctcangaattccattgccatccgctgggctgtgactaccattgggaaaaaagctcttaatgttttgttactttttttgttgctatgcggattttttaaaaatcatggctataaagtcaggtggcttttggaggagaattactacttttcttgacatgatg

SEQ ID NO: 1982 - DNA, 557 bp, Homo sapiens
  misc_feature 381, 383, 448: n = A,T,C or G
accctgtatagccaggtcagccgtctagccccgctgagcagcagccgtagccgcttccatgcctttatcctgggcctcctcaacaccaagcagttggagctgtggttttccagtctccaggaagatgcaggcctgctctccctcctgtacctgccaacaggatttttctccctggcccgcggtggttgtccctccctgtccacagagctgctgctcctgctgcagccattgtcggtgctcactttccacctggacctgctctttgagcaccaccaccacctgcccctgggcccacctcaggcccctgcccctccaggcccacctccagctctgcagcagactatgcaagccatgctgcactttgggggccggctggcccananccttcgggggacttccaaggaagctgcttcagacccctctgactctccaaaccttcccacaccanggagctggtgggagcagttgacccaggcctcccgggtctatgcctctgggggcactgagggctttcctctttcccgatgggcaccggggcgtcatgggactgcagctga

SEQ ID NO: 1983 - DNA, 541 bp, Homo sapiens
cgctcacgtaccgagccaaacgaacaacaaagagagccggtgtgatgatcggtctggcttgggtcatctcctttgtcctttgggctcctgccatcttgttctggcaatactttgttggaaagagaactgtgcctccgggagagtgcttcattcagttcctcagtgagcccaccattacttttggcacagccatcgctgctttttatatgcttgtcaccattatgactattttatactggaggatctataaggaaactgaaaagcgtaccaaagagcttgctggcctgcaagcctctgggacagaggcagagacagaaaactttgtccaccccacgggcagttctcgaagctgcagcagttacgaacttcaacagcaaagcatgaaacgctccaacaggaggaagtatggccgccgccacttctggttcacaaccaagagctggaaacccagctccgagcagatggaccaagaccacagcagcagtgacagttggaacaacaatgatgctgctgcctccctggagaactccgcctcctccga

SEQ ID NO: 1984 - DNA, 486 bp, Homo sapiens
atagtccatgtccctcttttatatgggtgataatttcaaagtactatagccagagtcccaggaaggttctagtcacccttgtaccccaaaagccagtctttccttaggctctgagctcctcaggctagcgctggtcccagtctgcacatctcagaccataccctcttcctatacaggaggtggggcaggctttcagccctcaggtccagtgtggggagcggcaggagcaggagggctgggatcctccagctgcacatcatgcaggtgcactgtgggggtggtggggtctttgcccacaccctggtttgggtcggcttggtcagggtggtgcctgcgtacgtgcttgaccacctggaacttttgcttggccttgtagttgcagaggcggcaaaagaaggggtggcggtcggtgtgggtgagggcatgatggcgcaggccagcagcccagcggaaagcacggtggcacacatttgcacacataggttt

SEQ ID NO: 1985 - DNA, 377 bp, Homo sapiens
ctggtgcccgctcgcatgaccgtgcgcggcaccgacggccgccccgcctagctccatctacggccgcccacgccgctcagcgcccttcctcactccgggacctggtcaggacccccgggcccctggcaccccaacgccgaactgcctccagggaggccacctgggaaccccggacctgaaccccgagtccccctcggataccctaacaccgcatattcggtacccccatatccggatctcaaatcccaaaccccgaaccccacggggctttgataaatcgtggctcagactccccactagtcccaggaccccatctcgggtaccaccaggctccacgcagttctagccccacaccttgatcgcccgcagcaggtact

SEQ ID NO: 1986 - DNA, 527 bp, Homo sapiens
tcggcacgagggtggacccacctggggttcatggagtgggccacggggcccagccctaagcactgctgcgcccagggtcgccgcgcctcctgctgaggggtccccgtgccactggctctcaccattgccctcgcctgccgatggcctctgctgcccagcctggggccagctctaccgcctgagccccctgccccactccaggactcaccgtaccccgatggggtcgtgtccccagccttctctgcagtcccttctgccctgccgggcccgtcgggaggcgccatggctcggatgaaccgcccggccccggtggaggtgagctacaaacacatgcgcttcctcatcacccacaaccccaccaacgccacgctcagcaccttcattgaggacctgaagaagtacggggctaccactgtggtgcgtgtgtgtgaagtgacctatgacaaaacgccgctggagaaggatggcatcaccgttgtggactggccgtttgacgatggggcgcccccgcccggcaaggtagtgga

SEQ ID NO: 1987 - DNA, 406 bp, Homo sapiens
agtccaaacccacacggtttatttggggggggggccaagggggccccggtggccaaaaaggggaaatttttcaaagcccccggggacggcaactttttttattagggagggccccaggacacctgggccggggaagcccccccccccacaaagtccctggccggggagatgggaggccagcccccctgggccagggaatccaaaatgaactcccccgggcccacccccacctcggaaggggggtgggggcaaccaccaccatttttttttccttaataaaaaggttggggatctgccctgccgcgggtgggagttcttacccggacgtggatatcacaattcctccacagggggccttgtgggtaaaattgtggccaaactgggggccaacaaaatcccccacccc

SEQ ID NO: 1988 - DNA, 253 bp, Homo sapiens
tttttttttgaattttaaagtttatttactttgaagtaaccaacttaaaaaatggcctgagttaagtgtattaaaaagaagaaatagtcgtaagatggcagtataaattcatctctgcatgtagaaaccggaaaaaaagcaagttcagtacttcaccaaaaaatttcaacattgcaaacacaggaaattgagaactgacaaacagaaatactaggaaatgcaaagtcttgaagctccaaaacaaaaacagcaa

SEQ ID NO: 1989 - DNA, 565 bp, Homo sapiens
ccgcctggtgcagtaccgcggcgaggtgcaggccatgctcggccagagaccgaggagctgcgggtgcgcctcgcctcccacctgcgcactgcgtgcgggccgccactgtgggctccctggccggccagccgctacaggagcggcccaggctggggcgagcggctgcgcccggtatggaggagatgggcagccggacccgcgaccgcctggacgaggtgaaggagcaggtggcggaggtgcgcgccaagcatggaggagcaggcccagcagatacgcctgcaggccgaggccttccaggcacgcctcaagagctggttcgagcccctggtggaagacatgcagcgccagtgggccgggctggtggagaaggtgcaggctgccgtgggcaccagcgccgcccctgtgcccagcgacaatcactgaacgccgaagcctgcagccatgcgaccccacgccaccccgtgcctcctgcctccgcgcagcctgcagcgggagaccctgttcccgccccagccgtcctcctggggtggaccctagtttaataaagattcaccaagtttcacgc

SEQ ID NO: 1990 - DNA, 625 bp, Homo sapiens
ttcggcacgaggcacaaggcagacatcagctcctggttcaacgaggccattgacttcatagactccatcaagaatgctggaggaagggtgtttgtccactgccaggcaggcatttcccggtcagccaccatctgccttgcttaccttatgaggactaatcgagtcaagctggacgaggcctttgagtttgtgaagcagaggcgaagcatcatctctcccaacttcagcttcatgggccagctgctgcagtttgagtcccaggtgctggctccgcactgttcggcagaggctgggagccccgccatggctgtgctcgaccgaggcacctccaccaccaccgtgttcaacttccccgtctccatccctgtccactccacgaacagtgcgctgagctaccttcagagccccattacgacctctcccagctgctgaaaggccacgggaggtgaggctcttcacatcccattgggactccatgctccttgagaggagaaatgcaataactctgggaggggctcgagagggctggtccttatttatttaacttcacccgagttcctctgggtttctaagcagttatggtgatgacttagcgtcaagacatttgctgaactcagcacattcg

SEQ ID NO: 1991 - DNA, 160 bp, Homo sapiens; identical to SEQ ID NO: 1119

SEQ ID NO: 1992 - DNA, 339 bp, Homo sapiens; identical to SEQ ID NO: 274

SEQ ID NO: 1993 - DNA, 146 bp, Homo sapiens
gagaagacgacagaagggaagtagacattgaatgcttatggctcctgattctgaaggagctggctgtaaagaggcttgggcggatgtgctttgaagttatggatattacatatctcacgaaaaaatattaaaataaacagtgctgg

SEQ ID NO: 1994 - DNA, 403 bp, Homo sapiens
cacggcggcagccctttaaacccctcacccagccagcgccccatcctgtctgtccgaacccagacacaagtcttcactccttcctgcgagccctgaggaagccttctttccccagacatggccaacaagggtccttcctatggcatgagccgcgaagtgcagtccaaaatcgacaagaagtatgacgaggagctggacgagcggctggtggagtggatcatagtgcactgtggccctgatgtgggccgcccagaccgtgggcgcttgggcttccaggtctggctgaagaatggcgtgattctgatcaagctggtgaacagcctgtaccctgatggctccaagccggtgaaggtgcccgagaacccaccctccatggtcttcaagcagatggagcaggtggctc

SEQ ID NO: 1995 - DNA, 591 bp, Homo sapiens
  misc_feature 470: n = A,T,C or G
ggcgcgcgggccgcgcccccgacgccctacatatactcaggtgcgccccacctgtccgcccgcacctgctggctcacctccgagccacctctgctgcgcaccgcagcctcggacctacagcccaggatactttgggacttgccggcgctcagaaacgcgcccagacggcccctccaccttttgtttgcctagggtcgccgagagcgcccggagggaaccgcctggccttcggggaccaccaattttgtctggaaccaccctcccggcgtatcctactccctgtgccgcgaggccatcgcttcactggaggggtcgatttgtgtgtagtttggtgacaagatttgcattcacctggcccaaaccctttttgtctctttgggtgaccggaaaactccacctcaagttttcttttgtggggctgccccccaagtgtcgtttgttttactgtagggtctcccgcccggcgcccncagtgttttctgagggcggaaatggccaattcgggcctgcagttgctgggcttctccatggccctgctgggctgggtgggtctggtggcctgcaccgccatcccgcagtggcagatgagct

SEQ ID NO: 1996 - DNA, 467 bp, Homo sapiens
gagtccgacgccgactgaggcacgagcgggtgacgctgggcctgcagcgcggagcagaaagcagaacccgcagagtcctccctgctgctgtgtggacgacacgtgggcacaggcagaagtgggccctgtgaccagctgcactggtttcgtggaaggaagctccaggactggcgggatgggctcagcctgtatcaaagtcaccaaatactttctcttcctcttcaacttgatcttctttatcctgggcgcagtgatcctgggcttcggggtgtggatcctggccgacaagagcagtttcatctctgtcctgcaaacctcctccagctcgcttaagatgggggcctatgtcttcatcggcgtgggggcagtcactatgctcatgggcttcctgggctgcatcggcgccgtcaacgaagcccgctgcctgctggggctgtactttgctttcctgctcctgatcctcattg

SEQ ID NO: 1997 - DNA, 503 bp, Homo sapiens
tcggcacgagtgctttcggtccgccggacacaccggacagatagacgtgcggacggcccaccaccccagcccgccaactagtcagcctgcgcctggcgcctcccctctccaggtccatccgccatgtggcccctgtggcgcctcgtgtctctgctggccctgagccaggccctgccctttgagcagagaggcttctgggacttcaccctggacgatgggccattcatgatgaacgatgaggaagcttcgggcgctgacacctcaggcgtcctggacccggactctgtcacacccacctacagcgccatgtgtcctttcggctgccactgccacctgcgggtggttcagtgctccgacctgggtctgaagtctgtgcccaaagagatctcccctgacaccacgctgctggacctgcagaacaacgacatctccgagctccgcaaggatgacttcaagggtctccagcacctctacgccctcgtcctggtgaacaacaagatctc

SEQ ID NO: 1998 - DNA, 466 bp, Homo sapiens
ttcggcggctgttgtgtcgggagcctgatcgcgatggggacaaaggcgcaagtcgagaggaaactgttgtgcctcttcatattggcgatcctgttgtgctccctggcattgggcagtgttacagtgcactcttctgaacctgaagtcagaattcctgagaataatcctgtgaagttgtcctgtgcctactcgggcttttcttctccccgtgtggagtggaagtttgaccaaggagacaccaccagactcgtttgctataataacaagatcacagcttcctatgaggaccgggtgaccttcttgccaactggtatcaccttcaagtccgtgacacgggaagacactgggacatacacttgtatggtctctgaggaaggcggcaacagctatggggaggtcaaggtcaagctcatcgtgcttgtgcctccatccaagcctacagttaacatcccctcctctgccacca

SEQ ID NO: 1999 - DNA, 574 bp, Homo sapiens
acagaaggggactcatttggggggtcaagggacccgggcaatatagtattctgctcagtgtctggagatcatctacccaggctggggcttctgggacaggcgaggacccacggaccctggaagagctggtccaggggactgaactcccggcatctttacagagcagagcatgatcacattcctgccgctgctgctggggctcagcctgggctgcacaggagcaggtggcttcgtggcccatgtggaaagcacctgtctgttggatgatgctgggactccaaaggatttcacatactgcatctccttcaacaaggatctgctgacctgctgggatccagaggagaataagatggccccttgcgaatatggggtgctgaatagcttggcgaatgtcctctcacagcacctcaaccaaaaagacaccctgatgcagcgcttgcgcaatgggcttcagaattgtgccacacacacccagcccttctggggatcactgaccaacaggacacggccaccatctgtgcaagtagccaaaaccactccttttaacacgagggagcctgtgatgctggcctgc

SEQ ID NO: 2000 - DNA, 629 bp, Homo sapiens
gtgacgttcaactccgctctggcccagaagaggccaagaaggacgagcccaagagcggcgaggaggcgctcatcatcccccccgacgccgtcgcggtggactgcaaggacccagatgatgtggtaccagttggccaaagaagagcctggtgttggtgcatgtgctttggactagcatttatgcttgcaggtgttattctaggaggagcatacttgtacaaatattttgcacttcaaccagatgacgtgtactactgtggaataaagtacatcaaagatgatgtcatcttaaatgagccctctgcagatgccccagctgctctctaccagacaattgaagaaaatattaaaatctttgaagaagaagaagttgaatttatcagtgtgcctgtcccagagtttgcagatagtgatcctgccaacattgttcatgactttaacaagaaacttacagcctatttagatcttaacctggataagtgctatgtgatccctctgaacacttccattgttatgccacccagaaacctactggagttacttattaacatcaaggctggaacctatttgcctcagtcctatctgattcatgagcacatggttattactgatcgcattgaaaacattgat

SEQ ID NO: 2001 - DNA, 466 bp, Homo sapiens
agtccatcttgaagatctcccaacctcaggagcctgagcttatgaatgccaacccttctcctccaccaagtccttctcagcaaatcaaccttggcccgtcgtccaatcctcatgctaaaccatctgactttcacttcttgaaagtgatcggaaagggcagttttggaaaggttcttctagcaagacacaaggcagaagaagtgttctatgcagtcaaagttttacagaagaaagcactcctgaaaaagaaagaggtatgacatgtgcttgatggggctggcattggcggtagacactccttgaataatcttgattctggaatgttggtgccaaggtgaaacatgccactaaatctgaatcgtcattttcctaagagaagcatattatgtcggagcggaatgttctgttgaagaatgtgaatcaccctttcctggtgggccttcacttctctttccagactgctgac

SEQ ID NO: 2002 - DNA, 508 bp, Homo sapiens
tggatcccccgggctgcaggaattcggcacgaggagaaccggaggctggagagcaaaatccgggagcacttggagaagaagggaccccaggtcagagactggagccattacttcaagatcatcgaggacctgagggctcagatcttcgcaaatactgtggacaatgcccgcatcgttctgcagattgacaatgcccgtcttgctgctgatgactttagagtcaagtatgagacagagctggccatgcgccagtctgtggagaacgacatccatgggctccgcaaggtcattgatgacaccaatatcacacgactgcagctggagacagagatcgaggctctcaaggaggagctgctcttcatgaagaagaaccacgaagaggaagtaaaaggcctacaagcccagattgccagctctgggttgaccgtggaggtagatgcccccaaatctcaggacctcgccaagatcatggcagacatccgggcccaatatgacgagctggctcgga

SEQ ID NO: 2003 - DNA, 253 bp, Homo sapiens
gagtgtcacaggggaactttattgagaggaaacatggtcacacccagcagacatgctttccctcaatctcggtcttgcactggcgcgcgcgacacacacacacacacacacacacacacacacacacccatctccagcccctgccactgtccagttctcagccacaaggggggacactcctcaattcctacgatcagaggcagcaggggcaggagggaggcaagaggaggggagaagtagcctggtcctgggg

SEQ ID NO: 2004 - DNA, 438 bp, Homo sapiens
tagtggatcccccgggctgcaggaattcggcacgagcacagatcagcatgggaacaggggtcacagtggacacaagggtgggctgtctctccacctcctcacattatgctaacagggacgcagacacattcaggtgcctttgcagaaagagatgccagaggctcttgaagtcacaaaggggaggcgtgaagaaatcctgcatctcggtccctcacaagacagctgtctcaggcttttcaagctgtgagagacacatcagaaccctgggcactgtcgctggacgcagcctgagagtagctccctccttttccacctgagctcttcctcctacacatcacagtagcgaccacagctccgatgaccacaactgctaggacagccaggccagcaacaatgcccacgatggggatggtggactgggaagatggctcccatctc

SEQ ID NO: 2005 - DNA, 509 bp, Homo sapiens
ctgctaaggtgcatttattgaaaacagtgtatgctatgcactctgttaagtgctatgcatctattagttaatcttttcctcatcagacttttacgaggtaggtaaggtatagcatttccatcttatgaagaaactgaagttcgaagagatgaagtcacctgcccagcactgcaaactagtaagtgatagagcctggattcggtctgtgttctgaccactctcttgctccatctctttaaagagagtgaaaagggggtgaagatacctgctctattgcccagtaatggataggccgagcagtgggggatgggaggaaggaaaggagaaatggctgctttcatcggaggatcgtcctctgctactgactgcccacagctggtggtgctggggctgaggagccaaattcagttcctcactccggtgaccctctggatccagtccttgttgtggtggatgtaagagtatactccgtagcggtccttcttcccacagtcatcaccccaggacac

SEQ ID NO: 2006 - DNA, 374 bp, Homo sapiens
tggatcccccgggctgcaggaattcggcacgagggacagcaaggacagcacctacagcctcagcagcaccctgacgctgagcaaagcagactacgagaaacacaaagtctacgcctgcgaagtcacccatcagggcctgagctcgcccgtcacaaagagcttcaacaggggagagtgttagagggagaagtgcccccacctgctcctcagttccagcctgaccccctcccatcctttggcctctgaccctttttccacaggggacctacccctattgcggtcctccagctcatctttcacctcacccccctcctcctccttggctttaattatgctaatgttggaggagaatgaataaataaagtgaatctttg

SEQ ID NO: 2007 - DNA, 511 bp, Homo sapiens
ggattgcaaaatttattaaaattggagacactgttttaatcttcttgtgccatgagactccatcaggcagtctacaaagaccactgggaggctgaggatcacttgagaccagaagtttgaaggctgtagtaagcttcaaaggccactgcactctaacatgagagaagaaaaaccatacaaacaaaagaagaaagaaagaaaaaaaaagacaaaaaaaacctagaaaaagataacaagactgcctacaatacaacaaacaagaaaacagagaccaaagaaacaaaaaaacatacaccacacaataaagaagagacaacacaccaaaccgaaacaaaacaaccaaagaaaaaaacaaaaccaagagaaaaacgaaaaaacaaaaccaaacagaaaaacaccacgaaaacataaccaaaaacaagacaaaagcaaaaaaccaaggcaagagaaaggcaagcacaataggactacagaaatcaaatcaaccttcctatgaggaaacacatgtcca

SEQ ID NO: 2008 - DNA, 563 bp, Homo sapiens
tggatcccccgggctgcaggctcctgtgtgcctgcctcctgccgccgccaccatgaccacctccatccgccagttcacctcctccagctccatcaagggctcctccggcctggggggcggctcgtcccgcacctcctgccggctgtctggcggcctgggtgccggctcctgcaggctgggatctgctggcggcctgggcagcaccctcgggggtagcagctactccagctgctacagctttggctctggtggtggctatggcagcagctttgggggtgttgatgggctgctggctggaggtgagaaggccaccatgcagaacctcaatgaccgcctggcctcctacctggacaaggtgcgtgccctggaggaggccaacactgaactggaggtgaagatccgtgactggtaccagatgcaggccccggggcccgcccgtgactacagccagtactacaagacaattgatgagctgcagaacaagatcctcacagccaccgtggacaatgccaacatcctgctacagattgacaatgcccgtctggctgctgatgacttccgca

SEQ ID NO: 2009 - DNA, 510 bp, Homo sapiens
tcggcacgagggccctgaaattttattgggtcagggacctcctcagcagccgccacagcagcatagagtactccagcaactacagcagggagattggagattacagcaactccatttacagcatcgtcatcctcaccagcagcagcagcagcagcagcagcaacagcaacagcagcagcagcaacagcaacagcagcagcagcagcagcagcagcagcaccaccaccaccaccaccaccacctacttcaagatgcttatatgcagcagtatcaacatgcaacacagcagcaacagatgcttcaacaacaatttttaatgcattcggtatatcaaccacaaccttctgcatcacagtatcctacaatgatgccgcagtatcagcaggctttctttcaacagcagatgctagctcaacatcagccgtctcaacaacaggcatcacctgaatatcttacctcccctcaagagttctcaccagccttagtttcctacacttcatcacttccagc

SEQ ID NO: 2010 - DNA, 435 bp, Homo sapiens
  misc_feature 2, 3, 20, 25, 69, 365, 393, 426, 431: n = A,T,C or G
annttcaagcatttgtttcntcttncccacgccattgaagaggctgacgattataataattacaatganttacagaaggaggtgggatctcagtcctccagggtcagggactcttaaactacctcctttctctctttgctcagctctgccccatacccctgtctcagtgtttcttcctttcctcaaaatcctcaacagagaggccagagctgggcaggtgtggggtatgggttagccagaggtgtgctggggtcaggccacctcgccggtggaattccgccttttctcacacacccagcggtacacctgcaggcagaagtcatcgttccagcggccatccggctggacttcaacacagttttcanttccacccagctcgtgcccgtgccaatnatctggttgagtgacagcccagtttcgtgtagntggtngccc

SEQ ID NO: 2011 - DNA, 443 bp, Homo sapiens
tcggcacgaggtttttttttttttttttatgggccttttggggggataatgacctacccttggccggggcccaaaccttttgaaaaatgtttgattccaggctaaaaaccatttttaaacaaaattggttttttgcaccccccacaaacccccaggaaaagggcccctccggggccttccccacccaggccaacaaagcgttgggggcccgttaaaccgtcccaggcattcctttgatgacccaacccccccccccttttgggcccaaaccaggacaaataaattttcaacaggggcctgccttgtaaccaaaaattactcattttcacaccccctgaatgcaaggaaagggggcccccccaaaaccaacttgccccccaaggggggtccccccacggttctggaaaatgcttccctcaggtatttcacaggggcaatccccc

SEQ ID NO: 2012 - DNA, 622 bp, Homo sapiens
  misc_feature 587, 608, 619: n = A,T,C or G
ttttttaaaatcacaaatagttatttattagtcatcagtgaatggaaatgaatgcacatcaacttttttatttattggaaacaaacactcaatatcctgtaaaactaagaaaacaggtatttttgctaagtaatgtatctttaaaagtaaaaagtgtgtatattctctctgatatttagaataatgcaattgtacaggatcctttcccaaattattcttttctctaaaatgacagctagaaaggaaccctttgttctgtcttgccgttggtcattttagatgtcttttcttcaatggagtgaatccttgatgaaagaactttaccacgttgatctagctcttcaaccactgtctttaccagtgtggttttggataaatctttagatgaattcccagggcttcctgatccaaagccctttgatttggagcatgaatttccatctccatctatcaggcggcagtaggtctcaatttctttttccaagtggaccttgacatcgaggagatgctcatactccagcttctggcctcggctcgggtctgactggtgaagtgtcctccagggcccgtctgagcctgattggcanggcgtacagaagtgccccggnttggtaagganctc

SEQ ID NO: 2013 - DNA, 387 bp, Homo sapiens
tcggcacgaggtttttttttttttttttatgggcctttttgggggataatgacctacccttggccggggcccaaaccttttgaaaaatgtctgattccaggctaaaaaccatttctaaacaaaactggttttttgcaccccccacaaacccccaggaaaagggcccttccggggccttccccacccaggccaacacagcgctgggggcccgttaaaccgtcccaggcattcctttgataacccaaaccacccccccttttgggcccaaaccaggacaaataaattttcaacagggccctgccctgtaaccaaaaattactcactttcacaccccctgaatgcaaggaaagggggtccccccaaaaccaacatgccccccaagggggg

SEQ ID NO: 2014 - DNA, 563 bp, Homo sapiens
  misc_feature 134: n = A,T,C or G
cggcacgaggcccatacccgctgcaggcagcagcagcccccgcccgcgcagcagcatggagctctggggggcctacctcctcctctgcctcttctccctcctgacccatgtcaccaccgagccaccaacccagnaagcccaagaagattgtaaatgccaagaaagatgatgtgaacacaaagatgtttgaggagctcaagagccgtctggacaccctggcccatgaggtggccctgctgaaggagcatcaggccctgcacacggtctgcctgaaggggaccaatgtgcacatgaaatgctttctggccttcacccagacgaagaccttccacgaggccagcgaggactgcatctcgcgcgggggcaccctgagcacccctcagactggctcggagaacgacgccctgtatgagtacctgcgccagagcgtgggcaacgaggccgagatctggctgggcctcaacgacatggcggccgaaggcacctgggtggacatgaccggcgcccgcatcgcctacaagaactgggagactgagatcaccgcgcaacccgatggcggcaag

SEQ ID NO: 2015 - DNA, 459 bp, Homo sapiens; identical to SEQ ID NO: 1664
  misc_feature 219, 289, 318, 422, 442: n = A,T,C or G

SEQ ID NO: 2016 - DNA, 356 bp, Homo sapiens
  misc_feature 259, 293: n = A,T,C or G
caccattgagggctccatgttgcatgagctgctccggctgcaggagatccagctggtgggcgggcagctggccgtggtggagccctatgccttccgcggcctcaactacctgcgcgtgctcaatgtctctggcaaccagctgaccacactggaggaatcagtcttccactcggtggcaacctgggagacactcatcctgggactccaacccgctggcctgcgactgtcggctcctgtggggtgttccgggcgccgtggncttccagactttcaaccgggcagcagcccacgtncgccacgcccgagtttgtccagggggcaagggagtttcaaagggatttccctggatgttgtta

SEQ ID NO: 2017 - DNA, 502 bp, Homo sapiens
cggcacgagggaaagggactttgaggcgggtgtttttgaactaaaagcaattgttaacagcatcaaaagaagcagaaaaattatttttgttataacacaccatctattaaaagacccattatgcaaaagattcaaggtacatcatgcagttcaacaagctattgaacaaaatctggattccattatattggttttccttgaggagattccagattataaactgaaccatgcactctgtttgcgaagaggaatgtttaaatctcactgcatcttgaactggccagttcagaaagaacggataggtgcctttcgtcataaattgcaagtagcacttggatccaaaaactctgtacattaaatttatttaaatattcaattagcaaaggagaaactttctcaatttaaaaagttctatggcaaatttaagttttccataaaggtgttataatttgtttattcatatttgtaaatgattatattctatcacaattacatctcttct

SEQ ID NO: 2018 - DNA, 231 bp, Homo sapiens
  misc_feature 95: n = A,T,C or G
agatctcagtggaaagcccaacagtaacaggtgcacccacgggctccaggggaaggggccccaacccctggtgaaggaggtcggggcagagcagnctcccccagctggggttgcaggggtgaggggagacccccctgtaggcccgtcctgcggggctaaggagggggcacgggggtgggacaggttgggggtggggggcaggccagggaaatggaggaactcgggccaagt

SEQ ID NO: 2019 - DNA, 376 bp, Homo sapiens
  misc_feature 106, 320, 360: n = A,T,C or G
gattcggaacgagggattggctgcaaccatcccctaccaggacccggcccctacaggtgaagttcctggtgatgaatgacaaaggacccgtggctgaaaccaagtngtccagcgacactcgcctgcagcaagcccaggcacttcgggctgtccccggcccccagagcccgggcaccgtggtcatcatcgccatcctgtctatcctcctggccgtcctcctcacggtcctcctggctgtgctcatatacacctgcttcaacagctgcaggagcacttccctatcaggcccagaggaggcagggagtgtgagaagatacacnacgtaccttcgcgtttagcacttcctgccgagggggcttnctgaggggtttcagag

SEQ ID NO: 2020 - DNA, 422 bp, Homo sapiens
  misc_feature 380, 395, 409: n = A,T,C or G
ctgacgtggcgtccactggcccaggccacacataatttcctgcgtggcctccatttccacaaagactactttcagcatcctcacttctccacatggaaagctaccactctggatgggctccccaaccagctgacaccctcggagccccacctgtgcctgctggatgttggctacctcatcaataccagctgcctgcccctcctgcagcccactcgggacgtggacctcatcctgtcattggactacaacctccacggagccttccagcagttgcagctcctggggccggttctgccagggagcaggggatcccgttcccacccatcttcgcccagccccgaagaggcagctccagccttggggagttgccacactttttncggaccccacctggncccgggagccctgngggtggtggcatt

SEQ ID NO: 2021 - DNA, 431 bp, Homo sapiens
attcggcacgcagggaatggctcccgcaaagaagggtggcgagaagaaaaagggccgttctgccatcaacgaagtggtaacccgagaatacaccatcaacattcacaagcgcatccatggagtgggcttcaagaagcgtgcacctcgggcactcaaagagattcggaaatttgccatgaaggagatgggaactccagatgtgcgcattgacaccaggctcaacaaagctgtctgggccaaaggaataaggaatgtgccataccgaatccgtgtgcggctgtccagaaaacgtaatgaggatgaagattcaccaaataagctatatactttggttacctatgtacctgttaccactttcaaaaatctacagacagtcaatgtggatgagaactaatcgctgatcgtcagatcaaatagagttataaaattgc

SEQ ID NO: 2022 - DNA, 309 bp, Homo sapiens
gcaaagggaactttattgagggaaaaagaaaagggggggcccccaaggcccccccccccttaaaggggtcaaaatggaaactggaagggggggaaattcaatgtggggggggactgagtggggaagggaccccccaaaaaggagggtcccccccttccccttgggcccttgcgggggcggggggcccaggggtctaaccccttggaggccaagggggccaagagggccaccaccccgttggtgtagcaaaaatcggtgtcaaaccagaaaaaaaggctaaaaaagggggtcttgggggcaatgcacccc

SEQ ID NO: 2023 - DNA, 454 bp, Homo sapiens
  misc_feature 393: n = A,T,C or G
accgcctggactgacccgcatggcctgcgttgacatcaacgagtgtgatgaggccgaggctgcctccccgctgtgcgtcaacgcgcgttgcctcaacacggatggctccttccgctgcatctgccgcccgggattcgcacccacgcaccagccgcaccactgtgcgcccgcacggccccgggcctgagccctggcacccgctggccgcccacccgcgcccgccactcggggcccctgccgcgcatcctgcagcccgcttatgcgtatgtgcacggggccgcccgcctggacctggagaagggacctacggacgcctggaagctgcgacgccctgcactgctcccgcctccaccagcgcctcccactgatgtcgtggtcccgggcctggcccangggcccctttacatgccctctcccttttataaaattttccattaaaaaccacctattttct

SEQ ID NO: 2024 - DNA, 404 bp, Homo sapiens
ggcgagtgcctgccgagagccaccagcacctctccaaggagtcgctggcggggaacaagccggccaacgccgtcctgcacaaggttctgaaccagctggaggagttgctgagcgacatgaaggcggacgtgacccgcctgccagccacgctgtcccgaataccccccatcgcagcccgccttcagatgtccgagcgcacgatcctcagccggctggcagcaagggcacggagcctcaccccacaccggcctacccgccgtgtccctacgctacacctccggggtacggggcggccttcagcgcgacccgtagggcacctggcgccgcacgcaattacagccagatgcctgcagggtccttcatcaagccgcacaacggcctcagtgcttgtgaaaagagaagaa

SEQ ID NO: 2025 - DNA, 574 bp, Homo sapiens
  misc_feature 388: n = A,T,C or G
tcggcacgaggctgagaactcaagtcagctggacttcgaagagtatggaattcttcctatggtgtgaatgattccttcccagatggagactatgatgccaacctggaagcagctgccccctgccactcctgtaacctgctggatgactctgcactgcccttcttcatcctcaccagtgtcctgggtatcctagctagcagcactgtcctcttcatgcttttcagacctctcttccgctggcagctctgccctggctggcctgtcctggcacagctggctgtgggcagtgccctcttcagcattgtggtgcccgtcttggccccagggctaggtagcactcgcagctctgccctgtgtagcctgggctactgtgtctggtatggctcancctttgcccaggctttgctgctagggtgccatgcctccctgggccacagactgggtgcaggccatgtcccatgcctcaccctggggctcactgtgggaatttggggagtggctgccctactgacactgcctgtcaccctggccagtggtgcttctggtggactctgcaccctgatatacagcacgg

SEQ ID NO: 2026 - DNA, 515 bp, Homo sapiens
caaggatcccatcttgcacgtgctgcggagtacctggatccggcccagcgtggcgtccgcgtcctcgaggtggcctcgggctccggccagcacgcagcgcacttcgccggggccttccccctggccgagtggcagccgtcggacgtggaccagcgctgcctggacagcatcgcggccaccacgcaagcccagggcctgaccaacgtgaaggcccgctacacctggacgtgacgtggggctgggagcactggggcgggatcctgccacagtcgctggacctgttgctctgcatcaacatggcccatgtcagccccctgcgctgcacggaggggctcttcagagcagcaggacacctgctcaaacccagggccctgctcatcacctacgggccctatgccatcaatgggaagatctccccccagagcaacgtggactttgacctgatgctcagatgcaggaacccagaatgggggcttcgggacacagccctcctggaggacctgggaaaggccagt

SEQ ID NO: 2027 - DNA, 533 bp, Homo sapiens
tcggcacgagggcgtcgctccccctcgccttctcggccgccctcccggtttaccgccccctgtgtccagagatcacagatggagagacattttgccacacgatgaatcacacaccacatctcatcctcgagcttcagctgcaggacaatgctgccagaggcctggtcctcagagctcacgtaagcatctctggtgtgcagtatttttactccgtttttgaccaaagacacctgaacattcctggagaaaacagtgatgtggatcttatcaaatttaatgggcacatctgaagaaggaaacttgctcagcaccgtgagccccacagtgaaagcactttttggcaagactagagtctcaccgatttttcctttctctcctcgatctcctttccagcctcttattccccggactcctggctcaccctggggccccgtgggtccagcttctcccttgggaccaggctttccaatagggcccatggggcccggtaaaccagttgggcccaaaggcccaatgttgccccttggcccctc

SEQ ID NO: 2028 - DNA, 618 bp, Homo sapiens
  misc_feature 85, 515: n = A,T,C or G
tcggcacgaggggccatccaagatggcatgaatcgggctaaggtccctgggggtgcagatggtactgctgaggtcccgggcttantgtgagcatcttgccagcctcaggcttgagggagggctgggctagaaagaccactggcagaaacaggaggctccggccccacaggtttccccaaggcctctcaccccacttcccatctccagggaagcgtcgccccagtggcactgaagtggccctccctcagcggaggggtttgggagtcaggcctgggcaggaccctgctgactcgtggcgcgggagctgggagccaggctctccgggcctttctctggcttccttggcttgcctggtgggggaaggggaggaggggaagaaggaaagggaagagtcttccaaggccagaaggagggggacaaccccccaagaccatccctgaagacgagcatccccctcctctccctgttagaaatgttagtgccccgcactgtgccccaagttctaggccccccanaaagctgtcagagccggccgccttctcccctctcccagggatgctctttgtaaatatcggatgggtgtgggagtgaggggttacctccctcgccccaaggttc

SEQ ID NO: 2029 - DNA, 556 bp, Homo sapiens
  misc_feature 366, 416, 461: n = A,T,C or G
cggcacgaggtctccaccgagtatgagctgcagcagctggagcagttcaagaaggacaacgaggaaacaggcttcggctcaggcacccgggccctggagcaagccctggagaagacgaaagccaacatcaagtgggtgaaggagaacaaggaggtggtgctccagtggttcacagaaaacagcaaatagtccccagcccttgaagtcacccggccccgatgcaaggtgcccacatgtgtccatcccagcggctggtgcagggcctccattcctggagcccgaggcaccagtgtcctcccctcaaggacaaagtctccagcccacgttctctctgcctgtgagccagtctagttcctgatgacccangctgcctgagcacctcccagcccctgcccctcatgccaaccccgccctangcctggcatggcacctgtcgcccagtgccctggggctgatctcanggaagcccagctccagggccagatgagcagaagctctcgatggacaatgaacggccttgctgggggccgccctgtaccctctttcacctttccct

SEQ ID NO: 2030 - DNA, 460 bp, Homo sapiens
  misc_feature 385: n = A,T,C or G
gtggcggaggccagccccgagcttgcccagcggtgcttcaggcagggaggggccaggcccgccagccaggcgaaggcgcaggcagcgcgcgcggggcgccgtaggcaccgggccaggcgggcagccgccctgggcccgggaccgcgtacgaagccgcagcggcacacgctgatgagcgcggcgaagaccaccgccgcataggtggacacgtagtaggtggccccggccgcgtggcaggcggcctccgggccaggcccaggtagtaggtgagccacagctgcagcgtgagcgtgaagaactcatcaaccagagccaggttgaacaggtagagaagcagggcctggcccaggcgcccgccgctgcggatgaacattgccagggccgncacgttggctggcagccccaggcccagtgccaaggcataggccgcgggcaccacgatgaagcgagcagggtcatc

SEQ ID NO: 2031 - DNA, 508 bp, Homo sapiens
  misc_feature 387: n = A,T,C or G
tcggcacgaggtcagcctgtgcaggtttatattgggaagctgtagaggaccaggacttgtgcagacgccacagtctccccagatatggaccatcagtgactcatgctggatgaccccatgctccgtcatttgacaggggctcaggatattcactctgtggtccagagtcaactgttcccataacccctagtcatcgtttgtgtgtataagttgggggaattaagtttcaagaaaggcaagagctcaaggtcaatgacacccctggcctgactcccatgcaagtagctggctgtactgccaaggtacctatgttggagtccagcctaatcaagtcaaatggagaaacaggcccagagaggaaggtggcttaccaagatcacataccanagtctggagctgagctacctggggtgggggccaagtcacaggttggccagaaaaccctggtaagtaatgagggctgagtttgcacagtggtctggaatggactgggtgccacggtggactt

SEQ ID NO: 2032 - DNA, 475 bp, Homo sapiens
atgtttccaaatttacttgattttcaagacttacactagaactgtgagaacagggtaataaataagcatatgtattaatatcacctttggtcaactcttgggtagccccaacggtagtgtaggaattaacgtaatttttcctactaaaagtattggatttgttttgagagaccacagttgaaaatcattgacatacaaagtttaaaaattgttaggttaaaaaattttaaatgcatttgaagtggttttatagaaaaataattatctaacttggtttatattgacaggttgttttcttggataagaactagacgaagagaaagggagattagtgataaatgtccaggttttcaagttgaaaagtaacaatcagtgtattacaacagatggatgtgatgtcaaattacaaatgctgaaaacgttatatgtaatcatgtagccagagtaatcatacaaggcaaagaacggaaaggca

SEQ ID NO: 2033 - DNA, 204 bp, Homo sapiens
gatatgggttagggattctccatggactccagaaaccctaaaatacaattttgaggttttccaataataccatagcagaaatgtccaaggggttgggggaagatattaccttgagaaaacagaaatgtaaaggatttttgaccttatatatgtgtgtggttttgtttttgtttttgttcttgagagagtctcactctgtcaccc

SEQ ID NO: 2034 - DNA, 271 bp, Homo sapiens
gggtggtgacgtggtagtcacttgtaaggggaacagaaacatttttgttcttatggggtgagaatatagacagtgcccttggtgcgagggaagcaattgaaaaggaacttgccctgagcactcctggtgcaggtctccacctgcacattgggtggggctcctgggagggagactcagccttcctcctcatcctccctgaccctgctcctagcaccctggagagtgcacatgccccttggtcctggcagggcgccaagtctggcaccatgtt

SEQ ID NO: 2035 - DNA, 500 bp, Homo sapiens
tacggctgcgagaagacgacagaagggtacggctgcgagaagacgacagaagggtacggctgcgagaagacgacagaagggtacggctgcgagaagacgacagaagggtacggctgcgagaagacgacagaagggtacggctgcgagaagacgacagaagggtacggctgcgagaagacgacagaagggtacggctgcgagaagacgacagaagggtacggctgcgagaagacgacagaagggtacggctgcgagaagacgacagaagggtacggctgcgagaagacgacagaagggtacggctgcgagaagacgacagaagggtacggctgcgagaagacgacagaagggtacggctgcgagaagacgacagaaggggaaagaggggtgggatccacactgagagagtggagagtgacatgtgctggacactgtccatgaagcactgagcagaagctggaggcacaacgcaccagacactcacagcaaggatggagctg

SEQ ID NO: 2036 - DNA, 415 bp, Homo sapiens
agctgattttcatgaaaatctgccactcagggtctgggatgaaggcttgccagcacttccagtttagaacgcaatgtttctagagacatattggctgtttgttttgatgataaaggagaataagattttgtgtgggtttcctggatccaggataatttttaaaccaatcaaatgaaagaaacaaacaaacaaaaaaggaaatgtcatgtgaggttaaaccagtttgcattcccctaatgtggaaaaagtaagaggactactcagcactgtttgaagattgcctcttctacagcttctgagaattgtgttatttcacttgccaagtgaaggaccccctccccaacatgccccagcccacccctaagcatggtcccttgtcaccaggcaaccaggaaactgctacttgtggacctca

SEQ ID NO: 2037 - DNA, 378 bp, Homo sapiens
gattattcctcacgatgacccgacagtctctgctttctttttcctttcttccagaaggagatttaaccatagtagaaagaatggagaactattaactgcctttcttctgtgggctgtgattttcagaggggaatgctaagaggtgagtgggggaagtcgattagagcctggttcacaatgcctgggaggacaggggctgaatcgctgagagtggtgagtgggcatgcagggagagtactcacccagagaaaggggtgtgtgcctgagggggtgcgcacgcacacatgtggacacatggaaaggggagaagtagtgcaaagaataaaggcctgcagagtttgggatttggtgaagaaatagtctaattgcatgttctta

SEQ ID NO: 2038 - DNA, 391 bp, Homo sapiens
gagccgccgcctgccctctccgctggccacctgctgccgcccgctccatggctggcaaagcacacaggctgagcgctgaggagagggaccagctgctgccaaacctgagggctgtggggtggaatgagctggaaggccgtgatgccatcttcaagcagtttcatttcaaagacttcaacagggcctttgggttcatgacaagagtggccctgcaggctgagaaactggaccaccatcctgaatggtttaacgtgtacaacaaggtccacatcacgctgagcacccatgagtgtgccggcctttcagaacgggacataaacctggccagcttcatcgaacaagtagcagtgtccatgacatagaccctgcccttcctctttgaattcttccg

SEQ ID NO: 2039 - DNA, 571 bp, Homo sapiens
gacagaggggcctttcctttcagcggagcgcggcggtaagatggcagtgcaaatatccaagaagaggaagtttgtcgctgatggcatcttcaaagctgaactgaatgagtttcttactcgggagctggctgaagatggctactctggatttgaggtgcgagttacaccaaccaggacagaaatcattatcttagccaccagaacacagaatgttcttggtgagaagggccggcggattcgggaactgactgctgtagttcagaagaggtttggctttccagagggcagtgtagagctttatgctgaaaaggtggccactagaggtctgtgtgccattgcccaggcagagtctctgcgttacaaactcctaggagggcttgctgtgcggagggcctgctatggtgtgctgcggttcatcatggagagtggggccaaaggctgcgaggttgtggtgtctgggaaactccgaggacagagggctaaatccatgaagtttgtggatggcctgatgatccacagcggagaccctgttaactactacgttgacactgctgtgcgccacgtgttgctc

SEQ ID NO: 2040 - DNA, 571 bp, Homo sapiens
cggcctacgctgcaagaagagacagaggggagccttgataaactagaagctcagctgaaagcttgcaactgccgactcatcttttcaaaagcaaaaccatctgtattagccttgtgccttctcaatttggaagtggaaactttgaaatctgttgaattactggaaattctcttgctagttaaaaaacattccaagattaatgacactgagttcttctactggagagagttggtttctaaatgcctagccgagtattcttctcctgaatgttgcaaaccagatcttaagaagttggtttggatcgtttcaaggcgcacagcccagaacctccacaacagctactatagtgttcctgagctgccaacgatacctgaggggggttgttttgatgaaagtgaaagtgaggactcttgtgaagatatgagttgtggagaggagagtctcagcagctctcctcccagtgatcaagagtgcgccttctttttcaacttcaaagtggcacaaacactgtgctttccatcttagaaatctgattgttctgtcagaatttatatttacaggtttcaaagca

SEQ ID NO: 2041 - DNA, 338 bp, Homo sapiens
gaaagtaggcagggctgtgttcctttgtgtagtctgtatatattttccatatgtagagccctgattaacttcaaggacaaacactggctggagaaagccagactgatgggaatgagactttggccaaaaatcccaaaacatcattttcaatcagtagagaagtgcttagggttgaaaattgatttcatttgctactgaatttggtaaatcctgggtaacttttatcaagatgaagacattttaccctacctactctagaaatatacaacaatgttatattttacactccttggaaacatttgaggaaaaaaatgcaatttgcacttcactttgttgga

SEQ ID NO: 2042 - DNA, 551 bp, Homo sapiens
gtcaaactatacagctgtctgtcctacagttttttattatggtgtagctgtatttaaatacaaagagggccaggtgcagtggctcacacctgtaatcccagcagtttaggaggccaaggcaggggatcacttgaggtcaggagttcaagaccaccttggccaacatgatgaaaccccatctctactaaaaatacaaaaattagctgggcatgatggcacaagcctgttatcccagctacttgggaggctgagacaggagaatcacttgaaccctggaggtggaggttgcagtgagccgagattttgccattgcactctagcctggacaacagagcgagacttcatctcaaaataaataagtaaataataaaaataaaaagagatctaattgcatctgtcttttaaaattgacttatcttttaagttatttgacatgttttatagtttttataaaagtcgtaggaataggaaaaggatttacatatatcccttttcgcatctgaaagctgactaaataaccagtattacaggctggtcatagtggctcacgc

SEQ ID NO: 2043 - DNA, 506 bp, Homo sapiens
agttaaaaacatgccattttcatttctaacattttaagtatatggtttagaagtggtaagtatagttctatttttttttgcaataggttttaaataatttttgtcttacaaaagtaaaagtgaatactcattaattctgaaacaagttagttagcttgctttatttaaatagcaagaaaagggtccctggaaagtccctggcccttgggtcagtgtctcatccctgcataatataaaaggaatcctggaaaaaatcaagctgcagacactaacaaggtaactagcacatggtgttgtgcttggaaacctgcccatggctgcacagacagaaaaacctctggcatatttggataaaaacttgtacaaacctccagctcactgagataagggaacaagaccgacctggcataaaaatgcctttgtttgtccaggcacagtggctcatgcccgtaattccagcaatttgggaggcagaagtgggcggatcacctgaggtcgggagttcg

SEQ ID NO: 2044 - DNA, 660 bp, Homo sapiens
acctgcccaaagcataatgcgaagcaaggtccagctgttccgcccgtcatacaagcttatggagcagccccctttgaagatgtccaggtggacttcacagagatgccaaagtgtggaggtaatcgagtgtggatcaaggactggaacgtaacttctttgtgcccacggtggaaagaccgtagtctgtcgtcctgaccactcccaccgctgtgaaggtagagggaatcccagcctggatccaccacagccgtgtaaaacctgcagcacctgaaacctgggaggcaagaccaagcccagacgacccttgcagagtgaccctgaggaagacgacaagccctgctccagtcacacccagaagctgactggtccacgcacggccgaagcatgaggaagctcatcgtgggattcatttttcttaaattctggacttacacagtaagggcttcaactgaccttactcaaactggggactgttcccagtgtattcatcaggtcactgaggtaggacagcaaattaaaacaatctttctgttctatagttattatgaatatatgggaatgttaaaagaaacttgtttgtataatgccactcagtacaaggtatgtagcctgggaaatgaccgacctgatgtgtgttataacccatctgagccccctgca

SEQ ID NO: 2045 - DNA, 495 bp, Homo sapiens
atttggttaatggctccgttttcagcattgcaaataacaatctcagctactgggatgcccccctgggaagttcttatatgtgcaacaaagagcagactgtttcagtgtctggagcatttcagataaatacctttgatctaagggtccagcctttcaatgtgacacaaggaaagtattctacagctcaagactgcagtgcagatgacgacaacttccttgtgcccatagcggtgggagctgccttggcaggagtacttattctagtgttgctggcttattttattggtctcaagcaccatcatgctggatatgagcaattttagaatctgcaacctgattgattatataaaaatacatgcaaataacaagattttcttacctctcagttgttgaaacactttgcttcttaaaattgatatgttgaaactttaattcttttatcaatcccagcattttgagatcagtctttattaataaaacctgttctctttaatc

SEQ ID NO: 2046 - DNA, 451 bp, Homo sapiens
atggaagcattagagagaaagagagaatttccaatctatgggtatcataggtggtttcttggaggaaagtggaactgaactaagcctcgaagttggtaaggaacagatggttggctatggtagggtggagaaaagcagagttgcagaattctcttatgttgtagtcccaaattaatagtaatgtactagattttcttctcctctcttgtgaatttccagcaacagcttgattttaacctccacagaaacacaaatgagagctgtgatggaaacaataattactagagtccagttttaactccaagtcaaaattttagtcacattcagccctgaataagaaataaggcaaagcatgcaacaggactttataactttttaattttaaggcattataaatataaatttttattttatcttatttttttagagatggggtcttgctctgttgccc

SEQ ID NO: 2047 - DNA, 292 bp, Homo sapiens
gattagggggctaagcatttagttactgcatggggcagccaataataaaatcacagccctgtgtatttacctccacagtgtgtgctgataagtgcaaaaggtttgtgcaaattcttttgaagttatattgtaaccatggtatatgtattgaaaacttggccattttaccccattcctatgaatgaaaactatttggtgaatcagaggatagtctgaattgggatatgaaggccagtataagtgtcagttagcaaagtcagctctagtttagttttttttttttttttttaag

SEQ ID NO: 2048 - DNA, 487 bp, Homo sapiens
tactgggagcgcctgctggccaaggaatgcaggctgtactatctgcgaaatggagaacgtatttcagtgtcggcagcctccaagctgctgtccaacatgatgtgccagtaccggggcatgggcctctctatgggcagtatgatctgtggctgggataagaagggtcctggactctactacgtggatgaacatgggactcggctctcaggaaatatgttctccacgggtagtgggaacacttatgcctacggggtcatggacagtggctatcggcctaatcttagccctgaagaggcctatgaccttggccgcagggctattgcttatgccactcacagagacagctattctggaggcgttgtcaatacgtaccacatgaaggaagatggttgggtgaaagtagaaagtacagatgtcagtggcctgctgcaccagtaccgggaagccaatcaataatggtggtggtggcagctgggcaggtctcctc

SEQ ID NO: 2049 - DNA, 500 bp, Homo sapiens
agattttaattccacacatatactgtatatctctttatgtactatatgtatatctgtactttgtacataaaaaggctaagtatagagcttactgtttttattcaatacaggctcaagaagagccgaataaagcggggaagctgaaaattaaattaaaaattaaagacctattaataccaaatttagctttgcacctatacttgctgaataacttttcatgtaatttatttacttatatatatatatatatatatcatcacaatgtgtcaatttacatacataaattagcaattcataaaaaacaacagcaatataataaattcttataaaatcatttaaaacttatttttttcagaaaaaaattttaaaaacttctttaaaaatattcttagagaacttttaaaactttttgctagatatgagagaacaatttttaatttaaccagctaatagatgtacattcagatattgacattttttcctttcagcgcttgatataa

SEQ ID NO: 2050 - DNA, 429 bp, Homo sapiens
ggaactcctctgaccctttagaacaagcctacctaatatctgctagagaaaagaccaacaacggcctcaaaggatctcttaccatgaaggtctcagctaattcttggctaagatgtgggttccacattaggttctgaatatggggggaagggtcaatttgctcattttgtgtgtggataaagtcaggatgcccaggggccagagcagggggctgctgctttgggaacaatggctgagcatataaccataggtatgggaacaaaaaacatcaaagtcactgtatcaattgccatgaagacttgagggacctgaatctaccgattcatcttaaggcagcaggaccagtttgagtggcaacaatgcagcagcagaatcaatggaaacaacagaatgattgcaatgtccttttttttttctcctccttctgac

SEQ ID NO: 2051 - DNA, 196 bp, Homo sapiens
aaagattttgtgcaatatattaaatggggacagaattctaaatggataaaacaatggctggttctagccctgagtgacagtcttaaggctagatccttcccatagtatcatctgtcctctggaatgactctcctgtccctaaaggggttaagagagagatcacctagaaatccctctggacacttgtgggttcttt

SEQ ID NO: 2052 - DNA, 593 bp, Homo sapiens
aggattaactttttttttaacctggaagaattcaatgttacatgcagctatgggaatttaattacatattttgttttccagtgcaaagatgactaagtcctttatccctcccctttgtttgattttttttccagtataaagttaaaatgcttagccttgtactgaggctgtatacagccacagcctctccccatccctccagccttatctgtcatcaccatcaacccctcccatgcacctaaacaaaatctaacttgtaattccttgaacatgtcaggcatacattattccttctgcctgagaagctcttccttgtctcttaaatctagaatgatgtaaagttttgaataagttgactatcttacttcatgcaaagaagggacacatatgagattcatcatcacatgagacagcaaatactaaaagtgtaatttgattataagagtttagataaatatatgaaatgcaagagccacagagggaatgtttatggggcacgtttgtaagcctgggatgtgaagcaaaggcagggaacctcatagtatcttatataatatacttcatttctctatctctatcacaatatccaacaa

SEQ ID NO: 2053 - DNA, 76 bp, Homo sapiens
agaccacacaagggtacggctgcgagaagacgacataagggtaccgctgctagaagacgacagacgggtctggctg

SEQ ID NO: 2054 - DNA, 503 bp, Homo sapiens
acagaagggtacatgaaggaaaactgatttggtggaaagataataaaaataaaacatgggaaatggggaaggtgataacgtgggggagaggttttgcttgtgtttcaccaggagaaaatcagcttcctgtttggatacccactagacatttaaagttctacaatgaactcactggagatgcaaagaaaagtgtggagatggagacaccccaatcgactcgccagtctacaggtgtatccagcagctccaaagagacagcaaccagcaagaatgggccatagtgacgatggtggttttgtcaaaaagaaaagggggggatatgtaaggaaaagagagatcagactttcactgtgtctatgtagaaaaggaagacataagaaactccattttgatctgtactaagaaaaattgttttgccttgagatgctgttaatctgtaactttagccccagccctgtgctcacggaaacatgtgctgtaaggtttaagggatctagggctgt

SEQ ID NO: 2055 - DNA, 512 bp, Homo sapiens
ggaacagtgtggcccgccatgttcttctccgcggcgctccgggcccgggcggctggcctcaccgcccactggggaagacatgtaaggaatttgcataagacagttatgcaaaatggagctggaggagctttatttgtgcacagagatactcctgagaataaccctgatactccatttgatttcacaccagaaaactataagaggatagaggcaattgtaaaaaactatccagaaggccataaagcagcagctgttcttccagtcctggatttagcccaaacaaggttgcagaagttttacaagtacctccaatgagagtatatgaagtagcaactttttatacaatgtataatcgaaagccagttggaaagtatcacattcaggtctgcactactacaccctgcatgcttcgaaactctgacagcatactggaggccattcagaaaaagcttggaataaaggttggggagactacacctgacaaacttttcactcttatagaagtggaatgt

SEQ ID NO: 2056 - DNA, 457 bp, Homo sapiens
tacggctgcgagaagacgacagaagggtacggctgcgagaagacgacagaagggtacggctgcgagaagacgacagaagggtacggctgcgagaagacgacagaagggtacggctgcgagaagacgacagaagggtacggctgcgagaagacgacagaaggggtccacgctagggggtgcacgtactcccaactgtggtcgcgctctcaccccttctgctgctctcgtggccccctcgcgatggcgggcatcctgtttgaggatattttcgatgtgaaggatattgacccggagggcaagaagtttgaccgagtgtctcgactgcattgtgagagtgaatctttcaagatggatctaatcttagatgtaaacattcaaatttaccctgtagacttgggtgacaagtttcggttggtcatagctagtaccttgtatgaagatggtaccctggatgatg

SEQ ID NO: 2057 - DNA, 501 bp, Homo sapiens
gctttttcgaggtaggagtcgactcctgtgaggtatggtgctgggtgcagatgcagtgtggctctggatagcaccttatggacagttgtgtccccaaggaaggatgagaatagctactgaagcttataggtttgtttcttcccaggtcctaaagagcaagcctaactcaagccattggcacacaggcattagacagaaagctggaagttgaaatggtggagtccaacttgcctggaccagcttaatggttctgctcctggtaacgtttttatccatggatgacttgcttgggtaaggacatgaagacagttcctgtcataccttttaaaggtatggagagtcggcttgactacactgtgtggagcaagttttaaagaagcaaaggactcagaattcatgattgaagaaatgcaggcagacctgttatcctaaactagggtttttaatgaccacaacaagcaagcatgcagcttactgcttgaaagggtcttgcctcaccca

SEQ ID NO: 2058 - DNA, 540 bp, Homo sapiens
gacagaaggggtggtcagagcgagcttcggagaagcagtggtgggttccatgtgatggtggagtaggaggcaggtctccgcggttcatctgtgttgctctaaatgacactgcttcattattttgatggctggagaatatttcctagtgtatgtatatgagagtttcttgatctctttatctgtggatgaacagctactttgaaacatatggtacatttgtgttaaggctagtcaccctgctgtggaatagaaggccagaattgatcagtctcatctgagagtaactttgtacccatcactgattccttctgagactgcctccacttccccagcagcctctggtttcttcatgtggctgcagatggcaggatttcccaaaggtttctggctgaaacatattccgtggtgtatctgtacagcagtttcctcatccctgcagctgtgtttgaacaggtcatttaccatgctgtcctccaggttcaacagtatggctccaaatgatgaaatttcattctgattttctggctgaagactattctc

SEQ ID NO: 2059 - DNA, 540 bp, Homo sapiens
gaaatgtcaggtacgtcttcattgattttacatcccagcacctagcagcacatatgacagaacaggtgaggtgctcaaaaagaattttttgtttcgaccatctataaagttgaatgtaagaggccatggaatgacctgtttgttcatctcattgattcattaagacatggaatgtaaaaggccatggaatgaccatctactgaaactaaaattagacattttaccataattatttttaaaccactataagtagatattggttaaaaactttattattgataaactcatgctgggtgagttttttaaaaactttctttcataaagtcacaagaaaaattgctatatttgaagatcttcattgtatatttatacaagttagcaaatgctgcctaacaaaccacctcaaaggtaattgcctaaaacaacacacgttattactcttgagtttgtgtatcagcagaatgactcctcctgtctcagtttgccttcattgtgtatctggagtcagctgtgcatcagtcagtcaactctgttgactgc

SEQ ID NO: 2060 - DNA, 470 bp, Homo sapiens
aatcagtttttttttatctagagaagatagatttgcttgagtcctaccacactcacatacttttgtgagatggctgcttatggaaaggatattgtttttctttgggacagttatgatcttggcctctgatactaggatctaataaagcaagctgactagaaaagtaaaagcagtagttctgtgtaatgtgtgagctgtgaatttgttgctttcaagctgtttgttgtgttgtggcctgttctagtggactgggatcctgaggttttataacttaattttattgtagtagtaggcaaaatgctctttgtacctcagtttcctttcctgctctgtttcctcttttgagaagataaatgtgtacacgttaattctcccagtttcataacatgatggtgaaagaaaatactgtaaccaggggtgttttttaaaaaatgaagtgcaaggttgatagcaatttttgcatataaatg

SEQ ID NO: 2061 - DNA, 478 bp, Homo sapiens
atattattcttcaacgacattttttgtaactttacacttttttggttattttattttaaaaaaatgaaaaattaatttaaaaaaatgcaaaaaactgttggattatttattttagaaattcccccctttgtgttggactgcaaattgagtttctttctctttaggcctttcacaactaggactgagaatgtatgtaaaagttctgtgacagtacagaaggaaaacaactttttatgtatagcttctaaaaggggaaaaaaaaaaaaaaaaaaaccctttgaatttccagggccccttttaaaaattttcccttcaaaatttgggggtttggattcccaggttggaattttccaatggtaatggaaaacaaactgggcccccccccttaaaaaaaagggaattttttatccctttggggggccatacccgccgtttttttttttttttttttgggggaatttttttaaaaaaaaaaaaa

SEQ ID NO: 2062 - DNA, 194 bp, Homo sapiens
gtcgcggcgacatggccaaacgtaccaagaaagtcgggatcgtcggtaaatacgggacccgctatggggcctccctccggaaaatggtgaataaaattgaaatcagccagcacgccaagtacacttgctctttctgtggcaaaaccaagatgaagagacgagctgtggggatctggcactgtggttcctgcatg

SEQ ID NO: 2063 - DNA, 497 bp, Homo sapiens
catgctgggaggaatgttttcgggtcatacggagtgtgctggagaagtgtttgagaggaacggacggaagctcaagctcttctacgggatgagctctgacaccgccatgaacaagcacgcaggaggagttgctgagtacagagcctctgagggtaagactgtggaagttccttacaaaggagatgtggaaaacactatcttggatattctcgggggactgaggtccacgtgcacctacgtgggggccgccaaactcaaggagctcagcaggagggcaacattcatccgggtgacccagcagcacaacaccgtgttcagctaaccctggggacaaagcagcgtctggctcgagtggaagcgtccaaacctgcttttcccatctccccccaagtctgttccgtcagagcttctggctgctcctgaatggtggaatgctgtgtcctctcttctgtctcctgctgcctggaggcttcggggctctcccgcctgccttctcg

SEQ ID NO: 2064 - DNA, 556 bp, Homo sapiens
tacggctgcgagaagacgacagaagggtacggctgcgagaagacgacagaagggtacggctgcgagaagacgacagaaggggtggagaatgaattaggatggctgaaagagtgaacactgatttaccaaataggaagttctcacagtagttgaaacacaagttatggtggctaggactgggaggggactatgaagataaaaaaaagcggtctattttgaaatagaaggggatatgttttgaaaatagagaaacaaaagtgactatgaagtaggttgataaattctgccgctagcaaaagcagagaaaattacaaagagggaatggttaaaaatgaagttgaattcattttaatatgatagaggctggggaaggatggctagaagagaagtagaagtcagttggggagtgttcaaggcagggaacagttttatgcagagatcctaagcctatgccttcagggacagcaagaaggcccttgtaacatgtacaagtttagccttgtacatgttaaatttgagggaaaaaaaatgcaaattagttatttctaccaagggc

SEQ ID NO: 2065 - DNA, 427 bp, Homo sapiens
gtctctcttccttctccctcactccacacacacatatagacgtacatatattctacatgtatatgtattttgtatatatatatatatattttaactctagcttttttccaaatctttctctgcctactgatttttagtatgtgtgatctatcattttctaatatagattattctcatattaacttctcctattatgattggagattgtgaaattctcctaataattttgtccttttttactctttgtattttgaggccatgttgttgagtgtatgcaagtgtatatttgttacaatttcttggtgattgtcccattaattattgggtagttcctttactctgcctgttagagtgttttgccttattttttttccatcctacagctattaaaatacacgcccggcatggtggcttatgcctgtaatcc

SEQ ID NO: 2066 - DNA, 226 bp, Homo sapiens
aagcccgagctgttgtatattgaggtgtattatttacgtctctggtccagtcttttctggcaaataacagtaaagatggtttagcaggtcacctagttgggtcagaagagtcgatgatcaccaagcaggaaagggagggaatagaggaatgtgttcgggttaagtgatgaaaatggcagtggtggccgggcgtggtggctctcgcctgtaatctcagcactttggg

SEQ ID NO: 2067 - DNA, 420 bp, Homo sapiens
tattttataaggctgagtacatatacagatgatcccattttagtttctcagctattttactatatgttaaatattttgatgctgtatttacatattagcatcagcaaccataatttttctgataacttttcaagatcagccaaatcatgtggtggacaagtcacactttttctctgaagttttccataaaacccaaattaaaagtgatctgacactggtagcattttacaaatctaccttcatttagcatttatatatgcttttaagttgaagttttttctatatatgaaactgcaagtggttaaagggcaggttttgtgttttaggtttggtaatttctctcccaaccagtgtcagattggctcagtctgagtggaggatcaatgaataggtgatgaatgaatggatatctacatgtca

SEQ ID NO: 2068 - DNA, 403 bp, Homo sapiens
ggcggagctgccagagtaaagcaaagagaaaggaagcaggcccgttggaagtggttgtgacaaccccagcaatgtggagaagcctggggcttgccctggctctctgtctcctcccatcgggaggaacagagagccaggaccaaagctccttatgtaagcaacccccagcctggagcataatagatcaagatccaatgctaaactccaatggttcagtgactgtggttgctcttcttcaagccagctgatacctgtgcatactgcaggcatctaaattagaagacctgcgagtaaaactgaagaaagaaggatattctaatatttcttatattgttgttaatcatcaaagaatctcttctcgattaaaatacacacatcttaagaataaagtttcggagcatat

SEQ ID NO: 2069 - DNA, 498 bp, Homo sapiens
tacggctgcgagaagacgacagaagggtacggctgcgagaagacgacagaagggtacggctgcgagaagacgacagaagggtacggctgcgagaagacgacagaagggatgacaatagtggtgctataaacccaaggacattgttatgagttttcacattaaaaaaatggctggaaacttagatttaattaagggcacacaattatggcaagaggggtgtagctgaaaaccatagagagtgagaaatacaggcagtaagattctcagagccatgtttgcgtatctacattgcctgtactttatggaattctggttcttggtgatatttggagttcagatagtggatttatagtgggaaagaggattttgaatatagagatagtagaactagggaatgattttttaaaaataaaaggtaaagaacagaataggccgggtgcagtggctcatggcctatatcccagtgctttgggaggcccaagagggggaattgcttga

SEQ ID NO: 2070 - DNA, 571 bp, Homo sapiens
gatgtgcatgccgaacctcccattctgtcgtcttgcttatgttactctcctttatgtttcactttctcaaatgaatgtcaagctggtgatttttagattcaaaaattctaaaataaattgctcaaatttccacattatgtaagctattaataaaatgtcttgtgggtgctacatatttattaaaatttttggttgtaattttaagctcactgcaggcagaaaggaatcattaacatttatattcttttttttagtctgtatctaaatgatggtatattttaattccagatattttctttatactgcagtaatgctcgtcatattttgcaaaatttatgttgttcttttatttggaaatataaggcttttttagctcctgaaatctatattatagtcatataattttattatgttttgtggtaagaagtgcagcaacatattgagaacataataaaattatcctgtatttttaatgattatttattaaattcctctcattagagcctgttattaatgattgtaatgtattttctgtataattttactgcaatttattaaattctaatgactt

SEQ ID NO: 2071 - DNA, 510 bp, Homo sapiens
gatcttgttaaaacagattattttatgtcatctcttcacttaagattctctgtgatgagttctttaccccactcagagtaaagtctaattagtgtaatactgtaccaggttctacagggtctggcctctcattccctctcagacttcatcttctatttgctctttctactcagttatggtcacactggcctctttgctgttcttgaccacacctgcacactcctgcacctgcacttttatacttcttgttgcctctgcttggattgctcttcccctgatgtagaactgtatgtgaacttagtctaagtaaaacaaaacaaatcctaacttaccctatttaatcatgcaatcttcctctttgagtctgtaacctgtatacctttttcatgttttattttttctccaagccaattgtttgtctgttattatgtttctacttcctgctaggacacgttttgtcttgtttcttgttgtattactagcacttaacacaatgtctgactcatagta

SEQ ID NO: 2072 - DNA, 472 bp, Homo sapiens
gagagaaagcgacctcaagatacaactggcaactgaggaaaaggcctcaattcaacaagagctaacaagcttgggagtttatttcggaatctttaaaagactcttctgcttacccacaatctgggatccactgcaggaaaacaaaaaaggaaaacttcatttaaaagaagcaagaagtaaaatgggacaaattgggaatgtttaagtctctgaaactccgcactgaaaagaaaataagattgataacttaagcttaacattctgaggcataaagaaacattaactttggagtattcatcttgactactgaaatacaagtttagaagacaagtggtttcattctggtcacagatcacagcttttctttaaatttataatcctatgggttggactcgttgactgtattttttaaaggttgctcgtcagttaactgagccttggaattcatggattttctaaagactaacaaatg

SEQ ID NO: 2073 - DNA, 116 bp, Homo sapiens
taagctcactgtaggcagaaaggaatcattaagatttctattcttttttagtctgtatctaaatgaccatatattttaattccaaatacttactttatacttcagtaatgctcatt

SEQ ID NO: 2074 - DNA, 51 bp, Homo sapiens
tttgaagatgccccatttggattggatgaattccaaattctgctcgcttgc

SEQ ID NO: 2075 - DNA, 391 bp, Homo sapiens
gtcatttttgtgaagatttattccacattcaccatcctttttttgtgaaatttaaatcagatgtcataaagtctttaaaaagcagaattactttgaaaataaaggtattattattatagaattttagagattaaagaaaaaacagaaactaacatttaatgaagacctactctgtgccatgccatgtgcttagaactttgtttaagccatttcatttaataacctttcaacctaatgaagcaatatagcatgatggttaaactctgtgggctataggctgtcaagttcagctgcacagcggctaactagctttatgacttttcaaatgtttatcttctttttggcttagtttctctgttacaaagtggcaataataataatagcactcact

SEQ ID NO: 2076 - DNA, 192 bp, Homo sapiens
atattatctgtgtagtagcctgtttaaagtgatcattgctagtgcatggtatagaattacaaacttgtaaatacttctcaagattgccactttaaaaaaaaaagcaaaaagagctctgtagccctatttttttttttttttccaacaggaaatttgtttttgtttcaaaatgggggaacccccatttttttt

SEQ ID NO: 2077 - DNA, 474 bp, Homo sapiens
tacggctgcgagaagacgacagaagggtacggctgcgagaagacgacagaaggggattttcaagacttacactagaactgtgagaacagggtaataaataagcatatgtattaatatcacctttggtcaactcttgggtagccccaacggtagtgtaggaattaacgtaatttttcctactaaaagtattggatttgttttgagagaccacagttgaaaatcattgacatacaaagtttaaaaattgttaggttaaaaaattttaaatgcatttgaagtggttttatagaaaaataattatctaacttggtttatattgacaggttgttttcttggataagaactagacgaagagaaagggagattagtgataaatgtccaggttttcaagttgaaaagtaacaatcagtgtattacaacagatggatgtgatgtcaaattacaaatgctgaaaacgttatatgtaatcatgta

SEQ ID NO: 2078 - DNA, 197 bp, Homo sapiens
atcacagcctacgtctgccaggcagtcatcatccccccagaggtgacaggctacaaggccggggtttcctcacagcctgtcagccttgctgatcgacttattggggtgacaacagatatgactctggatggaatcacctccccagctgaacttttccacctggagtccttgggaataccggacgtgatcttctttta

SEQ ID NO: 2079 - DNA, 79 bp, Homo sapiens
tgattaacattttatagaatgccccaggttgtttttgcatggattgttataagtcaggaggaaggagaagttgctcctt

SEQ ID NO: 2080 - DNA, 416 bp, Homo sapiens
gtaaagccaatattttagaataagtattttagtataaatattttagtaaaatactataaaaataaaaggacatataatttatttttatggaaaacatcaacatgtaatatcagaagagttgtcatcagtttctttggaaaggctaccaattttactaagtgaaattgtaaaacatagtacatcagttaggactctgttggttgcatgtgaactattctaactagtttaagtcagaaaaaaaatttcttacaggctctatacctatcaaatctaggaggaatttagactacaggcattgctgaatctaaggactaaaactatatgagtaggatcttctccttccctagcagctcctggcttacattctcttaggttcatgcctgtgtctctgtggtttctgcagctgcctatgcatc

SEQ ID NO: 2081 - DNA, 472 bp, Homo sapiens
atcagctttttaaagtgggttattctggagtttttgtttggagagcacacctatcttagtggttccccaccgaagtggactggcccctgggtcagtctggtgggaggacggtgcaacccaaggactgagggactctgaagcctctgggaaatgagaaggcagccaccagcgaatgctaggtctcggactaagcctacctgctctccaagtctcagtggcttcatctgtcaagtgggatctgtcacaccagccatacttatctctctgtgctgtggaagcaacaggaatcaagagctgccctccttgtccacccacctatgtgccaactgttgtaactaggctcagagatgtgcacccatgggctctgacagaaagcagatacctcaccctgctacacatacaggatttgaactcagatctgtctgataggaatgtgaaagcacggactcttactgctaacttttgtgtatcg

SEQ ID NO: 2082 - DNA, 534 bp, Homo sapiens
tatggctgcgagaagacgacagaagggatctcttgcttggattattagtctctcaactggtctttctgtttccatccttcacaagagtgatcttgttaaaacagattattttatgtcatctcttcacttaagattctctgtgatgagttctttaccccactcagaagtaaagtctaattagtgtaatactgtaccaggttctacagggtctggcctctcattccctctcagaacttcatcttctatttgctctttctactcagttatggtcacactggcctctttgctgttcttgaccacacctgcacactcctgcacctgcacttttatacttcttgttgcctctgcttggattgctcttcccctgatgtagaactgtatgtgaacttagtctaagtaaaacaaaacaaatcctaacttaccctatttaatcatgcaatcttcctctttgagtctgtaacctgtatacctttttcatgttttattttttctccaaaccaattgtttgtctgttattatgtttctacttcctgc

SEQ ID NO: 2083 - DNA, 487 bp, Homo sapiens
gaaacttccaacagtactgtgaaaccaccaacttcagttgcctcagactccagtaatacaacgttcaccaccatgaaacctacagcggcatctaatacaacaacaccagggatggtctcaacaaatatgacttctaccaccttaaagtctacacccaaaacaacaagtgtttcacagaacacatctcagatatcaacatccacaatgaccgtaacccacaatagttcagtgacatctgctgcttcatcagtaacaatcacaacaactatgcattctgaagcaaagaaaggatcaaaatttgatactgggagctttgttggtggtattgtattaacgctgggagttttatctattctttacattggatgcaaaatatattactcaagaagaggcattcggtatagaaccatagatgaacatgatgccatcatttaaggaaatccatggaccaaggatggaatacagattgatgctgccctatcaatta

SEQ ID NO: 2084 - DNA, 471 bp, Homo sapiens
gaaagaagtactttcagtttcattaggctctgaagccattacaaaggttgcttaacttctaattatttgatcactgaggaaaatccagaaagctacacaacactgaaggggtgaaataaaagtccagcgatccagcgaaagaaaagagaagtgacagaaacaactttacctggactgaagataaaagcacagacaagagaacaatgccctggacatggctccagagatccacatgacaggcccaatgtgcctcattgagaacactaatggggaactggtggcgaatccagaagctctgaaaatcctgtctgccattacacagcctgtggtggtggtggcaattgtgggcctctaccgcacaggaaaatcctacctgatgaacaagctagctgggaagaataagggcttctctctgggctccacagtgaaatctcacaccaaaggaatctggatgtggtgtgtgcctcaccc

SEQ ID NO: 2085 - DNA, 377 bp, Homo sapiens
ggaaacttaattccctcctagcacatatttgcatactgaaaggtccgaaaagggcatccacggcagcttgagccccttagcaccatgtaaggagcacagcatccaaacggcttcttgagaaccattggggaatgtctttctttttcacatccaattgtttagtgtctatttattcttgggtggccagttttgaaacctaaaaagggacaataaagcaaaaagtatcagtaaggataggtggctgagacccactgccctgagctactagtgtggctgtgcctgtgggtctctagaaccatctgcattggacgtgaagccacagcaggtggctggactgctggcctgttcctaatgagctacgctgggctttgaggtag

SEQ ID NO: 2086 - DNA, 441 bp, Homo sapiens
gcagaattcttagtgtgaaaggtgatgtaccacttcagatcagttttcactggagagacttgtaattggtagctgtagctcgtatccatccctagtcactttgccaggatgaatgctgttgggcagcagtagcctaagttacggaaggggagcagattgaatggggttttgagacatcttctctgataccttagctttccttctgctctggtcgctatccactcagtcgtgtgctagaaatgtttaacaaccaggatctctggggtgggggtgggggggagcgctgaatttgtagcatttgctgcaaatataaattataaataaaattctaatataaattagaattttatatcaaattctttgatataaattagttactcctcctgtggctgatttcaagctaccaccttagagttcagaaaggatgtgcacagttggctc

SEQ ID NO: 2087 - DNA, 308 bp, Homo sapiens
agcgacctcaagatacaactggcaactgaggaaaaggcctcaattgaacaagagctaacaagcttgggagtttatttcggaatctttaaaagactcttctgcttacccacaatctgggatccactgcaggaaaacaaaaaaggaaaacttcatttaaaagaagcaagaagtaaaatgggacaaattgggaatgtttaagtctctgaaactccgcactgaaaagaaaataagattgataacttaagcttaacattctgaggcataaagaaacattaactttggagtattcatcttgactactgaaatac

SEQ ID NO: 2088 - DNA, 382 bp, Homo sapiens
actgcccttaccacacagcagaaactggcaggtgtcactgcactcagttgctggcttccacttcgggcttcctttccacagggtcctatcggtggtgctaatagagatatttctattctccagtgccacggggattgtgaccctttggttcccctgatgtttggttctcttacgtggaaaaactaaaaacattggtgaatccagccaatgtgacctttaaaacctatgaaggtatgatgcacagttcgtgtcaacaggaaatgatggatgtcaagcaattcattgataaactcctacctccaattgattgacgtcactaagaagccttgtgtagaagtacaccagcatcattgtagtagagtgtaaaccttttcccatgccc

SEQ ID NO: 2089 - DNA, 548 bp, Homo sapiens
attaatggctcagctcatcatacagaccaccatatgttctttgactataattatggacaatatttcactttgtgggataggattggcggctcattcaaaaatccttcatcctttgaggggaagggaccgctcagttatgtgaaggagatgacagagggaaagcgcagcagccattcaggaaatggctgtaagaatgaaaaattattcaatggagagtttacaaagactgaatagattattgcccagttattcttaagtaaggacaaagaaggaaatatcatcgtatttcttttttttaataaggaaaaaataatatccatacagtcaagatacatagtaaatggtatcatttggaaatcagcatcgtgggcactgctgaggaatgatcctagtggtcggtcagaagaagatgctgtgaacaccaggactttaatcttatgcttaaaatgccagatgttgttcgggggacaacttgtatctttctagcagcagatctgtagtttgtatagcctcaacaacaattttaaataagatggagaataaattat

SEQ ID NO: 2090 - DNA, 559 bp, Homo sapiens
atattcttttttttagtctgtatctaaatgatggtatattttaattccagatatttactttatactgcagtaatgctcgttatattttgcaaaatttatgttgttcttttatttggaaatataaggcttttttagctcttgaaatctatattatagtcatataattttattatgttttgtggtaagaagtgcagcaacatattgagaacataataaaattatcctgtatttttaatgattatttattaaattcctctcattagagcctgttattaatgattgtaatgtattttctgtataattttactgcaatttattaaattctaatgacttaaattgtctgcttttcatgagtgcacacagttgaatgctgtagatatctaaagaattatttttcggccggttgtggtggctcatgcctgtattcccagcaccttgggaggccaaggcgggtggatcacgaagtcaggagatcgagacaaccctgactaacatggtgaaaccccgtctctactaaatatacaaaaaattagccgggcatagtggcaggcgcctgtat

SEQ ID NO: 2091 - DNA, 206 bp, Homo sapiens
gacagaaggggctgaggttccttctattctgatggagtactttgcaaatgattatcgagtagttaaccaatttgccagacattatcagactggacagccactgccaaaaaatatggtgtctcgtctttgtgaatctaaaaaggtttgtgctgcagctgatatgcaacttcaggtcttttatgccactctggatcaaatctaccatg

SEQ ID NO: 2092 - DNA, 495 bp, Homo sapiens
gctgctttccaactgcctgactgcttgttcgtctcactggtgtgagctccagcatcccctttgctcgaaatggaccccaactgctcttgcgccactggtaagggaagctctgcgccctggaatccccatttcccagccctattacagagggtctctgggtttcaggaagtcgcattttaagttctgagcgacggggactccagtacttcgttagatgctttcttcctgatcacgcccctgagagcattgccctcatccctgggcctctacgtcagagttaagaatactgaggctcaaggctgaactgctccacatcacccagttggtcatgggcctgctggctgggccccagtgctctgtccaggctctgagcaatcagtgtggttgggggtgctggaaacattgactcttcagagttcaggacagaaagttctggctcgcagtctcaatattcctgggttgtatgtgcacgtgggaccttcctggtgcggtaaa

SEQ ID NO: 2093 - DNA, 522 bp, Homo sapiens
cagaaggggcgaagaaactgccccagagaatcagaagttcatcttgcaggaggatggatctttatttcacgaacagtccaagaaatgtgtccaggctgcgaggaaggagtcgagtgacagtttcgttccactcttacgagactgcaccaactcggatcatcagaaatggttcttcaaagagcgcatgttatgaagcctcgtgtatcaaggagcccatcgaaggagactgtggagccaggactctgcccaacaaagacttagctaagcagtgaccagaacccaccaaaaactaggctgcattgctttgaagaggcaatcattttgccatttgtgaaagttgtgttggatttagtaaaaatgtgaataagctttgtacttattttgagaactttttaaatgttccaaaataccctattttcaaagggtaatcgtaagatgttaacccttggtatttagaaaattaaaaccttataatatttttctatcaagatgtatattttacagtcgtgccttttactctca

SEQ ID NO: 2094 - DNA, 109 bp, Homo sapiens
ccacaggaaatggtccaagtcaggctgacacacatattcaaggcattttgagattaatacaatcacatcatgattccagccattgacagacactattcaccacagcatc

SEQ ID NO: 2095 - DNA, 517 bp, Homo sapiens
tgtttgcgtctggggtgtgttatcaaacagagcatggtctacatcccactgtgtcaaccagaagagccaagtgttatctcaattggcccagtgtttctccaggctggggactgttaagggctctaagggaatgtagacagagtctccctgttattctgacttcctgcttgatgagctttcagttcctgtttttgctattgtttcctaaatttgacctacatattacatgggtgtagtgtgttgaggcttttcaaagaagggtctagtgagctaagtttcatcttctggtactcattgatcaaactgacctttctattctcataagcgtttctacccaaagttgtgtgtggaaggagtgtatagcagagaggaaatccctttcaacagagtcagctgctaactgatttcctataagcacactggattaagggcagccacagtggtttctactgtatgtatgaaccgaatggaggaatgttttcaaagattgatttggtgtggattgcaattgtaatgg

SEQ ID NO: 2096 - DNA, 580 bp, Homo sapiens
tacggctgcgagaagacgacagaagggctgaaagtgggtaatttataaagaagagaaatttatttcttctagttatgactgaggagtcccaggtcatggggctgcatctgttgagagcctccttacttgtggggactctctgagaagtgccaaagttagagcaggagtgccaaaagttagagcaggaaccagatttcctggtcttagcatacaagaaaatggaggcgatgggaatagagtgtgcgtttctaaagtttaagaagtcaggaaggaaagaaatagagcatactaggtacagagggtgactgtgccaagcaaggttttcaagttggggtgggcaggagcagtaaaactcatggaaatggaggatgtgctgagaatacttgaggaaacaaggcctgaggagatggaaagagaatttaaaacatttatctattatgtgattattataatatgaacctctgtttcctatgtgatgttccctgagtgtagaatttgtttctttcttactgtgatatacccagcacttgagatggtactgacagattgtatatgcttagtaaaatttgttgaatgactg

SEQ ID NO: 2097 - DNA, 453 bp, Homo sapiens
acagaaggggatcaccaagcaggaaagggagggaatagaggaatgtgttcgggttaagtgatgaaaatggcagtggtggccgggcgtggtggctctcgcctgtaatctcagcactttgggaggccgaggcaggtggatcacctgaggtcaggagttcaagactagcctggccaacatcatgaaaccccgtctctactaaaaatacaaaaattagccaggcatggtggcacacacctgtagtcccagctactcgggagcccaacgcacgagaaccgcttgtacccaggaggtggaggttgcagtgagccgaagttgcaccattgcactccaccctgggcgacagagcaagattctatcaaaaaaaaaaggcagtggcaagtaagttatagaaaagaaatgctgctaaaaggaattaagcgttgtagtaaacgcgtgctcatcctctaagcttga

SEQ ID NO: 2098 - DNA, 592 bp, Homo sapiens
acagaagggagttcacatacagctaagtatgttgctggtagtaaatgtgggcctggggttggtggacttctgcctttgaaactaaacatccctgcttataattatgtaggaagacttttctgctgaaaagatttgttttaagacaaaagcctttgtctttaaaaaacaaaggcttttgttaacagccttaaacaaaaggctctttaaagggtaagttgcaggtcagtattgataccagaacaataattttctatctctttgagatattacaaactgattttaaccttcagattaaaggtattaagaatatttcctgactggcatggtggctcgcacctgtaatcctagcactttggaaggctgaggcgggtggatcacctgaggtcaggagtttgagaccagcctggccaacatggtgaaaccccgtctctactaaaaatacaaaaattagctaggcgtggtggtgcatgcctgtaatcccagctacttgggaggctgaggcaggagaattgcctgaactcatgaagcggaggttgcagtgagccgagattgcgccactgcagtctagtctgggtgacagagcaagactcca

SEQ ID NO: 2099 - DNA, 375 bp, Homo sapiens
gagctggtgagtctagaaggacggactagagagagctggcattggaatggacaatcgctagagggcgccggagcactagcggagtcaacctccgggacccataagcagggcttctaggataaggaatggagtttgacccaaccccaagatatgccctggggatattggttttctcaggtgcatctgactctccggcctggattgcctcgctgcggagaggggacaaaaggttttgccctgagcatctggtgatgtcttccagtgcctggttaggttgctccgcggctggacagtctgactactctcaaaactcctcgtgacaggcctttctggggtctgatcgccctttgtttccttacacttgggcctgttatc

SEQ ID NO: 2100 - DNA, 496 bp, Homo sapiens
acttacccaaacactaattgtagactatgccttctgaatatgtttgtcataaacttggagtaaggaatcctcacaggcactggacaattcaaaaaacgtaaagttgtttgttagaatactggtgcttttgggtagaaaccctcatccatatcctggtaaggcttgaagttgcacaggagttttcatttgtcaaaacccagaaaaccataagctttagatttgtgaattttatattgtattatatgtgacctttctttttaaaaaatgagctgtaagcagtctcccagacagtagctcagcctccagaactctctttctgcatagttgaagactcctcttcacacaagatggtagcaacaaatcataggtgcaattgcaccaaattcacagaagatcaattgaaaatcctcatcaataccttcactcaaaaaccttacccaggttttgctaccaaacaaaaacttgctttagcaatcaatgcagaagagtccagaat

SEQ ID NO: 2101 - DNA, 431 bp, Homo sapiens
gacacaaaaagcacccagaggagagtatttctgtgtaaacaggtaaattaataggtggatatttaatacacaaattcacatttgtttcaagattggccttgtgtgtatggatactaaaaaggaaataacactaatgcttcattcatttttttattccaaataattttgctaagccccattacatagccaactcactgttagacactttgttttaaaggtgaaagagttaatacatttgcttccaaagaacttactagtaaagttacacacacacacacacacacactcacacacacacacatacacacacagagaatgagagagagaattacgtattctataagaaataaaggtaatatagaaaatctaaactaacaaattgtgccaagctctttctctgctatttcctgaagttcaacaccctgcgggtc

SEQ ID NO: 2102 - DNA, 72 bp, Homo sapiens
atgaaggtacatatgcacacaaaattttgcctcatttgtttgctgacatttatttttcatcattgcaaccat

SEQ ID NO: 2103 - DNA, 373 bp, Homo sapiens
ggcaccctgagtgcttcgtgtgtgccgactgcaacctcaacctcaagcaaaagggctacttcttcatagaaggggagctgtactgcgaaacccacgcaagagcccgcacaaagcccccagagggctatgacacggtcactctgtatcccaaagcttaagtctctgcaggcgtggcacgcacgcacgcacccacccacgcgcacttacacgagaagacattcatggctttgggcagaaggattgtgcagattgtcaactccaaatctaaagtcaaggctttagacctttatcctattgtttattgaggaaaaggaatgggaggcaaatgcctgctatgtgaaaaaaacatacacttagctatgttttgcaactc

SEQ ID NO: 2104 - DNA, 262 bp, Homo sapiens
gaagagtatttgaccaaagagctgctggccctggattcagtggaccccgagggacgagccgatgtgcgtcaggccaggagagacggtgtcaggaaggttcagaccatcttggaaaaacttgaacagaaagccattgatgtcccaggtcaagtccaggtctatgaactccagcccagcaaccttgaagcagatcagccactgcaggcaatcatggagatgggtgccgtggcagcagacaagggcaagaaaaatgctggaaatg

SEQ ID NO: 2105 - DNA, 581 bp, Homo sapiens
  misc_feature 440: n = A,T,C or G
acagaagggataattactgctaaaatagagtgctgttacacttaaggaaaattagtgccattttggaaatgagatcttgtgccataaatacagctgaactgaatataaatgttcacaaattaatgctgtcaaaggaatgagtaaagcagaaaaacttttaaccagcaacatttcaagtacgtagtgtgatcaaacatgatcatccagaatttttatattttttctttgtacagaggttacatattctgggtgttcttttataaaggaaacattttaaatcccacaaattgacactttctatcttcaatggactaagatttttttggtcagtaatctctgaaatttccttaaattatatacttaacatagcagagaaactggattgtttttgtatataagactgcttccacctgaaatgctgtcataagtactgggggggntgggggagtgcccatcttgtacatgatattcttagaggtaataaggtaatgatgcatgaatttattttataaactcttggactatgtatttgacatgtaaaatatgtacagtattaacgtcaaccatctctttaaagttag

SEQ ID NO: 2106 - DNA, 459 bp, Homo sapiens
actttcttaaatgttgcttttacatctttggctcagaacacagtatttctaactttgtttttcttattacttaggaaactagagaaatttctccttggaaatgtcagggggaaaatacagtatttcggattaactttagaaaactcaggtttaaggcttattgaccggaagacctctttcttatccaagtgtagggcaattcattgcaccttgaggtaggggaggagcaaaatcaggctggcaggggtccacggcagggcaagctctaggagctggtgagtctagaaggacggactagagagagctggcattggaatggacaatcgctagagggcgccggagcactagcagagtcaacctccgggacccataagcagggcttctatgataaggaatggagtttgacccaaccccaagatatgccctggggatattggttttctcaggtgcatctgactc

SEQ ID NO: 2107 - DNA, 485 bp, Homo sapiens
acagaagggggcagcagtgtgttacctgccgacagcataatgtgaggcaaggtctagctgctccccccggcatacaagcttatagagcagcctcctttgaagatctccaggtggacttcacagagatgccaaagtgtggaggtgttcgagtgtggatcaaggactggaacgtagcctctttgtgcccatggtggaaaggaccccagactgtcgtcctgatcactcccactgctgtgaacgtagagaatcctagcctggatccaccacaaccgtgtaaaacctgcagcgcctgaatcctgggaggcaagaccaagtctggacaacccctgcagagtgaccctgaagaagatgacaagccctgctccagtcacacccagaagctgactggtccacgcacagccgaagcatgaggaagctcattgtgggcttcatttttcttaaattttggacttacagtaagggcttcaactgttcttactcaaact

SEQ ID NO: 2108 - DNA, 517 bp, Homo sapiens
gatagcactagatactcattgttgcatgaaccctattgtgaactgctcatctgagggatctaggttgtgtgcttcatatgagaaactaatgcgtgatgatctgtcactgtctcactttggccccagatgagaccatctagttgcagaaaaataagctcagagtttccacggattctacattatgatgtgtattctcattttatggaagacatgttgccagagtaaagcacaatatattcatcttgaaatgtaatactgagaagatatggaagttatggaagttgtggccttcagaattggcacttacggagagactagaacacgggtgggtgagttgtgaggggcaggaagcatgtcttaatggacttaagcaattttcgtcaacgattcacagtaaaatctttcaatgtacaaaatttagtaatctgataaacaataaacaaaatatttgaataggcatttttcataagacgtacaaagggcagacaggcatacgaaaaggtgctcaacatttttg

SEQ ID NO: 2109 - DNA, 233 bp, Homo sapiens
ggggctggagaagcagcatccaaagaaagcgaacccaaacaatctacagagaaacccgaagagaccctgaagcgtgagcaaagccacgcagaaatttctcccccagccgaatctggccaagcagtggaggaatgcaaagaggaaggagaagagaaacaagaaaaagaacctagcaagtctgcagaatctccgactagtcccgtgaccagtgaaacaggatcaaccttcaaaaa

SEQ ID NO: 2110 - DNA, 429 bp, Homo sapiens
ataaacttacagcctcagctccaggctatctggcaataacaaagaaagtggcagttccttacagccctgctgctggggttgattttgaactggagtcattttctgaaaggaaagaagaggagaaggaagaattgatggaatggtggaaaatgatgtcagaaactttaaatttttaaaaaggcttctagttagctgctttaaatctatctatataatgtagtatgatgtaatgtggtcttttttttagattttgtgcagttaatacttaacattgatttattttttaatcatttaaatattaatcaactttccttaaaataaatagcctcttaggtaaaaatataagaacttgatatatttcattctcttatatagtattcattttcctacctatattacacaaaaaagtatagaaaagatttaagtaat

SEQ ID NO: 2111 - DNA, 284 bp, Homo sapiens
atggcaaaggcgggactgtccaactacgggaaccctcgccatggcctgttgctgttcatgatggctggcatgacagtgtccatgtacctcttccgggtaacagtgaccagtgactcccccaagctctggatcctggtattgggagctgtatttggtttctcctcgtatggccccattgccctgtttggagtcatagccaacgagagtgcccctcccaacttgtgtggcacctcccacgccattgtgggactcatggccaatgtgggcggctttctggctgggct

SEQ ID NO: 2112 - DNA, 237 bp, Homo sapiens
gaagacgacagaaggggagacggcggcaggagaagcaagatgaatgcaggctcagatcctgtggtcatcgtctcggcggcgcggaccatcataggttccttcaatggtgccttagctgctgttcctgtccaggacctgggctccactgtcatcaaagaagtcttgaagagggccactgtggctccggaagatgtgtctgaggtcatctttggacatgtcttggcagcaggctgtggg

SEQ ID NO: 2113 - DNA, 531 bp, Homo sapiens
acagaagggagaatgagtgatattgtctgggccagcagcccccaacgtttttgccaccagggaccagtttcatggaagacaatgtttccatggactggaggtgtggggatggtttcaggatgaaactgttccacctcagatcatcaggcattagattctcataaggagtgtgcagactcaatccctcgcatacacagttcacagtagggtttgtgctccaatgagaatctaatgctgctgctgatctgacagtaggcagagctcaggcagtaatgcctgcttgtccactgttcatctcctcccgtacagctaagttcctaacaggtaccagtgtctgaagcctggggactggcggctgctggtcaaggccacattagtttattgttaagtgcaaggtttctggtaacagaaataaagaattcaattgattcatcatcaagaccaaatatatttactaaagatctaccttaaattcattttttagcaggtagtatggcattgtggttaagaatttacatttgtgaacattta

SEQ ID NO: 2114 - DNA, 571 bp, Homo sapiens
gacagaaggggcgaggcccctgcagcagcagcggcgtggtcagagcgagcttcggagaagcagtggtgggttccatgtgatggtgtagtaggaggcaggtctccgcggttcatctgtgttgctctaaatgacactgtttcattattttgatggctggagaatatttcctagtgtatgtatatgagagtttcttgatctctttatctgtggatgaacaggctagtcaccctgctgtggaatagaaggccagaattgatcagtctcatctgagagtaactttgtacccatcactgattccttctgagactgcctccacttccccagcagcctctggtttcttcatgtggctgcagatggcaggatttcccaaaggtttctggctgaaacatattccgtggtgtatctgtacagcagtttcctcatccctgcagctgtgtttgaacaggtcatttaccatgctgtcctccaggttcaacagtatggctccaaaggatgaaatttcattctgattttctggctgaagactattctctttgtgtatgtccaccacagttactttatcccttcatct

SEQ ID NO: 2115 - DNA, 417 bp, Homo sapiens
gttgtcaacgtccacatcttcgtctctgagtactggttctgagggctggtctgccgcacagccgcaggtgcacctccaggccaaatcattgctgccagtgactgtggtctgtacttgtttataccctcagacttttttaatgttaggtatttgtagcattaggccaacatgtattaagctgagccagatgaataagtccatctgatgtattttcggtgtttaaaaatgagcccagttgctcaactgtttggttgaaaaccttgctcattttttaatgcgaaggctaagtgtcaccccctttctctacctctggctgggccttgctaagggccaaggaaagaaagacattttttagggggcagccagtccaaatgccaaaagaagaccagttcttgccctgattgtatggaatttgac

SEQ ID NO: 2116 - DNA, 328 bp, Homo sapiens
gttgggatccgtctcctctttcgcctcctgcaccttgggagccccgggctactctctcacagcccctgttgccctgtgatctgtaggtccttggggacgcatagtcaaggtgccaggacatcctggaagctgggaaatgatttcttccagaccatggctggagaaggaaagaaggtgtgttttgcctgactcagtgactatagagagaaccaagttctgcaggcctgtcacctaagtctcagctgggtgccacaaactctgaactggattccaaggctttcatgaatgcacttatgtttgctgtggcagctgcattatgtcgtggggg

SEQ ID NO: 2117 - DNA, 191 bp, Homo sapiens
atgttcagtttgattttaatgcatttcagaatctggacaacatcttacaaaatgtctgattattatcctattttttctgtagaattctagaaagggaattacaattgggggtgcagggtaaatctattttctgacagtggtatgcctttgctcttacaatcttatcagctgaattgagggaaaattcatat

SEQ ID NO: 2118 - DNA, 288 bp, Homo sapiens
gatattttttgctgcttcctcggcccagggagaaagcatgtcaggacagagctgttggattggctttgatagaggaatggggatgatgtaagtttacagtattcctggggtttaattgttgtgcagtttcatagatgggtcaggaggtggacaagttggggccagagatgatggcagtccagcagcaactccctgtgctcccttctctttgggcagagattctatttttgacatttgcacaagacaggtagggaaaggggacttgtggtagtggaccatacctgggga

SEQ ID NO: 2119 - DNA, 359 bp, Homo sapiens
agacgacacaagggtactgctgcgagaagacgacagaagggtacggctgcgagaagacgacagaagggtacggctgcgagaaaacgacagaagggtacggctgcgagaagacgacagaagggtacggctgcgagaagacgacagaagggtgcggctgcgagaagacgacagaagggtacggctgcgagaagacgacagaagggtacggctgcgagaagacgacagaagggtacggctgcgagaatacgacagaagggactttggagactccaaggattttaggaattctatggcagaaaatggagatgaacaccacatagaaggccgggcacactggctcacgcttgtaatcccaacac

SEQ ID NO: 2120 - DNA, 509 bp, Homo sapiens
tacggctgcgagaagacgacagaagggtacggctgcgagaagacgacagaagggtacggctgcgagaagacgacagaagggtacggctgcgagaagacgacagaagggtacggctgcgagaagacgacagaagggtacggctgcgagaagacgacagaagggtacggctgcgagaagacgacagaagggtacggctgcgagaagacgacaggagggtacggctgcgagaagacgacagaagggtacggctgcgagaagacgacagaagggtacggctgcgagaagacgacagaaggggctttcgcgtctgcggtgcccggagtgtggtacttctcctagttgcagtcaggcttcatacgctattgtcctgcccgttagagcagccagcgggtacagaatggattttggaagagggagtcaccactggacctccatggtggccacgtgcagacatctacaaccttcgatctcctgacgaaaactggcgatggaatatgagaggagccctc

SEQ ID NO: 2121 - DNA, 383 bp, Homo sapiens
atgtattgaaaacttggccattttaccccattcctatgaatgaaaactatttggtgaatcagaggatagtctgaattgggatatgaaggccagtataagtgtcagttagcaaagtcagctctagtttagtttttttttttttttttttagggggtacctttcctaaaattttactttgggaacccttgaacctttttaaaaattttaaaggggttaacagttttgggcaatttgcctattccaaaaacctaaccttgggttcatgtttccaaggcctaaagaaaaatggggaaaataaaaaacctaaaaaggaaaggggattcctgggccttccccttttaaccttttaaaaaaaatggaacaaattggattttgggggaaaa

SEQ ID NO: 2122 - DNA, 432 bp, Homo sapiens
attaagaatattttaatagcagcatgacatttagcagtaatccattaagggcagtacctctaacaaggacgccttccagcttcagcgatgttacttacgtttgatgctacttaaagtaatgaatgacgttttaaggaatccctaaccctactatcagaaaaggtgtttgttaaagagccttctcttgtgtgttacgcatgaactttggtctgtaggtgttaaatggaacctctccatgtgtatatagtatttccttgtataaagcactttactacctaccacttgtgttgtgaacgtttggtgactgctgttgaaagaaggaaaagggtgtgtgagaaagcctactgaagcagcagcactgccactacatgtggacaaaagtgaccatataaaagaagttgtgctatttaactctgaatacttggagaaact

SEQ ID NO: 2123 - DNA, 485 bp, Homo sapiens
tacggctgcgagaagacgacagaagggtacggctgcgagaagacgacagaagggtacggctgcgagaagacgacagaagggtacggctgcgataagacgacagaagggtacggctgcgagaagacgacagaagggtacggctgcgagaagacgacagaagggtacggctgcgagaagacgacagaagggtacggctgcgagaagacgacagaagggtacggctgcgagaagacgacagaagggtacggctgcgataagacgacagaagggtacggctgcgataagacgacagaagggtacggctgcgataagacgacagaaggggcttttttttctgggctcggacctaggtcgcggcgacatggccaaacgtaccaagaaagtcgggatcgtcggtaaatacgggacccgctatggggcctccctccggataatggtgaagaaaattgaaatcagccagcacgccaagtacacttgctctttct

SEQ ID NO: 2124 - DNA, 509 bp, Homo sapiens
acagaagggtggcaacccgctcaggcccccttcccattgtggaagctttgttctttcactctttgcaataaatcttgctgctgctcactctttaggttcacactgcttttatgagctgtaacactcaccgcgaaagtctgcagcttcactcctgagccagcgagaccacgaacccaccagaaggaagaaactccgaacacatctgaacatcagaaagaacaaactccagacgcgccaccttaagagctgtaacactcaccgcgagggtccgcggcttcattcttgaagtcagtgagaccaagaacccaccaattccggacacaccattgtctgagtaagtttgggtgccaggactatgaggtcgtgtgaagacttccagccccatacctgcagaacagtctgcagctcactctgctctgaactgccccaactttgcacagatattctccattcctcgaaatgaaactgtatccttcaaagctcacacatttcgcttattggctcagcgt

SEQ ID NO: 2125 - DNA, 490 bp, Homo sapiens
gccaaaagaaatatctaaccattcaatttataaataattatgtccccaacgaattaaatattatgtcctaccaacttattagctgcttgaaaaatataatacacataaataaaaaaatatatttttcatttctatttcattgttaatcacaactacttactaaggagatgtatgcacctattggacactgtgcaacttctcacctggaatgagattggacactgctgccctcattttctgctccatgttggtgtccatatagtacttgattttttatcagatggcctggaaaacccagtctcacaaaaatatgaaattatcagaaggattatagtgcaatcttatgttgaaagaatgaactacctcactagtagttcacgtgatgtctgacagatgttgagtttcattgtgtttgtgtgttcaaatttttaaatattctgagatactcttgtgaggtcactctaatgccctgggtgccttggcacagttt

SEQ ID NO: 2126 - DNA, 518 bp, Homo sapiens
tacggctgcgagaagacgacagaagggtacggctgcgagaagacgacagaaggggagaaattttattctcaaacttagttggcctcttttttttctgtcagaggaccattcttagtggcactggggaaatcttggcacccagaagaattcaactgcgctcactgcaaaaatacaatggcctacattggatttgtagaggagaaaggagccctgtattgtgagctgtgctatgagaaattctttgcccctgaatgtggtcgatgccaaaggaagatccttggagaagtcatcaatgcgttgaaacaaacttggcatgtttcctgttttgtgtgtgtagcctgtggaaagcccattcggaacaatgtttttcacttggaggatggtgaaccctactgtgagactgattattatgccctctttggtactatatgccatggatgtgaatttcccatagaagctggtgacatgttcctggaagctctgggctacacctggcatgacacttgctttgtatgctc

SEQ ID NO: 2127 - DNA, 145 bp, Homo sapiens
gacgacagagggtcggctgcgagaagacgacagaagggtacggctgcgagaagacacagagggtcgggtgcgagagacacgagggtacggctgcgagaagacacagagggtacggctgcgagaagacacgagggtcggctgcgag

SEQ ID NO: 2128 - DNA, 561 bp, Homo sapiens
acagaagggacggagtgaattatctaatcaacatcatcctcagtgtctttgcccatactgaaattcatttcccacttttgtgcccattctcaagacctcaaaatgtcattccattaatatcacaggattaacttttttttttaacctggaagaattcaatgttacatgcagctatgggaatttaattacatattttgttttccagtgcaaagatgactaagtcctttatccctcccctttgtttgattttttttccagtataaagttaaaatgcttagccttgtactgaggctgtatacagccacagcctctccccatccctccagccttatctgtcatcaccatcaacccctcccatgcacctaaacaaaatctaacttgtaattccttgaacatgtcaggcatacattattccttctgcctgagaagctcttccttgtctcttaaatctagaatgatgtaaagttttgaataagttgactatcttacttcatgcaaagaagggacacatatgagattcatcatcacatgagacagcaaatactaaaagtgtaatttgat

SEQ ID NO: 2129 - DNA, 517 bp, Homo sapiens
ggatggggacctgggactgatctcaggctggggccgaacagagaagagagatcgtgctgttcctcaaggcggcaaggttacctgtagctcctttaagaaaatgcaaagaagtgaaagtggagaaacccacagcagatgcagaggcctatgttttcactcctaacatgatctgtgctggaggagagaagggcatggatagctgtaaaggggacagtggtgtggcctttgctgtacaggatcccaatgacaagaccaaattctacgcagctggcctggtgtcctgggggccccagtgtgggacctatgggctctacacacgggtaaagaactatgttgactggataatgaagactatgcaggaaaatagcaccccccgtgaggactaatccagatacatcccaccagcctctccaagggtggtgaccaatgcattaccttctgttccttatgatattctcattatttcatcatgactgaaagaagacacgagcgaatgatttaaatagaacttgattgt

SEQ ID NO: 2130 - DNA, 489 bp, Homo sapiens
ctaaaacctgcaattctgcatttcaactcttcacttcctcagcctacaaatagctcattagatgacattcacgcatgctgggtataggcaaggaaagtaattttcaaagtacatttgcagttctctttttcagagatgattctatgatattgcctctgaaagttgatgcagcatttttgcctttccaaaaagtatttatccttactgctttttgcagtacttgtattttcacagatggattatctggggtaattttcttcaaagggattttgttatacacagtgaaaatgtattatagagtagaatagtaaagctctaggggtttcagaaagctttgatgaacagatgacaaacatctgaaaccccctccgcactgttacccagtgtgtatataatgacttgttatagctcagtgtgcccttgaatccatacagtttcttaaaagacaataaaatcttattaataaagttaatgtaacttctaagttct

SEQ ID NO: 2131 - DNA, 361 bp, Homo sapiens
ggaccccccagcaagtcgttttgtgtctccttggactgagttaagttacaagcctttcttatacctgtctttgacaaagaagacgggattgtctttacataaaaccagcctgctcctggagcttccctggactcaacttcctaaaggcatgtgaggaaggggtagattccacaatctaatccgggtgccatcagagtagagggagtagagaatggatgttgggtaggccatcaataaggtccattctgcgcagtatctcaactgccgttcaacaatcgcaagaggaaggtggagcaggtttcttcatcttacagttgagaaaacagagactcagaagggcttcttagttcatgtttccctt

SEQ ID NO: 2132 - DNA, 363 bp, Homo sapiens
tacggctgcgagaagacgacagaagggtacggctgcgagaagacgacagaagggtacggctgcgagaagacgacagaagggtacggctgcgagaagacgacagaagggtacggctgcgagaagacgacagaagggtacggctgcgagaagacgacagaagggtacggctgcgagaagacgacagaagggtacggctgcgagaagacgacagaagggtacggctgcgagaagacgacagaagggtacggctgcgagaagacgacagaagggtacggctgcgagaagacgacagaaggggcttttacctcgttgcactgctgagagcaagatgggtcaccagcagctgtactggagccacccgcg

SEQ ID NO: 2133 - DNA, 86 bp, Homo sapiens
ttcttttttatctactagaagatagatctgcttgagtcctaccacactcacatacttttgagatatggctgattatgaaaaggcat

SEQ ID NO: 2134 - DNA, 415 bp, Homo sapiens
gacagaaggggcgcgccgtgggaaccttgacaagcagcatggctgcaggttgctcagaggcgccgcggccagcggcggcttctgatgggtctctggtagggcaggctggcgtcctgccttgcctagagttgccgacttatgccgctgcttgtgcgctggtgaacagtcgctactcgtgcgtggtggccgggccgcaccaaaggcacatcgcgctgtcgccccgctaccttaacaggaaacgcaccggcattcgagaacagcttgatgcggagctccttcgctattctgagagccttttaggtgtccctattgcatatgataacatcaaagttgtgggagagcttggagatatttatgatgatcaaggacacattcatcttaacattgaagccgattttgttattttctgccctga

SEQ ID NO: 2135 - DNA, 403 bp, Homo sapiens
gacttccgagctatgtcagtactattcaggtaacactagggccttggaaattcctgtactgtgtctcatggatttggcactagccaaagcgaggcacccttactggcttacctcctcatggcagcctactctccttgagtgtatgagtagccagggtaaggggtaaaaggatagtaagcatagaaaccactagaaagtgggcttaatggagttcttgtggcctcagctcaatgcagttagctgaagaattgaaaagtttttgtttggagacgtttataaacagaaatggaaagcagagttttcattaaatccttttacctttttttttcttggtaatcccctaaaataacagtatgtgggatattgaatgttaaagggatatttttttctattatttttataa

SEQ ID NO: 2136 - DNA, 460 bp, Homo sapiens
gttactaaaaaatgttttgttcagcctaacatactgagttttttttaactttctaaattattgaatttccatcatgcattcatccaaaattaaggcagactgtttggattcttccagtggccagatgagctaaattaaatcacaaaagcagatgcttttgtatgatctccaaattgccaactttaaggaaatattctcttgaaattgtctttaaagatcttttgcagctttgcagatacccagactgagctggaactggaatttgtcttcctattgactctacttctttaaaagcggctgcccattacattcctcagctgtccttgcagttaggtgtacatgtgactgagtgttggccagtgagatgaagtctcctcaaaggaaggcagcatgtgtcctttttcatcccttcatcttgctgctgggattgtggatataacaggagccctggcagctgtct

SEQ ID NO: 2137 - DNA, 482 bp, Homo sapiens
acccaggtgcctttttgctaatttgatactataatagaatgagacataaaatgaattaatggaaacatatccacactgtactgtgatataggtactctgatttaaaactttggacatcctgtgatctgttttaaagttggggggtgggaaatttagctgactagggacaaacatgtaaacctattttcctatgaaaaaaattttaaatgccccacttgaataacgtaattcttcatagtttttttaatctatggataaatggaaacctaattatttgtaatgaattatttagacagttctaagccctgtcttctgggagttatcaattttaaagagaacttttgtgcaattcaaatgaagtttttataagtaattgaaaatgacaacacaataacactttctgtataaaagtatatattttatgtgatttattcctactaaatgaaagtgcactactgcctcatgtaaagactcttgcacgc

SEQ ID NO: 2138 - DNA, 129 bp, Homo sapiens
tacggctgcgagaagacgacagaagggtacggctgcgagaagacgacagaagggtacggctgcgagaagacgacagaagggtacggctgcgagaagacgacagaaggggtgctcagggagacaaccatt

SEQ ID NO: 2139 - DNA, 483 bp, Homo sapiens
ggtcgatgccaaaggaagatccttggagaagtcatcaatgcgttgaaacaaacttggcatgtttcctgttttgtgtgtgtagcctgtggaaagcccattcggaacaatgtttttcacttggaggatggtgaaccctactgtgagactgattattatgccctctttggtactatatgccatggatgtgaatttcccatagaagctggtgacatgttcctggaagctctgggctacacctggcatgacacttgctttgtatgctcagtgtgttgtgaaagtttggaaggtcagacctttttctccaagaaggacaagcccctgtgtaagaaacatgctcattctgtgaatttttgaaagtcaacagttcaggagaagagaaggaatttgaagagaaaaaggaaaattaaaattactaattaatttttagattcaatatttatatggagttttgaaaaataatagtggtccttaaggaataaattc

SEQ ID NO: 2140 - DNA, 148 bp, Homo sapiens
gaagatagtctgtgcccaccgcatcgctaagtcctagccctctctgcatactccagcacacagaaactgctgcttcacttgtttgttgacttgaaccgaaccttgggtggcattaatgtgcctggcccaagactgaaaaattaagaac

SEQ ID NO: 2141 - DNA, 248 bp, Homo sapiens
gtgttgaggaaccactgaagtattgatttttaagccaaaaatgacatgacagggttttctttatggaaagatcactccaaattgcatgtagataagcctatgaaaagcaaagagataattgtctaggcaggaagtagtgaggacttcttgctttcctcaagatacactgaaggcagttgaaaagctcatttttaaaagtctggtgaaaaccactttgttcacttttgttttgtgggagatgtgacacc

SEQ ID NO: 2142 - DNA, 372 bp, Homo sapiens
aattctttttcctgagattccagcaaggttgtgacattgtcacttttttgttctagactcttttaaattttctgcatttgcctgaaaagcacccctgtaagaatagatttctcatggctctaaaaattattcccaagaataccttacttggttcaaaagcagactgtttctcttcatttcatctcaaatcagacttctgggcaagatgttctttagagtaagcaaacctacaacctaaaaatctcttcaagaggcatctctggtcttgtgacaagacctcttcaaaaacccacagtaaaactcccctccctccagttggccaccagtctgccaccaaacatgaacaaattctgctgctaatcggtttccctt

SEQ ID NO: 2143 - DNA, 148 bp, Homo sapiens
acagaaggggtattttgagtagagatggcttttcaccatcttggccatggtggtcttgaactgctgaccttgtgatccacctgccttggcctccctaaggactaggattacaggtgtgaaccaccatgcctggccttttttttttttt

SEQ ID NO: 2144 - DNA, 414 bp, Homo sapiens
acgacagaagggtacggctgcgagaagacgacagaagggtacggctgcgagaagacgacagaagggtacggctgcgagaagacgacagaagggtacggctgcgagaagacgacagaagggtacggctgcgagaagacgacagaagggtacggctgcgagaagacgacagaagggtacggctgcgagaagacgacagaagggtacggctgcgagaagacgacagaagggtacggctgcgagaagacgacagaagggtacggctgcgagaagacgacagaagggtacggctgcgagaagacgacagaagggtacggctgcgagaagacgacagaagggtacggctgcgagaagacgacagaagggtacggctgcgagaagacgacagaagggtacggctgcgagaagacgacagaa

SEQ ID NO: 2145 - DNA, 486 bp, Homo sapiens
agggtgggaacaaggaaggaaagatgtgaataggctgatgggcaaaaaaccaatttacccatcagttccagccttctctcaaggagaggcaaagaaaggagatacagtggagacatctggaaagttttctccactggaaaactgctactatctgtttttatatttctgttaaaatatatgaggctacagaactaaaaattaaaacctctttgtgtcccttggtcctggaacatttatgttccttttaaagaaacaaaaatcaaactttacagaaagatttgatgtatgtaatacatatagcagctcttgaagtatatataccatagcaaataagtcatctgatgagaacaagctatttgggcacaacacatcaggaaagagagcaccacgtgatggagtttctctagaagctccagtgataagagatgttgactctaaagttgatttaaggccaggcatggtggtttacgcctataatcccagcat

SEQ ID NO: 2146 - DNA, 303 bp, Homo sapiens
atcttcattaaatgttttttgtaagtggtattagaaagaatatgtttttcagatggttctttaaacatgtagtgagaacaataagcattattcacttttagtaagtcttctgtaatccatgatataaaataattttaaaatgattttttaatgtatttgagtaaagatgagtagtattaagaaaaacacacatttcttcacaaaatgtgctaaggggcgtgtaaagaatcaaaagaaactattaccaataatagttttggtaatcacccataattttgtgtttaaacattgaaattatagtac

SEQ ID NO: 2147 - DNA, 505 bp, Homo sapiens
ggttgatacggatattgctcttaaaaaactgcccattcgaggaggagccttgcagagggtgaaagcagttaaaattgtggatgcaccaaaaaagagtattcctacgtaatatactatagagactttttgaaataaagtcagcttataattttttagctgaatatatctttatacatatgtaaagccaatattttagaataagtattttagtataaatattttagtaaaatactataaaaataaaaggacatataatttatttttatggaaaacatcaacatgtaatatcagaagagttgtcatcagtttctttggaaaggctaccaattttactaagtgaaattgtaaaacatagtacatcagttaggactctgttggttgcatgtgaactattctaactagtttaagtcagaaaaaaaatttcttacaggctctatacctatcaaatctaggaggaatttagactacaggcattgctgaatctaaggactaaaactatatgagt

SEQ ID NO: 2148 - DNA, 526 bp, Homo sapiens
gtccgagaccttcaaggtaacccaattgcgaatgccacgatgttacatccgcaaaggatggtgattactggagattgcttatacctggaaactataaacttacagcctcagctccaggctatctggcaataacaaagaaagtggcagttccttacagccctgctgctggggttgattttgaactggagtcattttctgaaaggaaagaagaggagaaggaagaattgatggaatggtggaaaatgatgtcagaaactttaaatttttaaaaaggcttctagttagctgctttaaatctatctatataatgtagtatgatgtaatgtggtcttttttttagattttgtgcagttaatacttaacattgatttattttttaatcatttaaatattaatcaactttccttaaaataaatagcctcttaggtaaaaatataagaacttgatatatttcattctcttatatagtattcattttcctacctatattacacaaaaaagtatagaaaagatttaagtaattttg

SEQ ID NO: 2149 - DNA, 491 bp, Homo sapiens
atggcactcctacaaagtctccccctgctgctttggaagttgtgccatgtatcccaagccctgcagcaccttcagataaagccccttcagaaggagagggttcaggaaattccaatgcaggtagcagtgcactgaaaagaaaactaaggggtgattttgatagtgatgaagaaagtttaggttacaacctagacagtgatgaggaagaggaaacattaaagtcactggaagaaataatggctttgaacttcaatcagactcctgcagctacaggaaagcctcctgctctttccaaggggcttagatctcagtcatcagactatacaggacatgttcatcctggaacttacacaaataccttagaacgtctagtgaaggaaatggaagacacacaaagcaggctctaagcagaataaattccctgaaaaaagaaaaaggaactctgtggactcagatctgaaaagcacaagagaatctatgataccaaaagc

SEQ ID NO: 2150 - DNA, 173 bp, Homo sapiens
tacggctgcgagaagacgacagaagggtacggctgcgagaagacgacagaagggtacggctgcgagaagacgacagaagggtacggctgcgagaagacgacagaagggtacggctgcgagaagacgacagaagggtacggctgcgagaagacgacagaagggtacggctgcga

SEQ ID NO: 2151 - DNA, 486 bp, Homo sapiens
gtataaatatcatgcacaatgttcaactgtaattcaaaaattaccagtgatggatacagaaaaatgtgacatgtaattttttttaaaagtccatggaaatagattcctcgatgattcagaagttgtagacaaggactttaaagcagaaattataaatatattcaggattttaaaaaaatatgttttcaggcccggtgcggtagctcacgcctataatccaccagatgtggtggcgtatgcttataatcccagctactcagaaggctgaggcatgagaatagatagcttgaacccaggaggtggaggttgcagtgagccgagattgctccactgcactctagcctgggcaacagagtgagaccctgtctctaaaaatatatgtatatatatagtcataatgagggaacagatgagaaaataagcagagaaatgaaaattttcaaaaataagtaaaaagttaaggtataatacctgaaatttttttga

SEQ ID NO: 2152 - DNA, 572 bp, Homo sapiens
gtccctgtactggagccacgaggccctgttccagaagaaaactctgcagggccctgagaattccacactgtgcccttccagttgctggcccggtacaaaggcctgaacctcaccgaggatacctacaagccccggatttacacctcacccacctggagtgcctttgtgacagacagttcctggagtgcacggaagtcacaactggtctatcagtccagacgggggcctttggtcaaatattcttctgattacttccaagccccctctgactacagatactacccctaccagtccttccagactccacaacaccccagcttcctcttccaggacaagagggtgtcctggtccctggtctacctccccaccatccagagctgctggaactacggcttctcctgctcctcggacgagctccctgtcctgggcctcaccaagtctggcggctcagatcgcaccattgcctacgaaaacaaagccctgatgctctgcgaagggctcttcgtggcagacgtcaccgatttcgagggctggaaggctgcgattcccagtgccctggacaccaacagctc

SEQ ID NO: 2153 - DNA, 356 bp, Homo sapiens
tacggctgcgagaagacgacagaagggtacggctgcgagaagacgacagaagggtacggctgcgagaagacgacagaagggtacggctgcgagaagacgacagaagggtacggctgcgagaagacgacagaagggtacggctgcgagaagacgacagaagggtacggctgcgagaagacgacagaagggtacggctgcgagaagacgacagaagggaatgaaaagaggaagaagtttgagaaaaagactgaataaatatctcacgtaaaccttcctgaaagataaacgttttcctgaattcagaaactagtagctaacattgcttctggagagcagaaataagcatgtcttctggc

SEQ ID NO: 2154 - DNA, 418 bp, Homo sapiens
gattaataagggaaggtttttatgaattcaaaagtcaattattcaaaagcagggaaagattttgagagagggaacaaagtattcttagattgcgtagaagctgctaggttccagttttaatttttaggtttagttggactctgttatgaaaagataggttatgggtgggcgacaggttgatacagtcttagaaaaagcaggtaatatcaaagtattggaaagctagcatgcatgccctcttacctgggtatcttccccctttttttccttttaaactcttgagcctcctataacgaaggattatgtgtttcaaacctttttttttttactgtttcattaagggtgcttgtgcccaaaatatttacttgtataatatctggaacttgcttaaatacttcagcaaagtcagcatatttac

SEQ ID NO: 2155 - DNA, 130 bp, Homo sapiens
aagactacagaagggacggctgcgagaagacgacagaagggacggctgcgagaagacgacagaagggacggctgcgagaagacgacagaagggacgggtgcgagaagacgacagaagggactgctgcgag

SEQ ID NO: 2156 - DNA, 276 bp, Homo sapiens
gatatttaaaggtttgccttttgcttctcgtgggtacaagccagagagagcagtggttacatgggggtagaatggtgactcgtttttacctgactgtggatcagctgggtggttcctgaatctcactgggctcattgtggctctttgcttgtcctgtatttactgtctgtggtagtgagatagaagaaccaccatgttcttctggttctagactcaaactacagggagaaggaagagatgtgtctggcatcatttccgtgttggagtaactttgtg

SEQ ID NO: 2157 - DNA, 466 bp, Homo sapiens
gaaaaaaggttggagtagctagactttcatatataacttggtgattatcaacctgttgtgtctttatttaattttacatctttttgaagcactgccacaggttattagccaaggtggccttccttcacagtcatgctgcttttttgaaaggtgaatttcaacacatttagtgcctctttcatttctcagtatatatttcaagagcttgtgatgaaatctataggatggtaatgatggacttgtcacctgtatggggaatacttttactactcagaaatgaatttatgtgctgccatttgctataaagttgaactttgtatggcttgaaaaagaaatgacaatatggaacatcccaaggctgtcccatagggttggaagttgtgtagcattcactcccttacctactggcattcccagtgccctctgtccatacctacttctaggattgcaaaggagtcttccaact

SEQ ID NO: 2158 - DNA, 215 bp, Homo sapiens
atattagaatcaaagcaccaagacttcaaaagtccagactactcttcccaaagagaaatgtgcaatcacaatagcatgacatgggtacaaatatggaagtatgttattaaagtattgagaattagctttcctaacctccccacctgcaatcttttactcctaatctccaaaaaatgaacaaatcattggctcaaaatggtcacaaattgtatgtg

SEQ ID NO: 2159 - DNA, 274 bp, Homo sapiens
gtggaaggaccaaattttctgaaaaaattggaacaatcttttatgtgcgtttgctgtcaggagctagtttaccagcctgtgacaactgagtgcttccacaatgtctgtaaagattgcctacagcgctcctttaaggcacaggttttctcctgccctgcttgccggcatgatcttggccagaattacatcatgattcccaatgagattctgcagactctacttgaccttttcttccctggctacagcaaaggacgatgatctgcctgctttcact

SEQ ID NO: 2160 - DNA, 462 bp, Homo sapiens
tacggctgcgagaagacgacagaagggtacggctgcgagaagacgacagaagggtacggctgcgagaagacgacagaagggtacggctgcgagaagacgacagaagggtacggctgcgagaagacgacagaagggtacggctgcgagaagacgacagaagggtacggctgcgagaagacgacagaagggtacgcctgcgagaagacgacagaagggtacggctgcgagaagacgacagaagggtacggctgcgagaagacgacagaagggtacggctgcgagaagacgacagaagggtacggctgcgagaagacgacagaagggaacgcctgtaatccctgcactttgggaggccaaggcgggtggatcacgaggtcaggagatggagaccatcctggccaacacggtaaacctcgtgtctactaaaaatacaaaaattagctgggcgtggtggcgcatgcc

SEQ ID NO: 2161 - DNA, 485 bp, Homo sapiens
gtgaattctgataatgaaaaaagttttcctccaggtatgtttgtttcacattcagtcctaaagccttgagctatgtgtacttccctcacacaggaacaccagctgtcctgtctgtgctctgcctgcgcccaaaactcaatattttctctcagcacagaagtcaaaaatgagatatgccccttataaaaccccttcgattcctgagaaaacataataaagccatatgttgcttccttgttggggctcctctacaatgctcccaacacctgtgacccctaggaagacagggagcaaggtggatctggccaggagtcacaggatatacacccattctggagctttcctctgttgttctagaagatgttatttgattagttggggctgggagcaggggatatatgattttgtggaaaaggtatcagataatcaaatcaggtctgcctctgctatagccagtgtgctgctgcattaaaagggaacaaaag

SEQ ID NO: 2162 - DNA, 526 bp, Homo sapiens
atgctacagctgtaaccccatgcctgagagttgcatgagtactgatgactgcaaattatttatttttgtatcctcaattccttgaatagttgaattggggctcaatacatgtttactaaatgatgattgcatttaactgtgagcagctttttcagatattaatcaaaatgcctgcaaagactacacagttgcaagggacatcagcttatatcccaacattattggttcctgatccatagttgtgagaccttggttgattccctgatagtacagcaactccctgggaatggaagttcaacttgttggctttagaacaacataagcagtttcattgaacattcactgaatgtctcctctgtgctgagcccatgtcagggactgggtctttaatcatgttcttgtatgcagcatccctgcactctacctgcacatgacttctgaacagcatgctctgcccagacagcctcagtgagggccaggacttgaaccctgtggaagcatgtaaagacatatttccgtggtggca

SEQ ID NO: 2163 - DNA, 557 bp, Homo sapiens
gcagatatttaagtgataattacaatataatgtgataactacattcctagtaatactatgatattttgtgagcacggataatgtgttgctttaaaaagataatcagcttcataaactagattctaaattaacaagcacagtgctaacactcccctgactgaacagttatacaaaaggctaagggtcttagaatttattgtctttcttgctgaaagatgattctaataacaataaggttttccccctcctataattttgtgtttccaaaaacaaatggtgaggaaacaatagagtatgtttaccctttctggactcagggacagggtctctaatttggtctctgatttggacagctgctatttgccttagaccttttaggttgtgtttctaaagactgaggctaaattgaacatgacagagaggattcaggtgaacagattagctcatctgtcttccatcagcacacctgttgcccccaacagagggcagaaccatttctctttcaagcatgggctactgataaattcagctaggcgagctagttcagccttctcatt

SEQ ID NO: 2164 - DNA, 136 bp, Homo sapiens
aaagtgggcttaatggagtttttgtggcctcagctcaatgcagttagctgaagaattgaaaagtttttgtttggagacgtttataaacagaaatggaaagcagagttttcattaaatccttttacctttttttttt

SEQ ID NO: 2165 - DNA, 125 bp, Homo sapiens
aggagaattctgcctaagccaactcgaaaaagccgtacaaaaaataagcaaaagcgtcccaggagccgtactctgacagctgtgcacgatgccatccttgaggacttggtcttcccaagcgaaat

SEQ ID NO: 2166 - DNA, 157 bp, Homo sapiens
tacggttgcaaaaaaacaacaaaagggtccggttgcaaaaaaacaacaaaagggtccggttgcaaaaaaacaacaaaagggtccggttgcaaaaaaacaacaaaagggtccggttgcaaaaaaacaacaaaagggtccggctgcaaaaacaccacaa

SEQ ID NO: 2167 - DNA, 244 bp, Homo sapiens
ctgtgagaagttcccacctgaagagactctgaagacctactgggaggataacaaaaactccctcattagctaccttgagcagatacaccgaggagttaaaggatttgtccgagaccttcaaggtaacccaattgcgaatgccaccatctccgtggaaggaatagaccacgatgttacatccgcaaaggatggtgattactggagattgcttatacctggaaactataaacttacagcctcagct

SEQ ID NO: 2168 - DNA, 549 bp, Homo sapiens
acagaagggattgattcttgactgcaaaataccttgaaacccttatataaagactgaagtcaacggagcctagtgaaagacttactttgtggcttgtggttaagtcacatcaaaagacaaatgtggccacgttcaggaattggagacttactggcatggctctacagctgctcagttattaatcatgcagactaacctgtcaacactgggagatgcaacatagcaaaaggacagagaaattagaattttttgtgcagaaagccctaaattcccacctgaatgtaacttacagctcccttacctactctcacacatgccctcaaacatgctagattggcttatacataggccaacacaaaatacaaacgtgacgtgttcatgtagcctagtggctatatgcctattctccatgtaccctgcatggtagtgctgcaaactttaaagtacatttctttcacagctgtattttttttcataagtggcatataaatctcattcaatgaaatggggaaatcacgttgagaagttggtctgtcatcttccattgag

SEQ ID NO: 2169 - DNA, 564 bp, Homo sapiens
gattgcgaatgatgtccatacactcaggagatctaaagccactgttggacgccctttgattgcttggcgatatgtacctataaatgttgttgagacactgagaacacgtggggcccccacccggatagtgagaaaagtagcccggaacctgggcaaggccacttcaggtgtccttgttgtgctggatgtagtcaaccttgtgcaagactcactggacttgcacaagggggcaaaatccgagtctgctgagtcgctgaggcagtgggctcaggagctggaggagaatctcaatgagctcacccatatccatcagagtctaaaagcaggctaggcccaattgttgcgggaagtcagggaccccaaacggagggactggctgaagccatggcagaagaacgtggattgtgaagatttcatggacatttattagttccccaaattaatacttttataatttcctatgcctgtctttaccgcaatctctaaacacaaattgtgaagatttcatggacactgatcacttccccaatcaatacccttgtgatttcttatgcctgtctttac

SEQ ID NO: 2170 - DNA, 436 bp, Homo sapiens
tacggctgcgagaagacgacggaagggtacggctgcgagaagacgacagaagggtacggctgcgagaagacgacagaagggtacggctgcgagaagacgacagagggggaatatgtgcttgcctccttttcaccttctgccatgattgtaagtttcctgaggcctccctataagcataagtctgtacagcccacagaactgtgagccaattcaatcccttttctttttcaattacccactctcatgtatatctttataacagcgtgagaacagattaatacactcctcctcagaaagcattcaatttagttgtgtctaaagtatgccaggtgttctagggtgttatcttagccaataattcttcctcttcagcaagatctatttgcctatgacagcttgacctacatttcctaccatacttgtcagtaacaagtag

SEQ ID NO: 2171 - DNA, 409 bp, Homo sapiens
gttcacactgcttttatgagctgtaacactcaccgcgaaagtctgcagcttcactcctgagccagcgagaccacgaacccaccagaaggaagaaactccgaacacatctgaacatcagaaagaacaaactccagacgcgccaccttaagagctgtaacactcaccgcgagggtccgcggcttctttcttgaagtcagtgagaccaagaacccaccaattccggacacaccattgtctgagtaagtttgggtgccaggactatgaggtcgtgtgaagacttccagtcccatacctgcagaacagtctgcagctcactctgctctgaactgccccaactttgcacagatattctccattcctcgaaatgaaactgtatccttcaaagctcacacatttcgcttattggctc

SEQ ID NO: 2172 - DNA, 182 bp, Homo sapiens
ggccgcccacttttttcataaaagagcagacatcttgttatcctgctttgttccagatttttgctgagaagtagttactgtgcacatgtgtagatttgcagttctgtggctcctgatggatctgagaagatggacgtggaggatgaaaatctgtctgattattttgaactgatgtttgttgc

SEQ ID NO: 2173 - DNA, 440 bp, Homo sapiens
agcccttttccctgtgtgccctttctctggcattactgagctgctggtagtgccctactcactcatccttctgttgtaggcaaatactttcattctttcaggcctcgctcccgctcttgctgctaccgggcatgctgtcaccctttcctgccctctaccccttttaatctggccagcctcaatatttaagtctctgcttgggcatgtgttctagaaaagccatccctgagatgctttattttcattctttttagaccctaatgcctagcatgtatgtagcaggactcaatacaaattttctgagtaaaacaaagactgtttttacaaagatgatgtgcaagactctcccctgcagttttggagcagaggggacagacatatggagaaataatgtacagcttaaggggtaaagatgccgtagaaaaatcagtaaaatacta

SEQ ID NO: 2174 - DNA, 143 bp, Homo sapiens
gaagtcaccctgcagccaggcgaatacaccacaaaagtctttgtcgccttccaagctttcctccggggtatggtcatgtacaccagcaaggaccgctatttctattttgggaagcttgatggccagatctcctctgcctaccc

SEQ ID NO: 2175 - DNA, 103 bp, Homo sapiens
gagtcatttgatcttatgattaaagaaaatccatcctctcagtattggaaggaagtggcagaaaaacggagaaaggcgctgtatgaagcacttaaggaaaatg

SEQ ID NO: 2176 - DNA, 139 bp, Homo sapiens
gaatttttaactttctttcactacattggcacttaaattttttctttataaagctttttgaaggtcataaacaaagaccataattgatgatagacctaatacatttcctctgtgtgtgtgtgtaacattccaaatactt

SEQ ID NO: 2177 - DNA, 155 bp, Homo sapiens
gccacacgctacatagccccaacagtacttaccgatgttgatcctaaaaccaaggtgatgcaagaagaaatttttggaccaattcttccaatagtgcctgtgaaaaatgtagatgaggccataaatttcataaatgaacgtgaaaagcctctggc

SEQ ID NO: 2178 - DNA, 73 bp, Homo sapiens
aaaggagtgctacaaagttaaatactgatttttaaaaaaattggcattcacacaatttctactaccacagatg

SEQ ID NO: 2179 - DNA, 238 bp, Homo sapiens
gcttttcaccctattgatggctttcttcagagtctaccttaccatatatacccttttatctttccattacacaaggtggtttatttaagtctgtacatcttggttaatatctggacaatttccattcatgacggtgattttcgtgtcccccaaatcttacagccatttattaatggctcagctcatcatacagaccaccatatgttctttgactataattatggacaatatttcactt

SEQ ID NO: 2180 - DNA, 422 bp, Homo sapiens
gtgagctgtggccttttgcgaggtgctgcagccatagctacgtgcgttcgctacgaggattgagcgtctccacccagtaagtgggcaagaggcggcaggaagtgggtacgcaggggcgcaaggcgcacagcctctaaacgactcgctttccctccggccaacctctgaagccgcgtcctactttgacagctgcagggccgcggcctggtcttctgtgcttcaccatctacataatgaatcccagtatgaagcagaaacaagaagaaatcaaagagaatataaagaatagttctgtcccaagaagaactctgaagatgattcagccttctgcatctggatctcttgttggaagaaaaaatgagctgtccgcaggcttgtccaaaaggaaacatcggaatgaccacttaacatctacaacttcc

SEQ ID NO: 2181 - DNA, 284 bp, Homo sapiens
gtttaagtcctgtctgtctgtaaggcgtaaaatctgtccgtctgtaaggcgtaaaatgagggttgttaatccatcacaagcaaaaggtcagaacagttaaacactgcctttcctcctcctcttattttatgataaaagcaaatgtggccttctcagtatcattcgattgctatttgagacttttaaattaaggtaaaggctgctggtgttggtacctgtggatttttctatactgatgttttcgttttgccaatataatgagtattacattggccttgggggac

SEQ ID NO: 2182 - DNA, 267 bp, Homo sapiens
gaaatatgttctccacgggtagtgggaacacttatgcctacggggtcatggacagtggctatcggcctaatcttaaccctgaagaggcctatgaccttggccgcagggctattgcttatgccactcacagagacagctattctggaggcgttgtcaatatgtaccacatgaaggaagatggttgggtgaaagtagaaagtacagatgtcagtgacctgctgcaccagtaccgggaagccaatcaataatggtggtggtggcagctgg

SEQ ID NO: 2183 - DNA, 136 bp, Homo sapiens
gtccccaacgaattaaatattatgtcctaccaacttattagctgcttgaaaatataatacacataaataaaaaatatatttttcatttctatttcattgttaatcacaactacttactaaggagatgtatgcacct

SEQ ID NO: 2184 - DNA, 338 bp, Homo sapiens
gactatttttcttttggatgattgattttccttttgctataagtttttagaagcttttttctatgtattttaacatttctgtctgtgatattttgtgtgtgaaaaaaaacacactcaatgtgttttttcctatttttctcacttgaaaacaccaatcaacacagacagaagacttctgtgaccaaatatgggggatctctctgcaagaaaaggcagcccgttctgcagtagacaccagctgggtggcctccaattcagttttgacaccatctatttggagatagcatcagatcctacaggttgagggctcaggccccaaaactggccacccccaaccc

SEQ ID NO: 2185 - DNA, 368 bp, Homo sapiens
ggtgggcaaaagcgggatggggtggctggaccatgcggaactggatggtccggatattatgcctggtgatcctgatctgcttcagtgcctccacaccaggctactcctccctgtcggtgattgagatgatccttgctgctattttctttgttgtctacatgtgtgacctgcacaccaagataccattcatcaactggccctggagtgatttcttccgaaccctcatagcggcaatcctctacctgatcacctccattgttgtccttgttgagagaggaaaccactccaaaatcgtcgcaggggtactgggcctaatcgctacgtgcctctttggctatgatgcctatgtcaccttccccgttcggcag

SEQ ID NO: 2186 - DNA, 375 bp, Homo sapiens
cagaggagcaagtcagtggctcgcagggaccttctgaagagaaacctgctccgttggcgacagaagtgtttgatgagaaaatagaagtccaccaagaagaggttgtggccgaagtccacgtcagcaccgtggaggagagaaccgaagagcagaaaacggaggtggaagaaacagcagggtctgtgccagctgaagaattggttgaaatggatgcagaacctcaggaagccgaacctgccaaggagctggtgaagctcaaagaaacgtgtgtttccggagaggaccctacacagggagctgacctcagtcctgatgagaaggtgctgtccaaaccccccgaaggcgttgtgagtgaggtggaaatgctgtcatcac

SEQ ID NO: 2187 - DNA, 297 bp, Homo sapiens
gcttgaaatgggctgagtccctcttgctcacccttgacttggaaaaaccagtttctcttttattgtctgttactaatctctattctaaaaattcagctcaattctcaaccatactccaaactctctcttttccagctacctttactccctctccttcaattccactttcctctgcttacttttttttttttttttaacagggtctaattttgccccccaggcaggagggcaggggctaaattttgggctcattgaaccctaaacctccaaggttaaagcaattttcctgcctaaccc

SEQ ID NO: 2188 - DNA, 561 bp, Homo sapiens
ctggccacacaggaagagctgttcttcctgtgtctgaatccctgtctccctgctcattcattcatcgctcgcctctatcctcagtctcttcatttattacaggctctttcttatccgtatttaaacaccgtcatgtcttggccatcctgcaggaaataagcagagttcctctgtgtccagcactttatcctaaatttgttactccatgattacttcgtagaacctgccgatgttttccaagtagacagttttgttcagttaatctttatttattcattcccacagtatttactgttttctgatgcagagatgaacaattgacagcttctgttctcaaggagcttatgggggagggaaaatgccccccaaacatccctttaataattaaaaaacaacaaaactttgattgtacgctttttctttgaagaaagaggcttactgtaagttggtgttttacctactaattgaaatatatgtctgttttttgagacagagttttcactcactctgtcgcccaggctggaatgcagtggcactatctctgctcactgcaactgctgc

SEQ ID NO: 2189 - DNA, 332 bp, Homo sapiens
gtatgaaagaacctttttaaaatggctggttgttccagatccagatttctctgcacactggacttcgtagagtaagtgtggtagacaaagagactacactgcacaaccaccagtgaatatcattgctaagaagactttgggtcgtgtttctcagccactctcacagcttttgtagacttatttgattttgaaacaagcagttagctaaatctattttccttttatgcatatatgttaattggctcaacttaatatggtgttcttacagaatatgagcccatttgaaataaggttttaggcaattttgctgttggctctgatttgtatatagc

SEQ ID NO: 2190 - DNA, 541 bp, Homo sapiens
acagaagggggcaggcagcgcagggcagacggccgcaggagaagcaagatgaatgcaggctcagatcctgtggtcatcgtctcggcggcgcggaccatcataggttccttcaatggtgccttagctgctgttcctgtccaggacctgggctccactgtcatcaaagaagtcttgaagagggccactgtggctccggaagatgtgtctgaggtcatctttggacatgtcttggcagcaggctgtgggcagaatcctgttagacaagccagtgtgggtgcaggaattccctactctgttccagcatggagctgccagatgatctgtgggtcaggcctaaaagctgtgtgccttgcagtccagtcaatagggataggagactccagcattgtggttgcaggaggcatggaaaatatgagcaaggctcctcacttggcttacttgagaacaggagtaaagataggtgagatgccactgactgacagtatactctgtgatggtcttacagatgcatttcacaactgtcatatgggtattacagctg

SEQ ID NO: 2191 - DNA, 195 bp, Homo sapiens
gctgttgcccaggccctagaggtcattcctcgtaccctgatccagaactgtggggccagcaccatccgtctacttacctcccttcgggccaagcacacccaggagaactgtgaacctggggtgtaatggtgagacgggtactttggtggacatgaaggaactgggcatatgggagccattggctgtgaagctgca

SEQ ID NO: 2192 - DNA, 114 bp, Homo sapiens
tggtgttggaaagataatcttctgtctcgattactcgaaatgagtttaatctggaaagcaggagcaccgttggagtcgagtttgcaacaagaagcgtccaggttgatggaaaaa

SEQ ID NO: 2193 - DNA, 447 bp, Homo sapiens
aaggacataaaagaattttataaaaacattttatatattttaagattgaaaagtttaggcaaatgtaagggcagagcatcaccaaacattatagtgggaaaggatgtaagaaacaaagtctagtgacttcatttttaaataagcaaattgaggcacagggtagggcacaaaggttacacaaaccatattgaccaccatcgcagatcatccttagagacctagacgtgatagtctatctgaatttacaatctgaggcttcaatctttccactacaatcagggtctaagcaatgtttcctgaggagcaaattgccttgggctcattttttgagacttgttgaattgtagtccccttcatcagaatctcaaattcatatataaaggagtatcctgaaaacattggttgttatcaaaagaggtttttttgtgtgtttttttttgttttttt

SEQ ID NO: 2194 - DNA, 474 bp, Homo sapiens
gaagcaatgcatcgtggcctcctgtgaatccgccatactacatcccgctggttgagctggtcccccacccggagacggcccctacgacagtggacagaacccacgccctgatgaagaagattggacagcgccccatgcgagtccagaaggaggtggccggcttcgttctgaaccgcctgcaatatgcaatcatcagcgaggcctggcggctagttgaggaaggaatcgtgtctcctagtgacctggaccttgtcatgtcagaagggttgggcatgcggtatgcattcattggacccctggaaaccatgcatctcaatgcagaaggtatgttaagctactgcgacagatacagcgaaggcataaaacatgtcctacagacttttggacccattccagagttttccagggccactgctgagaaggttaaccaggacatgtgcatgaaggtccctgatgacccggagcacttagctg

SEQ ID NO: 2195 - DNA, 527 bp, Homo sapiens
atagttcgaggtcttggctttacatctttaaacaactttgattttacttttgtatttggtgatagatactagtctgttttcattcttctgcatatggatatccagttttttcaataccatttcccaccagtgtatgttcttggcacctttgtcaaaaatgagttcactgtaggtacatttgtacatttgttacttttctctattctgttccattgatctatgagtctatttttatgccagtaccatactcttttggttgctataattctgtggtataatatgaagtcagaaaatataattcctccagttttatttatttatttatttttgcttaggatagtattatttcttatagtgaaagcattctatgttatttattattagtctaattttgtagttttacaatgctatcctcttttacaaagctatgatcaactcagtgtgtccagatcaggatcatttgtagctatttgcaaaagtagcaatattctggctgggcatggtggctcatgcttatattcccagca

SEQ ID NO: 2196 - DNA, 104 bp, Homo sapiens
gacagagggggcgaccgtatccgctagcgcggcctgtgatgcgcttgggctccctgtgcgttcccacttgcagggcaccacaaggagaatgggcgtcatgactg

SEQ ID NO: 2197 - DNA, 414 bp, Homo sapiens
ggctcaatatgacacctagatatgtaacctcttcatggaaaatttgggctttcttttttgatattttgtaacttgctttctataggagatggaggagatcctgggttccccgataacactcctctcaggttggggcaggcaaagaaagctcgtctatgtactgcaacaaggcacagttgttacttggctgggtataggccatgaggtctggggccaatgtttctctaaagattgtgggagagaacggggcatggtggtttgcgcctctcatcccaacactttgggcggccacatggctggatcatgaggtcaggagtccaagaccagactggccaagatggtgaaaccctgtctttaccaaaaatacaaaaattaggcagccatggtggcaggcgcctgtaatccagctaccca

SEQ ID NO: 2198 - DNA, 407 bp, Homo sapiens
ggagccttgcagagagtgaaagcagttaaaattgtggatgcaccaaaaaagagtattcctacgtaatatactatagagactttttgaaataaagtcagcttataattttttagctgaatatatctttatacatatgtaaagccaatattttagaataagtattttagtataaatattttagtaaaatactataaaaataaaaggacatataatttatttttatggaaaacatcaacatgtaatatcagaagagttgtcatcagtttctttggaaaggctaccaattttactaagtgaaattgtaaaacatagtacatcagttaggactctgttggttgcatgtgaactattctaactagtttaagtcagaaaaaaaatttcttacaggctctatacctatcaaatct

SEQ ID NO: 2199 - DNA, 487 bp, Homo sapiens
agaagagtagcatcagagccctgacctcctgtctttgggtgtaaaatggtgagaggccggtgtccggctccttcccctgtggtttgggctggtgaactgagcccaagtgtattctctggcctgggccccttccagaatcagtgcgagcgtcctgcagaggcatggccttcctgccactgcagagtgggaagcttcctgggggacctcagccagctccggggctctcatcttccactcggatctcagattggttcgttgtggatgctctggctaggctcggcggccttttccaggcttcaggcctgaacaaaacaggctgtttgctgtgaggagctagatgacaccaagacacagacacgtactcttcaccggctccttttgcttctccttcctgcaggacgtgagttatgtctggtcccaaaacccttgagtaaactagctgagccattgcaaatgaaggtacagatggattgaaacataaaattgt

SEQ ID NO: 2200 - DNA, 572 bp, Homo sapiens
ggggcatcacggacctaccaatatgtgatgtcacccctggtggcccagctgtgtcatggagaaactccagctgggcccagagattctgcagcgggaaaatccaaggcttatttatgccaggctgagtggatttggccagtcaggaagcttctgccggttagctggccacgatatcaactatttggctttgtcaggtgttctctcaaaaattggcagaagtggtgagaatccgtatgccccgctgaatctcctggctgactttgctggtggtggccttatgtgtgcactgggcattataatggctctttttgaccgcacacgcactggcaagggtcaggtcattgatgcaaatatggtggaaggaacagcatatttaagttcttttctgtggaaaactcagaaattgagtctgtgggaagcacctcgaggacagaacatgttggatggtggagcacctttctatacgacttacaggacagcagatggggaattcatggctgttggagcaatagaaccccagttctacgagctgctgatcaaaggacttggactaaagtctgatgaacttccca

SEQ ID NO: 2201 - DNA, 404 bp, Homo sapiens
tgggaatatgcacaaacttggcttctttaaccaagatattattggaaaattctctaaaagttaatagggtaaattctctattttttgtaatgtgttcggtgatttcagaaagctagaaagtgtatgtgtggcatttgttttcactttttaaaacatccctaactgatcgaatatatcagtaatttcagaatcagatgcatcctttcataagaagtgagaggactctgacagccataacaggagtgccacttcatggtgcgaagtgaacactgtagtcttgttgttttcccaaagagaactccgtatgttctcttaggttgagtaacccactctgaattctggttacatgtgtttttctctccctccttaaataaagagaggggttaaacatgccctctaaaagt

SEQ ID NO: 2202 - DNA, 500 bp, Homo sapiens
gaagcatctccatcctggacttactgggtgaggctgccctggcagaaagcacagtgcctgcagacatgctgtcactgctccacacatcaacgctggcagtccttggggctctgtgtgtatatggtgcaggtcacctaaagcaacctcaaatttccagtactaaaacgctgtcaaaaacagcccgcctggaatgtgtggtatctggaataacaatttctgcaacatctgtatattggtatcgagagagacctggtgaagtcatacagttcctggtgtccatttcatatgacggcactgtcagaaaggaatccggcattccgtcaggcaaatttgaggtggataggatacctgaaacgtctacatccactctcaccattcacaatgtagagaaacaggacatagctacctactactgtgccttgtgggaagtgcacagcagcagacagtttgagccatcccattcaataaatgtttattgagtctttgtttataattacgaa

SEQ ID NO: 2203 - DNA, 561 bp, Homo sapiens
ggagaacgcagtcctggccttggcccagatagagaactcagccgcagtggaaaaggctattgcccactatgaacagcagatgggccagaaggtgcagctgcccacggaaaccctccaggagctgctggacctgcacagggacagtgagagagaggccattgaagtcttcatgaagaactctttcaaggatgtggaccaaatgttccagaggaaattaggggcccagttggaagcaaggcgagatgacttttgtaagcagaattccaaagcgtcatcagattgttgcatggctttacttcaggatatatttggccctttagaagaagatgtcaagcagggaacattttctaaaccaggaggttaccgtctctttactcagaagctgcaggagctgaagaataagtactaccaggtgccaaggaaggggatacaggccaaagaggtgctgaaaaaatatttggagtccaaggaggatgtggctgatgcacttctacagactgatcagtcactctcagaaaaggaaaaagcgattgaagtggaacgtataaaggctgaatctgc

SEQ ID NO: 2204 - DNA, 387 bp, Homo sapiens
atttaccacgtggctgagaaagagacactactggcctgggtgacctccaaattcgagctctatacctgcctcagccctctggtgaccaaggcaggtgcagtcttggtagtgaccaaactcctgcgctgggtgaagaaagaagaggaccggctcttcattcgttacccacccaagtactccacaccaccagccacctctacggaccaagctgcccataatggcttgttcactggactctgatagttggagctcccagaccaggcagtgctgggagcaaccacctttgttttttaccttctgtctaccctggaaatgtgtgtgggggtgtgtctgtggccagtcattgtctccctaagcaatggggcaaggtctgagggcccaccgatg

SEQ ID NO: 2205 - DNA, 384 bp, Homo sapiens
tgcctctgaccagaattttgactacatgtttaaactgcttatcattggcaacagcagtgttggcaagacctccttcctcttccgctatgctgatgacacgttcaccccagccttcgttagcaccgtgggcatcgacttcaaggtgaagacagtctaccgtcacgagaagcgggtgaaactgcagatctgggacacagctgggcaggagcggtaccggaccatcacaacagcctattaccgtggggccatgggcttcattctgatgtatgacatcaccaatgaagagtccttcaatgctgtccaagactgggctactcagatcaagacctactcctgggacaatgcacaagttattctggtggggaacaagtgtgacatggagga

SEQ ID NO: 2206 - DNA, 152 bp, Homo sapiens
ggtagttaaaagacgagtgaatgctctcaaaaacctgcaagttaaatgtgcacagatagaagccaaattctatgaggaagttcatgatcttgaaaggaagtatgctgttctctatcagcctctatttgataagcgatttgaaattattaatg

SEQ ID NO: 2207 - DNA, 561 bp, Homo sapiens
gatcaccacagccataaaattgtttaagaaagatttatataatgtttacaaatctggaatcaaggattttggctgaaatcctttaagagatattagagcaagtatttaattcaggtattttcaagttttaaaacttaacctgtttacctactaaaaataaaatagctagtttttttctgcatataaaagttcattgaaatgatatgcccttatttgcaatacttttcccataaagttttaagtgtgaaagaattgtaatttactagatatgtttggtatgggatattttgttaggcaagttttcttttttcttcttaaattgcaataggcttccaaaaagagtataattgtttcagaacaaattaactcttggcattatacgtctccctttttctttacagtattagtaaaaagaaaaattgtacactttctgattttaacttcactaatgtaattactctctcaagaagcttttaaaatttaaattaccatcacacaaccttttttatagtaaagccaacatttgttctctcaccaaaccccatgccaaattcatcatga

SEQ ID NO: 2208 - DNA, 442 bp, Homo sapiens
ggccccgtggcgcccgagtgcactgaagatggcggctgctgtaggacggttgctccgagcgtcggttgcccgacatgtgagtgccattccttggggcatttctgccactgcagccctcaggcctgctgcatgtggaagaacgagcttgacaaatttattgtgttctggttccagtcaagcaaaattattcagcaccagttcctcatgccatgcacctgctgtcacccagcatgcaccctattttaagggtacagccgttgtcaatggagagttcaaagacctaagccttgatgactttaaggggaaatatttggtgcttttcttctatcctttggatttcacctttgtgtgtcctacagaaattgttgcttttagtgacaaagctaacgaatttcacgatgtgaactgtgaagttgtcgcagtctcagtggattcccacttt

SEQ ID NO: 2209 - DNA, 438 bp, Homo sapiens
atagcaaatgcttacctaaaaatagcaacaacctgcgaaaaacatcatgtgttttgccgtttttatttgaatgactatttactttgcagtctactagcaagctatagaattgtgtgatacgcagaattttaactgaagtgctttaagtgaacatttaaacatgataaaccatattaatggtgtttatgttaatatacttgaagtgaacattttctcttcatcatgagtaatataacgtacccctcaatgaaagtctagaattagagtaaatttgctaattaattaataacttttccataatatttttagttatgtgcttaaggctcttttagtgtttctcctactttttaatagcttatgccttttttgcctttgttttttattggttcattttaaagcaaaaacctcataacgtgttatttggaagcactgtaacct

SEQ ID NO: 2210 - DNA, 451 bp, Homo sapiens
acaaaccccttttagtactgttttgagttttgtcattaaaacagccacctttgtattttataatttatgacagaatgaagtcattttgaatctacatgaatgaacactttggattttgttgtagtttgattctagggtagaaccagtccatgctgtttttattttttatctccgtaattgtagaatcatgtttactcaacgtttttccccagctgcctcagtaactgggcactcggaggccttggcacgggttctggaggacagacagcaattctatgagtgctcactgagatacttgctggagacctcagaaaacacaagtgccttctccacggtgcaattcagacttcagtgatctccagtggtcaaaagacatttacccttaatatcagacaacatttatattttagtgaagaaacaagttctcgggtggggaatctatgtttcactc

SEQ ID NO: 2211 - DNA, 541 bp, Homo sapiens
aggggtggcagtagacaacaacccagaaatttagacagggatctcttacctttggaaaataggggttaggcatgaaggtggttgtgattaagaagatggttttgttattaaatagcattaaactggaattgacaagagtgttgagcatccctgtctaacctgctctttctctttggtgccccttatctcaccccttccttggaatttaataagtctcaggcatttccaattgtagactaaaaccactcttagcatctcctctagtattttccatgtatcaggaaagaggtgtcttatgtagggagggggcaagtatgaagtaaggtaattatatactactctcattcaggattcttgctcccatgctgctgtcccttcaggctcacatgcacaggaatgctacatgatggccagctgcttccctccttggttatcatccactgcagctgctagttagaaaggtttggagggatgacttttagtaaatcatggggattttattgatttattttcacttttgggattttgtggggtgggagtg

SEQ ID NO: 2212 - DNA, 484 bp, Homo sapiens
cgaaaacggcccaggcatccacccagccgagagcacgatggctactggggagctcggggacttgggtggctactacttcaggttcttgcctcaaaaaaccttccagtctctgagctctaaggagatcaccagccggctccgccagtggtccatgctgggcagaatcaaggcgcaggcgttcggctttgaccagacctttcagtcctatcggaaggatgatttcgttatggcttttttcaaagacccaaatgttattcccaatttgaagttactttcagattcttctggacaatggatcatattaggaactgaagtgaaaaaaattgaagctataaatgttccttgcacacagctttcaatgtcattttttcatcggttatatgatgaagatattgtacgagacagtggacatattgttaaatgtttagattctttttgtgatccatttctcatttctgatgagttacgaagagtaagtacagaa

SEQ ID NO: 2213 - DNA, 442 bp, Homo sapiens
aaaaagaacaaactttcttaaatgttgcttttacatctttggctcagaacacagtatttctaactttgtttttcttattacttaggaaactagagaaatttctccttggaaatgtcagggggaaaatacagtatttcggattaactttagaaaactcaggtttaaggcttattgaccagaagacctctttcttatccaagtgtagggcaattcattgcaccttgaggtaggggaggagcaaaatcaggctggcaggggtccacggcagggcaagctctaggagctggtgagtctagaaggacggactagagagagctggcattggaatggacaatcgctagagggcgccggagcactagcagagtcaacctccgggacccataagcagggcttctaggataaggaatggagtttgacccaaccccaagatatgccctgggga

SEQ ID NO: 2214 - DNA, 413 bp, Homo sapiens
aagacgacagaagggtacggctgcgagaagacgacagaagggtacgggggggagaagacgacagaagggtacggctgcgagaagacgacagaagggtacggctgcgagaagacgacagaagggggttctgttgtctacacggaggccagatttctttatccagggagccagaaaaacaagtgcattttcttccttcagtaaacaggtcactggctcatcactacttgaattagcccctttgttttctccttattagggggaaggaacactttatttcttcctcatttcttccagttgtctggtgcctggccacttcataattgtattttgagagaatagatattaattttcttcaacaaaaggcggagctccttgatgacacaacataattcaatttccgttctctcccctca

SEQ ID NO: 2215 - DNA, 428 bp, Homo sapiens
atttgatcactgaggaaaatccagaaagctacacaacactgaaggggtgaaataaaagtccagcgatccagcgaaagaaaagagaagtgacagaaacaactttacctggactgaagataaaagcacagacaagagaacaatgccctggacatggctccagagatccacatgacaggcccaatgtgcctcattgagaacactaatggggaactggtggcgaatccagaagctctgaaaatcctgtctgccattacacagcctgtggtggtggtggcaattgtgggcctctaccgcacaggaaaatcctacctgatgaacaagctagctgggaagaataagggcttctctctgggctccacagtgaaatctcacaccaaaggaatctggatgtggtgtgtgcctcaccccaaaaagccagaacacacctt

SEQ ID NO: 2216 - DNA, 539 bp, Homo sapiens
atgccaggtgagtcctaagaattcaagtcctgttctcattaaaacctgctggctagactcatatggactgactggtgggaatagtttgcgagtagatttagaaatgggacttttaggcttccttccccacttgcttaaaccaaaaagcttgaaaattaataggtgtctctttgttatatatttttttcactgtgcactcacaatctttctgaacgaggatgctctgagatgtatattggtccaattaaatgcatctgattaaaactgtcaaaccaaaaaggaagtgagttgaaaagacattctctaccgagaatgcagcaagagttgtagatatcaagttactgagttgctgcttgagaactgaattataaataaatgtgttaggtagtggaattttgttttgttttccccaaaggagaaatattcgccacatggaaacaaaatttattcagcatattttcattctgtaattgcaccattgctattcttaattctttgtgtttctgatttaaagggaaaacacacacaaaaacagactg

SEQ ID NO: 2217 - DNA, 573 bp, Homo sapiens
acctaaatatgagcccagaaaacggaggatgggggtggggcgccttcctggaggtgacacttgatgggggtgtgttctggttactgttctaaggctgtgccatcagctccttcctcccctgttcattctgcattctctagtcagttggctaagaagtgactcttgcaactaaaaaaattaagaaattcacttcccctctaggaggtgatgatagggtttctaatggttatatgtatatcacattcccatttgcttagaaagtctgattgtagctatgattgtccgtaggcccatactagagttcatggatatgttatactgaaccaggccagagcaaacagaaaaagaaggttgagggcaatggacaaggaaggaataaagggagaagagggaaaacagaaaacctgatgctggggacacagcatcagctcaagacgtcaccctccattctgcactcagaaaatggcacttgggggactgggcgcagttggtctttaccacttttcatgtctaaaacatttgtttgtggtctataagatgaaacatcatttcaatcgtaaaatttcccattaa

SEQ ID NO: 2218 - DNA, 602 bp, Homo sapiens
agaagattacatttgggagaagccacttcccctctctggatctctgtttcactacctatgaggagattaaactagactgtctataagagtccttctctgagttgttctctgatcttggattctaaaggctggcacttgtatgaaaccagctgtcctgctttctggaaaaagtccagcgccattgttaagcaggaaaatttctcctgtgtggttctgccaaaacaaaagctcagactattattcagatctggctgggcaagagagatttgtcaactacatgtttattgaatgatgaaacagctgcacacattcctgcacagaaaacacacattgtctaggtgacaaagagtaatgtggacacatcagggccatcttctgacctttgctagtttttttgttagtttgttttgtttttgtttctttgtattttttgtttgtttttgtgtctgtttttgagacagggtctcattctgtcctccaggctggagtgcagcagcatgatcacggctcactgtagccttgacctcccaggctcaagcgatcctcccacctcagactcccaagtagctgggactacagtcatgcaccaccatgcccagcta

SEQ ID NO: 2219 - DNA, 367 bp, Homo sapiens
acagctgataattggttaggctcaggatttgaaaccagccaaactgagtagtaattatgtgtttacctgttatgctcttatttccgaggaatagatgacagttctcactagagatagccaaatttgtgtgtttgtgtatgtgtgtgtatgtgtgtgtatgtgtgtgtgtgtctgtttcttttttttttcccctttgtttttgaaacagggtcttgctctgtggcatgggctggagtgcagtggcactgtcacagctcactacatccttgaccttctgggttcaagtgatcctcctacctctacctaagcctcccaagcagctgggactgcaggtgcatgccaccatgcctggctaattctttaattt

SEQ ID NO: 2220 - DNA, 235 bp, Homo sapiens
aagcattattcacttttagtaagtcttctgtaatccatgatataaaataattttaaaatgattttttaatgtatttgagtaaagatgagtagtattaagaaaaacacacatttcttcacaaaatgtgctaaggggcgtgtaaagaatcaaaagaaactattaccaataatagttttgataatcacccataattttgtgtttaaacattgaaattatagtacagacagtattctct

SEQ ID NO: 2221 - DNA, 554 bp, Homo sapiens
atagtacataattgataaattaatttcagatacatattcttgctttgaaccaaattagtaaagtgactaatttatctgcatttcagagaaattgtgcagtttaaagttgaatctagagagggagggctggtttctttggggttaaatttctgtagattcccaaacactgacatcaaatctttagtggaacctggaaaaaggaaggagaaagtattttagctcagttaatgttcttccttcgttagatgtgatgaaaaatacacagtctaaccattgtgtagaagaaatacttgtttcttaacagcagcaacaaaatgtcatttattaagcacttacagacatcttaccaggctttattctttatttcatttagttgttacaaccagcttatgaagtagtttatcagtcagtattagacatctaacaataacagaccagcaaccctcaaatcccagtgagatatatatatgtgtatatatgtatatttgatgatatatatgtatatttgatgatatatatatatgtatatttgatgatatatatatatatatatg

SEQ ID NO: 2222 - DNA, 398 bp, Homo sapiens
gaaatccagtaatttcttgagcagaagaaagggaagtggaattactgtagaaattatgcatagttttatattatctgtgtagtagcctgtttaaagtgatcattgctagtgcatggtatagaattacaaacttgtaaatacttctcaagattgccactttaaaaaaaaaagcaaaaagagctctgtagccctatttttttttttttttccaacaggaaatttgtttttgtttcaaaatggggaaacaccctttattttttgtgggccacataaatgtcatccttttgtttattgcaccaaaaaaaaagtgaaaaatggttgatacaggggcaagctgttctttttaggttactttaaaaagtcttggattttcggatttccaaaaaaagcttagggaa

SEQ ID NO: 2223 - DNA, 551 bp, Homo sapiens
gtttgaaagattttctaaccgtgccttttagttagtcttaaatttctaattgtagttaaaaacatgccattgtcatttctgacattttaagtatatggtttagaagtggttagtatagttctattgttttgcagtaggttttagataatttgtgtcttacaaaagtaaaagtgaatactcattacttatgaaagaagttagttagcttgccttaggtagatagcaagagaagagtccctggaaagtccctggtcagtgcctcatccctgcataacatataaagaagcctggaaaaaatcaagctgcagacactaacaagggaactagcatatgttgttgtgcttggggacatgcccgtggctgcacagatagaaaaacctctggcccatttggataaaaacttgtagaaacctccagctcactcagataaaggaacaagaacgacctagcatagaaatgcctttgtttggccgggcacggtggatcatgcctgtaattccaacaatgtcggaggcagctgtgggcggatcatttgaggtcgggagtttgag

SEQ ID NO: 2224 - DNA, 365 bp, Homo sapiens
gtctgcttcattcattttggctctatgtggtggcagaagggcttctggcatctccggacctttatgcctcccaggtccaaacccagccagaaaggagagtgagagtgctgagtgcaaaactctcctatagctcctatacaagtccaggatttgctattagactccttgaattatgtgcccagctctgagccaatggctgtgcttaggaggctcctgtctcatgcacccaccccagtactgggcatcagaaacaaccagtgatccctataatgaaccacgggttcacagacttaagtgtaatcctgcagcagggcctcaggaagacttgaaacccaaaatcagaaagccatggtttcttgtcttcc

SEQ ID NO: 2225 - DNA, 500 bp, Homo sapiens
cagaatcaaagacctaggcatggattccagaaaacaccagaacctgactttagatttaagccacagccatggacaagattaacctggtgtggagtttcaaaatagagaagccagatggtgttgtaccacctatagcacctttcaattacacacagtcatccatgcatttatgaaaaacccataccctgggattgattccagagaacaacttgctgaagaaattggtgcttcagagtcaagagtccaaatttggttccagaatcgaagatctagatttcatctccagagaaaaagagaacctgttatgtccttagaatgagaagaccagagaagaccaggggcaaggtttctgagggacttcaaggtacagaagatacacaaagtggcaccagcctcactagcactctcatttctcaagagccagaacatggtgaatacaatcaagttcagtgtatttgttaatatcaatttgggccccaaatctctctcacagtcttcct

SEQ ID NO: 2226 - DNA, 392 bp, Homo sapiens
tacggctgcgagaagacgacagaagggtacggctgcgagaagacgacagaagggtacggctgcgagaagacgacagaagggtacggctgcgagaagacgacagaagggtacggctgcgagaagacgacagaagggtacggctgcgagaagacgacagaagggtacggctgcgagaagacgacagaagggtacggctgcgagaagacgacagaagggactgttggcccgggccgagaagaaggctgctggcaaaggggacgtcccaacaaagagaccacctgtccttcgagcaggagttaacaccgtcaccaccttggtggagaacaagaaagctcagctggtggtgattgcacacgacgtggatcccatcgagctggttgtcttcttgcttg

SEQ ID NO: 2227 - DNA, 479 bp, Homo sapiens
tacggctgcgagaagacgacagaagggtacggctgcgagaagacgacagaagggtacggctgcgagaagacgacagattggtacggctgcgagaagacgacagaagggtacggctgcgagaagacgacagaagggtacggctgcgagaagacgacagaagggtacggctgcgagaagacgacagaagggtacggctgcgagaagacgacagaagggtacggctgcgagaagacgacagaagggtacggctgcgagaagacgacagaagggtacggctgcgagaagacgacagaagggtacggctgcgagaagacgacagaagggtacggctgcgagaagacgacagaaggggctttctggtctcggccgcagaagcgagatgacgaagggaacgtcatcgtttggaaagcgtcgcaataagacgcacacgttgtgccgccgctgtggctctaaggcctaccaccttcagaagtcgacct

SEQ ID NO: 2228 - DNA, 593 bp, Homo sapiens
gttagacaagccagtgtgggtgcaggaattccctactctgttccagcatggagctgccagatgatctgtgggtcaggcctaaaagctgtgtgccttgcagtccagtcaatagggataggagactccagcattgtggttgcaggaggcatggaaaatatgagcaaggctcctcacttggcttacttgagaacaggagtaaagataggtgagatgccactgactgacagtatactctgtgatggtcttacagatgcatttcacaactgtcatatgggtattacagctgaaaatgtagccaaaaaatggcaagtgagtagagaagatcaggacaaggttgcagttctgtcccagaacaggacagagaatgcacagaaagctggccattttgacaaagagattgtaccagttttggtgtcaactagaaaaggtcttattgaagttaaaacagatgagtttcctcgccatgggagcaacatagaagccatgtccaagctaaagccttactttcttactgatggaacgggaacagtcaccccagccaatgcttcaggaataaatgatggtgctgcagctgttgttcttatgaagaagtc

SEQ ID NO: 2229 - DNA, 619 bp, Homo sapiens
agccaagatcgcgccactgcactccagcctgggcaacagagcaagactctgtctaaaaaaaaataaataaataaaataaaataaaataaaactgccttgattaagtaccttcaaatcagtgattaactagcaactctagccctgaattctgaatcttttatttttccttcaaaaggtaactcttaaaccatcccttctacttaatctgcatattgtactgaggttatttatcttccaacgtttgccagttcccttaggaatacccttagcaaccgcctttccatacaaattgcctgggaaagtttaaggggatcaaatcccttgtaactaaacaaaatagggcttttgaatagaaatttaatagcaaattagattggcatcattacaggaggatgaatgaaacttttgttttctttacatttacagtagaaaagtcaactaactctccaatatacaatgagctggaagagagagattttttttggcttattttatgatgtgtcttgctttcaccacattctgtcaacttccacaacaaatttaacctccaaaacaaatcttaaacctggtctctctcactcactgctgctccatttttcctaatggagttttctcttgg

SEQ ID NO: 2230 - DNA, 552 bp, Homo sapiens
aatttccactcagctcaaaacacatttgaatcttttattaaggttgctttgaacctaatgaggcttaaaatattgctgcagcatatttagcaaagtttttctgactcataacagttttatgatttttctcttatcctcagttgctatacctgcctttcaggaactgccctcgttttcaagaacttgagagtgagactttgaaatcagaggaattccagaagaggctgcacccttataaggttaaaagctagttttgtttagtggtacttgttagtttgttagtggtacttgagtgtgagggccaagacacaagatgaagctttggcttcttaaaaagatgggacgaatgcatctgtcagtggctggttacagcaatgggttagaatatttaatgagggaggtcatcactcctgcttcccttccccatacaggggtcacaagccaatagacaagccagtccttttgaatcctttactcatggccttgagaggaaccaggtgtgagtaaatggctggatgagaataaatataagtctaaaatcacctgccttat

SEQ ID NO: 2231 - DNA, 568 bp, Homo sapiens
gtgggatgaagtgctttcacatcttgtggaaggaccaaattttctgaaaaaattggaacaatcttttatgtgcgtttgctgtcaggagctagtttaccagcctgtgacaactgagtgcttccacaatgtctgtaaagattgcctacagcgctcctttaaggcacaggttttctcctgccctgcttgccggcatgatcttggccagaattacatcatgattcccaatgagattctgcagactctacttgaccttttcttccctggctacagcaaaggacgatgatctgcctgctttcactgtgttgttcatggtggctttttggacaataaagaatctaaaatgggtggggagggtggaagaaatggtggactgtatctctcacgttctgaagcagctaatcctctttcccacatagccatcatcttgtgtgtgtagtaagaggcccatttctcaactgtcttttaaatatctaaaggtagttcctgtaacaactagttttaatgagtaaaaagtcaaagcctcagctctagttgatatccaagttatgatttattttgcaactacctc

SEQ ID NO: 2232 - DNA, 623 bp, Homo sapiens
atcttaatagctgcacagtgtctgactctgttaaaggtgctcagaatgaatcttagaatattaatgcccatattttatgccatagcctctagagaggtgaaagagaagtccaaagatgggcagggttgctgagccaacatttctaaggagccctttttgtccgattcacctgccatctgcagccagcctccatataaacaccttttgtgatcaaccctgatggattatttgttagtttatttgttgggggaggggaataaagagaggaaaatgtgggagtacatgcgaatttagggtgaagcaaaagatttttagctacacagatcaataccacctttttctagctttttgataagaatgccaaatagaactgagtcaaaaatatcattgatcaatggattgtatctattgcttttcccttttctgtatggttttccactccaccagagatgaaaattaaattgacttgtcactattttctcctcatataggcattcatcttgctcagggctttatttcttcaaattattccaatggcttacttaacagatgtagtttctttcttagttaaatcaaaaggtatttattgagcaagtactgctaatactaccactgctactgct

SEQ ID NO: 2233 - DNA, 466 bp, Homo sapiens
agttccaagaaatctataaacccgaagcaaacggtagcacatgagaaaactggagatggcacgtggatggtcatttaaaatttaatagttccgtactcatgtgaatgtacgttaggaaaaatataacaagcacattgtcgatttcgtgagtattattgcttaagatcgggttaagtaataagtaaaccaattgaatattttatttcagttgaaaagaaaaatactgaagaattttaatgcctttaatggggtacttgagtatggcaaaaatcgggaaggctgagagtgtcatttgggagctgtgtcccaagtccctcgtgggcctttaatcagcagttacagatctgcagctcctcctgtaggatggaagcactttgctctttggccttttgaggtcacccagctatttgaaggtcaggggcgactcgattctaatgagatcaaggtcacagggtcatgttgcccc

SEQ ID NO: 2234 - DNA, 546 bp, Homo sapiens
  misc_feature 441: n = A,T,C or G
ggttgtgtgggttaaaattaccctagaaatcaggtatttccaaatcaatgagtaaagctgtattttaaatattttgaaggtataaacttgggggttttgtttggtggattattgtgtttgggtttttttttctttttcttttctaaaataacgaagcccttgatcaagcagtaaaaccttaattatgaccagaagtacaagataacacatgatagtaataccattgcattatgcacatggctcttgttacatgtttggactacacatgtggcactagagataatacaagttttctcatttgtatctctgtcatgtacaccaatgcagtgatctttttcaaatgcttggtttgattgtctctaagcccttcatgctaaagggcaattatactactttgtgatagtttttttccccccactttgtcacccaggctggaatgcnagtggtgtgatcttggctcactgcaacctccgcctcccaggttcaagcctcctgtctctacaaaaactgtagccaggcgtggaggcgtgtgcccatagtcccagc

SEQ ID NO: 2235 - DNA, 544 bp, Homo sapiens
acagaaggggagtgtggagaaacagaggaaaacttgcagttacgaagactggcaacttggctttactaagttttcagactggcaggaagtcaaacctattaggctgaggaccttgtggagtgtagctgatccagctgatagaggaactagccaggtgggggcctttccctttggatggggggcatatctgacagttattctctccaagtggagacttacggacagcatataattctccctgcaaggatgtatgataatatgtacaaagtaattccaactgaggaagctcacctgatccttagtgtccagggtttttactgggggtctgtaggacgagtatggagtacttgaataattgacctgaagtcctcagacctgaggttccctagagttcaaacagatacagcatggtccagagtcccagatgtacaaaaacagggattcatcacaaatcccatctttagcatgaagggtctggcatggcccaaggccccaagtatatcaaggcacttgggcagaacatgccaaggaatcaaatgtcatc

SEQ ID NO: 2236 - DNA, 411 bp, Homo sapiens
atggctttttgcattatccagttttcctgacagcttgtatagattattgcctgaatttctctaaaacaaccaagctttcatttaagtgtcaaaaattattttatttctttacagtaattttaatttggatttcagtccttgcttatgttttgggagacccagccatttaccaaagcctgaaggcacagaatgcttattctcgtcactgtcctttctatgtcagcattcagagttactggctgtcatttttcatggtgatgattttatttgtagctttcataacctgttgggaagaagttactactttggtacaggctatcaggataacttcctatatgaatgaaactatcttatattttcctttttcatcccactccagttatactgtgagatctaaaaaaatattcttat

SEQ ID NO: 2237 - DNA, 435 bp, Homo sapiens
aggataaagcctgtttttctttcctttatttcccagggtttaacaaataaatgcatatattctctccaggtggggaagaaaatcagcctaaacaaattaaagtggcagttgcttatagttaaggttgagtcagtttttccattgcatacaatgttttcaagaagcttagttcccagagaatttatggctcccctataaatatttactttgcattgacagcaaagtacttatatttttgcagcagagtgccaacataagccttttgcctactggtatcttagtctttaaaaagctaaattttgagaattacaggtttgagcgaaatctagaaaattcatttagaaataattaaaatgtgagggataggagaaacataaggaatcatttggtctctcagttcttcacattctgcatgctctcttttctccccccttc

SEQ ID NO: 2238 - DNA, 417 bp, Homo sapiens
tataaagtaatgtagggttatatttgggagtgactgcaagcatttttccatctgtgtgcaactaactgactctgttattgatcccttctcctgccctttcccaggtaatttaaattggtcatggtagatttttttctttgatgggaaaaacttttaggttgttaccaagtatgaagtataaatctggggaagaggttttatttacattttagggtgggtaagaaagccaccttgttacaaattttttaatttccaaaataatctatattaaatgagggtttctgatctgtactttgtgtttagctacctttttatatttaaaaaattaaaaatgaaaattacgttcttacaagcttaaagcttgatttgatctttgtttaaatgccaaaatgtacttaaatgagttacttagaatgc

SEQ ID NO: 2239 - DNA, 205 bp, Homo sapiens
ctaagcagtctgacttacctgttgggaaacaaagggatattgctctaagattgattaggatgattgtagctagagtcttgaattctatctgtatacggcagaaaaactttatagagtgtagagaggtgagcgaaaggatgcaaaagcactttgagggctttataataatatgctgcttgaaaaaaaaaatgtgtagttgatactc

SEQ ID NO: 2240 - DNA, 456 bp, Homo sapiens
tacggctgcgagaagacgacagaaggatacggctgcgagaagacgacagaagggtacggctgcgagaagacgacagaaggatacggctgcgagaagacgacagaaggatacggctgcgagaagacgacagaagggtacggctgcgagaagacgacagaagggtacggctgcgagaagacgacagaagggtacggctgcgagaagacgacagaagggtacggctgcgagaagacgacagaagggtacggctgcgagaagacgacagaagggtacggctgcgagaagacgacagaagggtacggctgcgagaagacgacagaagggtacggctgcgagaagacgacagaagtacgggaaggcgaagaaaagaatagagaagatagggaaattagaagataaaaacatacttttagaagaaaaaagataaatttaaacctgaaaagtaggaagcagaag

SEQ ID NO: 2241 - DNA, 553 bp, Homo sapiens
aaatcagatgtcataaagtctttaaaaagcagaattactttgaaaataaaggtattattattatagaattttagagattaaagaaaaaacagaaactaacatttaatgaagacctactctgtgccatgccatgtgcttagaactttgtttaagccatttcatttaataacctttcaacctaatgaagcaatatagcatgatggttaaactctgtgggctataggctgtcaagttcagctgcacagcggctaactagctttatgacttttcaaatgtttatcttctttttggcttagtttctctgttacaaagtggcaataataataatagcactcacttccaaaagattgttgtaggattaaatgattggataggttcaaaatgttaggaacagtagtattcaataaacatagttattatttgctatctttcccactactccataaaccctctattaaaatacaaatccacattgattttaactgctttggtgtagaagtggattctaagaagagggcatgtgaaataaatggaaaagccaaggattttatgt

SEQ ID NO: 2242 - DNA, 301 bp, Homo sapiens
ggttgaaaattgatttcatttgctactgaatttggtaaatcctgggtaacttttatcaagatgaagacattttaccctacctactctagaaatatacaacaatgttatattttacactccttggaaacatttgaggaaaaaaatgcaatttgcacttcactttgttggaatatcccatagcactcaataaactcagctgctagagtgccgatgtcaggagggctgcgtcgggtaatgcgtgtggctgaatgggcataaccactgtggcttcttgtgctgtaaaagctcgttgacaagactg

SEQ ID NO: 2243 - DNA, 204 bp, Homo sapiens
tgttgagtgagataagactcttgatatgttagaagaccactgctctaggatatgtgtagaaacagatctgacacataggaagtacttaatgaatgtttgatgaatgaataaattttcaggcctgcctgacatatctatgtgacatgtgtcgacacatacagcccctctggtgctcagtatcatattctgaaaaatgaaggtgtt

SEQ ID NO: 2244 - DNA, 452 bp, Homo sapiens
ggacaagatctcgcccagtgtcttacgtaattctcggccccgcccggcctccctgggcacggggaaagattttgcaggtatccaggtaggcaagctggctgacctggagcaggagcagagctccaagcgcctgtcctaccaaggacagagccgtgacaagcttcctcgccccccctgtgtcagtgtcaagatctccccaaagggtgtccccaatgaacacagaagggaggccctgaagaagctgggactgttgaaggagtagactctgcgaccagtacagaccctgtcctggctgaacaagaagagacacatgctccacttgggagcctttgccaccacgcaactcagggctcaagatgaatgggagggagagatttgagtccaagcatacatttatattcagtgttgtgccattgagttcccatgtggatcattctgaaggtgatctccac

SEQ ID NO: 2245 - DNA, 507 bp, Homo sapiens
tacggctgcgagaagacgacagaagggatctattgcttttcccttttctgtatggttttccactccaccagagatgaaaattaaattgacttgtcactattttctcctcatataggcattcatcttgctcagggctttatttcttcaaattattccaatggcttacttaacagatgtagtttctttcttagttaaatcaaaaggtatttattgagcaagtactgctaatactaccactgctactgctggtactgttaatactactgtctctactactgcaatgactggtctcatagtgttttaggctgccttcaaggtgcatcaccttatttaaattgtacaacaaacccttaagttatgtacaattatatgaggaactaggcctcaaaagttttataatttcctccagctcgtagtggcagggctggactccaagctgagatgtgtctggttgtccggttctaaacctttctacaggtcgccttgtaaagaataaggatggagctc

SEQ ID NO: 2246 - DNA, 525 bp, Homo sapiens
aaccacttctgtattgtgtggtcttaactgcctaaggcggcaatgggcagtgggcccctttccctttagatgggtatcaattcaacaatatttataaggcatttactgtgtgctaagcatttggaagacccaggctacaaaataagacatagttcctgccctccaggccagcagagggaggcacaaatacccaggaatctctgatgggtgtgaagtgcggtcgtgggccacagaaaatgaccgtcatggagaccctgctaaaggtcggaccctgagcccaaaggggtattcagaagtggagatgattttggccccactcatagatgggtggcaaatctaagatttgtataaagcatataaaatagggtgatcacccccgaggcagaggggccagcatttgcaaaggcacagagctaagaggagctgggcaaagaaaggaaatccagggaaggtggtgggagatgagtcaaagctaagtagtggaagctgggcacagtggctcatgcctgcaatcccagcactttg

SEQ ID NO: 2247 - DNA, 52 bp, Homo sapiens
ctgccctggaaactaacggctggagccatcaacgccactgaactctttgggt

SEQ ID NO: 2248 - DNA, 191 bp, Homo sapiens
ggaaatgggctgagtccctcttgctcacccttgacttggaaaaaccagtttctcttttattgtctgttactaatctctattctaaaaattcagctcaattctcaaccatactccaaactctctcttttccagctacctttactccctctccttcaattccactttcctctgcttacttttttttttttttt

SEQ ID NO: 2249 - DNA, 552 bp, Homo sapiens
ggtaagaatagatttctcatggctctaaaaattattcccaagaataccttacttggttcaaaagcagactgtttctctccatttcatctcaaatcagacttctgggcaagatgttctttagagtaagcaaacctacaacctaaaaatctcttcaagaggcatctctggtcttgtgacaagacctcttcaaaaacccacagtaaaactcccctccctccagttggccaccagtctgccaccaaacatgaacaaattctgctgctaatcggtttcccttgtgatctggttcctgaggtcttcggatctgtgcaatgaattatttattgttttattaaaccgacagtggtgtcccagagaggaaccataaataaaatggaaatctggtgctgtgataaagtaataactagcattaatgagacctggttttcctttcagaaagtccagtatacctgtaacaaaggttaaagcaatttatatttaatttgcattctgatgttaacatttaaacagcaattctaacaaaatgcatcgagtctaattcttacctctatc

SEQ ID NO: 2250 - DNA, 339 bp, Homo sapiens
tacggctgcgagaagacgacagaagggtacggctgcgagaagacgacagaagggtacggctgcgagaagacgacagaagggtaaataaaaacagctctctatcccaatacgcacctttgtattttcaagaactcttctatttattaaggaaaatgtcacattgtgatgtattaagccagtacttcaattacgggttgacttgggatgacatattacatgctgtagttaacatttataattctttttccttgtttgagtatttctgtctctgaaataaccttttacttggcttttctagatagctttatttgatttcgagtggcaaaatgttttttatta

SEQ ID NO: 2251 - DNA, 596 bp, Homo sapiens
agcagcactcctctctcctcccccattgtagatttttatttcagtccaggacctccaagtaactctcctctttctacacctaccaaagacttcccaggttttcctggcatccccaaagcagggactcatgtgctttatcctattccagaatcatcttcagacagcccactcgcaatatcaggaggagaatcttccttactgcctaccagaccaacatgtttatcccatgccttgttacccagtgaccactcatgtacacatccaactcccaaagtaggtcttccagatgaagttaatcctcaacaggctgaaagcctaggattccaaagtgatgatctcccccagtttcagtattttcgagaggactgtgctttttcaagtccattttggaaagatgaaggcagtgattcccatttcacccttgacccaccaggaagcaaaaagatgttctcatcaagaaacaaggagatgcctattgaccaaaaaagcctaaataagtgttcactcaactatatctgtgagaagcttgaacatctccagtcagctgagaaccaagactcacttagaagtttgtctatgcactgtctatgtgctga

SEQ ID NO: 2252 - DNA, 566 bp, Homo sapiens
actttgcaaatgattatcgagtagttaaccaatttgccagacattatcagactggacagccactgccaaaaaatatggtgtctcgtctttgtgaatctaaaaaggtttgtgctgcagctgatatgcaacttcaggtcttttatgccactctggatcaaatctaccatgggaagcatcccctgaggaattcaaccacagacattctcaaggaaacacaagagaaattctatggcctaccatatgttccaaatactgcctggcagctgcgattcagccacctcgtggggtatggtgctagatattactcttacctcatgtccagagcggtcgcctccatggtttggaaggagtgttttctacaggatcctttcaacagggctgccggggagcgctatcgcagggagatgctggcccacggtggaggcagggagcccatgctcatggttgaaggtatgcttcagaagtgtccttctgttgatgacttcgtaagtgccctcgtttccgacttggatctggacttcgaaactttcctcatggattctgaataaaagaacactctacacctc

SEQ ID NO: 2253 - DNA, 579 bp, Homo sapiens
gtttggagagcacacctatcttagtggttccccaccgaagtggactggcccctgggtcagtctggtgggaggacggtgcaacccaaggactgagggactctgaagcctctgggaaatgagaaggcagccaccagcgaatgctaggtctcagactaagcctacctgctctccaagtctcagtggcttcatctgtcaagtgggatctgtcacaccagccattcttatctctctgtgctgtggaagcaacaggaatcaagagctgccctccttgtccacccacctatgtgccaactgttgtaactaggctcagagatgtgcacccatgggctctgacagaaagcagatacctcaccctgctacacatacaggatttgaactcagatctgtctgataggaatgtgaaagcacagactcttactgctaacttttgtgtatcgtaaccagccagatcctcttggttatttgtttaccacttgtattattaatgccattatccctgaatcccccttgccaccccaccctccctggagtgtggctgaggaggcctccatctcatgtatcatctggataggagcctgc

SEQ ID NO: 2254 - DNA, 103 bp, Homo sapiens
tctgggtagtccggaaaacaaaaggagggaagacagcctggtaatgaataagatccttaccacagttttctcatgggaaatacataataaaccctttcatctt

SEQ ID NO: 2255 - DNA, 303 bp, Homo sapiens
ggtacactgggctctcaacgtggtgtggaaggtagcctgttacagtgctggattcataaaagggcctttatggtttgtgaaagaatatctgtgtgcttagggagggaactttttgatctgcagaaaagccagaagacatctaggacatccataaaaattcatcagagagcattttactactgagctgcaaaggtaggaaaaataaattttttttggttagaaaatatacttctttcatctgcgtttcaataatttattccccttgttagatatacatggaattgatattgcttattctgacta

SEQ ID NO: 2256 - DNA, 226 bp, Homo sapiens
gaaaaactggatattacgtttttgttttggggtttttttgtacaaatttagctaatagctacaggctgagagaattgtaacatagcatgacaaattttgtgttgacttgaaaggaatcacaccattattccttagaagtaattacatgtgttctaacacatttgagacagggttggactcccatttctcatccgagaaattacttaacccttcctggcgctgtaca

SEQ ID NO: 2257 - DNA, 353 bp, Homo sapiens
atcctccctgaccctgctcctagcaccctggagagtgcacatgccccttggtcctggcagggcgccaattctggcaccatgttggcctcttcaggcctgctagtcactggaaattgaggtccatgggggaaatcaaggatgctcagtttaaggtacactgtttccatgttatgtttctacacattgctacctcagtgctcctggaaacttagcttttgatgtctccaagtagtccaccttcatttaactctttgaaactgtatcatctttgccaagtaagagtggtggcctatttcagctgctttgacaaaatgactggctcctgacttaacgttctataaatgaatgtgctg

SEQ ID NO: 2258 - DNA, 507 bp, Homo sapiens
atgtttaatgaattcattttattttataaggctgagtacatatacagatgatcccattttagtttctcagctattttactatatgttaaatattttgatgctgtatttacatattagcatcagcaaccataatttttctgataacttttcaagatcagccaaatcatatccttgacaagtcacactttttctctgaagttttccataaaacccaaattaaaagtgatctgacactggtagcattttacaaatctaccttcatttagcatttatatatgcttttaagttgaagttttttctatatatgaaactgcaagtggttagagggcaggttttgtgttttaggtttgttaatttctctcccaaccagtgtcagattggctcagtctgagtggaggatcaatgaataggtgatgaatgaatggatatctacatgtcagtgcattgacagtgaatacatcttgcttatcatagtgaaagaaacagccggacacagtggctcatgcc

SEQ ID NO: 2259 - DNA, 349 bp, Homo sapiens
acgacagaagggtacggctgcgagaagacgacagaagggtacggctgcgagaagacgacagaagggtacggctgcgagaagacgacagaagggtacggctgcgagaagacgacagaagggtacggctgcgagaagacgacagaagggtacggctgcgagaagacgacagaagggtacggctgcgagaagacgacagaagggtacggctgcgagaagacgacagaagggtacggctgcgagaagacgacagaagggtacggctgcgagaagacgacagaagggagacttttttcagataacatcttctgagtcataaccagcctggcagtatgatggcctagatgcagag

SEQ ID NO: 2260 - DNA, 357 bp, Homo sapiens
gagtgcaaaactctcctatagctcctatacaagtccaggatttgctattagactccttgaattatgtgcccagctctgagccaatggctgtgcttaggaggctcctgtctcatgcacccaccccagtactgggcatcagaaacaaccagtgatccctataatgaaccacgggttcacagacttaagtgtaatcctgcagcagggcctcaggaagacttgaaacccaaaatcagaaagccatggtttcttgtcttcctggtgtctgttttgtcccttccctctgtagaggagtcctgctatcactgcaggcaacggggctgccctgcagctcctgctgtttacatttcactcggtgta

SEQ ID NO: 2261 - DNA, 469 bp, Homo sapiens
gctacaatggaaaccatttctggttttatcttcaaagcggagaaacatgttgatttagtcttctttcccaatcttcttttttaaaccagtttaaggaacttctgaagatttgtccacctctgattacatgtatgttcttgtttgtatcattagcaacaacatgctaatgacgatacctggctctaagagcaattctgggagaatgaaaggaagtataaagtaacccataatctgcttggcaatagttaagtcaatctatcttcagtttttctctggcctttaaggtcaaacacaagaggcttccctagtttacaagtcagagtcacttgtagtccatttaaatgccctcatccgtattctttgtgttgataagctgcacatgactacatagtaagtacagaacagtaaagttaaaacggatgtctccattgatctgccaaatcgttatagagagcaatttgtctggact

SEQ ID NO: 2262 - DNA, 371 bp, Homo sapiens
atggcaacatgacagaggaccatgtgatgcacctgctccagaatgctgaccccctgaaggtgtacccgccactgaaggggagcttcccggagaacctgagacaccttaagaacaccatggagaccatagactggaaggtctttgagagctggatgcaccattggctcctgtttgaaatgagcaggcactccttggagcaaaagcccactgacgctccaccgaaagagtcactggaactggaggacccgtcttctgggctgggtgtgaccaagcaggatctgggcccagtccccatgtgagagcagcagaggcggtcttcaacatcctgccagccccacacagctacagctttcttgctcccttcagccccc

SEQ ID NO: 2263 - DNA, 502 bp, Homo sapiens
ggttctccaattaaagctgttaacgtgtactacgctgtttccttgttggattttcttgttccctgctgctactgtaaaaacgaaatgagtggtcctgctcaggttccaatgatgtccccaaatggttctgtgcctcctatctatgtgcctcctggatatgccccacaggttattgaagacaatggtgttcgaagagttgtcgtggtccctcaggcaccagagtttcaccctggtagtcacacagttctccaccgttctccacatcctcctctacctggtttcattcctgtcccaactatgatgccgcctccaccacgtcatatgtactcacccgtgactggagctggagacatgacaacacagtatatgccacagtatcagtcttcacaagtctatggagatatgctcactctacacatggaaggtccaactttagagatgaacgatctagtaaaacatatgaacgtttgcagaaaaaattgaaggatcgccaaggaacaca

SEQ ID NO: 2264 - DNA, 172 bp, Homo sapiens
ggtagttaaaagacgagtgaatgctctcaaaaacctgcaagttaaatgtgcacagatagaagccaaattctatgaggaagttcatgatcttgaaaggaagtatgctgttctctatcagcctctatttgataagcgatttgaaattattaatgcaatttatgaacctacggaa

SEQ ID NO: 2265 - DNA, 602 bp, Homo sapiens
gatatttaaaggtttgccttttgcttctcgtgggtacaagccagagagagcagtggttacatgggggtagaatggtgactcgtttttacctgactgtggatcagctgggtggttcctgaatctcactgggctcattgtggctctttgcttgtcctgtatttactgtctgtggtagtgagatagaagaaccaccatgttcttctggttctagactcaaactacagggagaaggaagagatgtgtctggcatcatttccgtgttggagtaactttgtggtagattgctgtggcctttctttgtggcctgccacttgtcttacattcttcagagcatttatgcacaggagcataaatatatgattttcatcttgccattgaaagtagactttccggccgggcgtggtggctcatgcctgtaatcctagcactttgggaggccaagggtgagcagataacttgaggtcaggagtttgagaccagcccggctaacatggtgaaaccccatctctactgaaaatacaaaaaagttagccgggtgtggtggtatgcacctgcaatcccagctactcagtaagctgaggcaggagaatcgcttgaacctg

SEQ ID NO: 2266 - DNA, 579 bp, Homo sapiens
attaaacgctattgtcattaaagaaaccaaagattgggatgcttggaaggtgtgtctacgacttcgagataatggacttctggccaagccaacccatggcgacattatcaggtttgcgcctccgctggtgatcaaggaggatgagcttcgagagtccattgaaattattaacaagaccatcttgtctttctgagggtagccagctgttttcagtggtccctgggagccagctggagacaggtggtcctgtaaaagctttattcctaatgtgggcacattccactcccatgagtcttcaaaaactttttttttgaatatatttttttcagttgatacataatagaacaacgtttatgaacctgccgtttgctttgtaacgtaactaaataatgtaatggcatctatattcagttgaagtgttttgatgtgcatgtgtacttcctaaggtgaaatgcatctatatacagacagcctctaaatcaagtccttcagtataattgatatatgtttttataatttcctcactggtataagtgtttcatatttgaaaaagttatctctgggtattgcataaaaggc

SEQ ID NO: 2267 - DNA, 235 bp, Homo sapiens
acgacagaagggtacggctgcgagaagacgacagaagggtacggctgcgagaagacgacagaagggtacggctgcgagaagacgacagaagggtacggctgcgagaagacgacagaagggtacggctgcgagaagacgacagaagggtacggctgcgagaagacgacagaagggtacggctgcgagaagacgacagaagggtacggctgcgagaagacgacagaaggggctctta

SEQ ID NO: 2268 - DNA, 596 bp, Homo sapiens
acagaagggaatacaggtatcgggaaggagacagccaaagagctggctcagagaggagctcgagtatatttagcttgccgggatgtggaaaagggggaattggtggccaaagagatccagaccacgacagggaaccagcaggtgttggtgcggaaactggacctgtctgatactaagtctattcgagcttttgctaagggcttcttagctgaggaaaagcacctccacgttttgatcaacaatgcaggagtgatgatgtgtccgtactcgaagacagcagatggctttgagatgcacataggagtcaaccacttgggtcacttcctcctaacccatctgctgctagagaaactaaaggaatcagccccatcaaggatagtaaatgtgtcttccctcgcacatcacctgggaaggatccacttccataacctgcagggcgagaaattctacaatgcaggcctggcctactgtcacagcaagctaacatcctcttcacccaggaactggcccggagactaaaaggctctggcgttacgacgtattctgtacaccctggcacagtccaatctgaactgggtcggcactcatctttcatg

SEQ ID NO: 2269 - DNA, 59 bp, Homo sapiens
gtgtcactgcactcagttgctggcttccacttcgggcttcctttccacagggtcctatc

SEQ ID NO: 2270 - DNA, 262 bp, Homo sapiens
gttctagtgagtgtatgagaccttgcagtgagtttatcagcatactcaaattttttttcctggaatttggagggatgggaggagggggtggggcttacttgttgtagcttttttttttttttacaaacttcacaaaaaatgcagtggttttgatttaaggtttgtttgttttgtgggcaaaaaaaggcaaaatggttttgaccccgttgtttttaaaaggcttgggaaaacaacgggggtttaataaaaagtggggtccccc

SEQ ID NO: 2271 - DNA, 350 bp, Homo sapiens
gctctttcccatcttgcaagatggcgggtgaaaaagttgagaagccagatactaaagagaagaaacccgaagccaagaaggttgatgctggtggcaaggtgaaaaagggtaacctcaaagctaaaaagcccaagaaggggaagccccattgcagccgcaaccctgtccttgtcagaggaattggcaggtattcccgatctgccatgtattccagaaaggccatgtacaagaggaagtactcagccgctaaatccaaggttgaaaagaaaaagaaggagaaggttctcgcaactgttacaaaaccagttggtggtgacaagaacggcggtacccgggtggttaaacttcgc

SEQ ID NO: 2272 - DNA, 547 bp, Homo sapiens
agttaaaggatttgtccgagaccctcaaggtaacccaattgcgaatgccaccatctccgtggaaggaatagaccacgatgttacatccgcaaaggacggtgattactggagattgcttatacctggaaactataaacttacagcctcagctccaggctatctggcaataacaaagaaagtggcagttccttacagccctgctgctggggttgattttgaactggagtcattttctgaaaggaaagaagaggagaaggaagaattgatggaatggtggaaaatgatgtcagaaactttaaatttttaaaaaggcttctagttagctgctttaaatctatctatataatgtagtatgatgtaatgtggtcttttttttaaattttgtgcagttaatacttaacattgatttattttttaatcatttaaatattaatcaactttccttaaaataaatagcctcttaggtaaaaatataagaacttgatatatttcattctcttatatagtattcattgtcctacctatattacacaaaaaagtatagaaa

SEQ ID NO: 2273 - DNA, 583 bp, Homo sapiens
gaacacccaacacccatgagttcagtccttaagaaggaaaattgagcaagtatttaattggttggacattgcataaaagaggtccatatccaggctaactctagaaattttattctcaaacttagttggcctctttttcttctgtcagaggaccattcttagtggcactggggaaatcttggcacccagaagaattcaactgcgctcactgcaaaaatacaatggcctacattggatttgtagaggagaaaggagccctgtattgtgagctgtgctatgagaaattctttgcccctgaatgtggtcgatgccaaaggaagatccttggagaagtcatcaatgcgttgaaacaaacttggcatgtttcctgttttgtgtgtgtagcctgtggaaagcccattcggaacaatgtttttcacttggaggatggtgaaccctactgtgagactgattattatgccctctttggtactatatgccatggatgtgaatttcccataaaagctggtgacatgttcctggaagctctgggctacacctggcatgacacttgctttgtatgctcagtgtgttgtgaaagttt

SEQ ID NO: 2274 - DNA, 496 bp, Homo sapiens
atgagcatgccttgcaggttaggcctgtgcactgggaaaggccaaccagtgcagcttaagaggcacctattgcaagggaatgtccccagcaggggaccctgagttccccaatgttaaacagagcatctgggtgaaaagtggtagttcacttcaccacgtggaaacacatttgtatactaagtcctagcacaattaaaacttctcctttgaataggctagggtttgtttctacagaaagtgtatcgtgttgaattctgaggcagagttcatggaaatcagaggcattgccagggttcttaagtgggggccatggctggatttggagccaactttcagtttgctcaataatgtggtcgaagagttacaggtgagaaaaacgaatgtgcttactgaagaatttctaaatccatggctccctctggcggtcctgccaagaacatgacacaattaggacacaattggcatctaacagacaagcctgtgtccctgctgaaca

SEQ ID NO: 2275 - DNA, 434 bp, Homo sapiens
agaacacgaagagggagccatctgccacactctggaggctgaagcctgcaccagtgctgctcgcctcactgtggtaggtggtggtgatggaaactgcagatcggccagagtggtagaaaagttgctgcagggtttttctggctttgcctgcccagccgctccatgcctggctagaggagaaggaggagccacatgtggtacactggaggctggagcctgcagatggcatggctctgcggctcaccttgctgcagttggtggtggtgacagagactgcagcttgactgtagtgaatttggaaattatctgtctggaagctctgagtttatcttgggacctcaagaggagaggatcacccaactcacagcaatcaaactccaaatggtgctataaactgaaccacacatggacacgtcagtcttccgaggaccctt

SEQ ID NO: 2276 - DNA, 57 bp, Homo sapiens
acagagggggaaggggttataggatggtgtgaaaaccctcagtgagaaagttgaaag

SEQ ID NO: 2277 - DNA, 569 bp, Homo sapiens
gacagaaggtctgtttttacttttgtggtctgtgcttttggtgtcatatccaagaaatccttgccaaatccaacgttataaggtacttttaaggtattttagttgtcttagtctatatttctgtactcacctttctttatccactcatcagttgatgggcatgtaggttggttccatatctttgcaattctgaattgtgctgtgatcaggtgtctttttagtataatgatttactctcctttgggtagatacccagtagtgggattgctggatcgaatggtttttataattttctattttaccacagtttctctctgcatttttcctctttgaccactaaccatgtgaaattctcatattgacctttataatgatcatgaactcttagtatcattgggaaggccacatttgccacttatgattgtaaaccttatcctccatttttcctgttattggttggtgcaaaaagcacctattataccaggactttaaaaatcagtctgataagtctttgataagtctaataataataactgataagtccattgaatttgcttctgattactttt

SEQ ID NO: 2278 - DNA, 428 bp, Homo sapiens
ctcaatgctggctgctgctaacattaatgagaaggtggccttcggtgtccacctgtggaacccaggacacagcacctgactgcacacagtggctgaaatccagcatttttacataggagatgcacttagcctctaagcctcgttttactcatctgtgaaacagatataagtaaccctctctcatgaactctttgatgaggatttgtaaacgaaaacagactcgaactattgtgtaccaccacatagcacatgcacgtctgtcccagactttgacaacctgcacaagacaagcagcctaaagcaggagagacctccctagggttttgtgtgtgtgcacactaccctcactccccaactggccattaccctagttctgcccttgtttgtggagttacagcctcaaggttgtagcatgtgtgctggcaatc

SEQ ID NO: 2279 - DNA, 528 bp, Homo sapiens
agaagggattggtgggaaggggattggggtggggcaggctggcttaatgtaatatgagcaaccaaagtgggacttctgtctccccgctatattcccattgctctgaatggttgattgaagggtcagggaactagattttatggctttagttcactgtgattgtacatttatacttggcctatgtgctggccgcacctgaacataactggtgcttatgccgagttatttgcgatgagtaaatatttagtttctttttcttcatatttataatgttgatctggcatcctcaggctgcaactttattagcttataacttactcatctctatctttaccaacaggctctgtattgttgatatttgcaacttgttttgcttttccattggtggaattgaaataattagtttttaattacataagatgcctgtttgctatttggtggaagatagatgttcatattgaagcagtcacatttgtactgtagttcaataaaagaaaaatgaagtattctgtagcctatatttttcat

SEQ ID NO: 2280 - DNA, 557 bp, Homo sapiens
ggaagaaaagtcatggatattttaaaaagagagtgcaagtagcattaagatggatagcacataatggcacttgtctatgtacaaaacacaaactttagagcaagaagacctcagacaggaaactggaattttttaaagtgccaaaacatatagaaatgtttgaatgcatgggtcttatctaatttatctcttctggacccatgtttaaatacagttttatttcatgaagagaaatgaaaacccctacactgatatctgttttctatgggactgattctgaaattcttaactattaagaatattttaatagcagcatgacatttagcagtaatccattaagggcagtacctctaacaaggacgccttccagcttcagctatgttacttacgtttgatgctacttaaagtaatgaatgacgttttaaggaatccctaaccctactatcagaaaaggtgtttgttaaagagccttctcttgtgtgttacgcatgaactttggtctgtaggtgttaaatggaaacctctcatgtgtatatagtatttccttgtataagcac

SEQ ID NO: 2281 - DNA, 532 bp, Homo sapiens
acatactaatcctctttcaggaccctaaagttgcaggttagtaggtcttcaaggacaaatctgtaagtttcttatttctgtagtgcaagtaaaatttcactttttgaaactatagagagatccctttctgattagcctacagaacttaaagtgagggaaccatttcctctcacagacaaagaggcctgggatattaggactttggggtttgagagcatcatggggcagacagatggtggatggtctggacaagaagcgagtaagccactgcggttggtcatactgaagggaattgatggcaagaggatcccctgagcaagtcagaagttactctcatcagtcgttcatggtcacaacctgaggtactctgctgagtgggcaaggctgaagaagaggcctgtggaatgcagcattacctgctggacagagcagggcaggcagttctatgccttggagctcctgactgcagggactctgtccccacactcagaaagactcagctcactcaatgagagaatgtgatttactttat

SEQ ID NO: 2282 - DNA, 379 bp, Homo sapiens
gctttcggagggtggtgagctagtctgcggacgctgtataccctcctccacttcccgctgcagccaataaaggccgttcctaccatagtctgtgtccgcgttcttttttccgggactgcagagttcggggaagctgtacgccgcctttcgctacgcggaatttgcagatcttcccctggacctcaggcctctccggctggagtagggtggacgcttcacataagcttctctggtcgaacttgcccgaatctccagatggccgcgctgcgtcgaatgctccacttgccgagcctgatgatggggacgtgccgcccctttgcgggctcactggctgatagttgcctggcggaccgctgtctctgggatcggctgcatgccc

SEQ ID NO: 2283 - DNA, 513 bp, Homo sapiens
cattgctgtggccctcactgtgtgactgctatagcaccaacacacctttgttgagtttatgttttggggaaggttgatctcaagtgtatttgtttaaagactccacccaacgttcactcttggtggtgaaggcaggggacacaactctctggatgttggatttacagcattagtaagtctgttcaatataatttaaagcctgattataaatgattttaggatgtcttaatgtttctgttcctaaagcctttaagaaaagtccatagatttcatctgcattttccatacagggtgcaggtgataggtgatttgaatacttgctattttgtagcctttcccattctgaaattcactttcagttcactcagagatgtaggtgaaagacagcagtggcagtgaaggaaagtgggagaatgaaaggatcagagtgtggagagatgaccacagccactgaggcaggtgtgctgttgttacttttgaaaagaaatggcaggcaatcagcttgcatttcct

SEQ ID NO: 2284 - DNA, 402 bp, Homo sapiens
gacagattcctcttagtcaagtcctgattaaaactccagctaagacattagtaagccttggttagtgaagtggcatcaggaagtgcctacattttcatggcctggtagcgttcagtgaaaatgttcattaacagacacaggccattcagtcccgaatcccaagacactgaagactctgtttgaatcagactcacgggttccttcctagccactctcagggacaggaatgcttctggtgaagaagttttcggtggtggttcatggagcttccctacaccaacttggaaatggcattcattttattggcttttgttatcttttccttatttaccctggcttccatctacactactccggatgacagtaatgaagaggaagaacatgaaaaaaagggaagggaaa

SEQ ID NO: 2285 - DNA, 585 bp, Homo sapiens
attttacatctataagtgaaaccttgttatccccttcatttgaggaaatccaaggagttttaaacagctctactttactggctatctctatacttaagccactagttggtttttggtttgtttgtttttagcatttaatattagtgtgtgttttcccataacttaattaccaaattaataaaagggtcattcttcactaagtatcacagtagtagtgagtgaagatagtcattctacccaaacagcctttgttcgataaggttaagtgcagtaaccagaagttggaagtatagaagatgtgctttgaaaatgcatgctagaagacttcggtcacagtgacatgacagaggattgttggaaaataacatttgaagtcaaactttcctgaaagcccaggcatgaggcaaggctttctggacaaaagtttccagcagaccacagtctgacacaccatcatgaacaagatcagattttaagcctccaagccaatcaagaaattaccttgaaatgtgcgcagtgtattttaagtaaaaccagtctctgtaggcactcaatatatgtttgtttaatgtaattaaatttgaa

SEQ ID NO: 2286 - DNA, 453 bp, Homo sapiens
gtactagttttatagttcgaggtcttggctttacatctttaaacaactttgattttacttttgtatttggtgatagatactagtctgttttcattcttctgcatatggatatccagttttttcaataccatttcccaccagtgtatgttcttggcacctttgtcaaaaatgagttcactgtaggtacatttgtacgtttgttactgggttctctattctgttccattgatctatgggtctatttttatgccagtaccatactcttttggttgctataattctgtggtataatatgaagtcagaaaatataattcctccagttttatttatttatttatttttgcttaggatagtattatttcttatagtgaaagcattctatgttatttattattagtctaattttgtagttttacaatgctatcctcttttacaagctatgatcaactcagt

SEQ ID NO: 2287 - DNA, 512 bp, Homo sapiens
gtctcaagaaccagaaataaataaggatggtgatagagaggttgaagaagaaatgaagaagcatgaaagtaataatgtgggattactagaaaacctgactaatggtgtcactgctggcaatggtgatgatggattaattcctcaaaggaagagcagaacacctgaaaatcagcaatttcctgacaacgaaagtgaagagtatcacagaatttgcgaattagtttctgactacaaagaaaaacagatgccaaaatactcttctgaaaacagcaacccagaacaagacttaaagctgacatcagaggaagagtcacaaaggcttaaaggcagtgaaaatggccagccagagaaaagatctcaagaaccagaaataaataaggatggtgatagagagctagaaaattttatggctatcgaagaaatgaagaagcacggaagtactcacgtcggattcccagaaaacctgactaatggtgccactgctggcaatggtgatgatggattaattcctc

SEQ ID NO: 2288 - DNA, 293 bp, Homo sapiens
tacggctgcgagaagacgacagaagggtacggctgcgagaagacgacagaagggtacggctgcgagaagacgacagaagggtacggctgcgagaagacgacagatgggtacggctgcgagaagacgacagaagggtacggctgcgagagactaccgaagggtactgctgccagaatacgacagaagggtacggctgcgagaagaccacagaagggtacggctgccagaagacgacagaaggatacgggtgcgcgaatacgacagaagggtacgggtgcgacaagacgacagaa

SEQ ID NO: 2289 - DNA, 545 bp, Homo sapiens
gttttctttagaatttttccctgtttcccaccttctcttcccctgttgccaaggtctaactcatggatttttctctttcctcatggatgatcttcagcaagagtggactgggaagctgcacctggctcccactttcaacaagagcctctgccatccacttgagggtattgagagccagtgggcttttgtgtagcctttttgttctgcaagcaactttctaaagttgtgtacatgaacatacacccacatccagactacagtgatttagagttgttttgattgggtaccgtgggagcagggaaattggttttttaaaaagcaactgtttaattgcttaaataagctatgtattaaatctgtctccagttagggctatcttcctagcataggccccttaagtagcatgggggatatattttttgctataacgtaaaaattttcctttaaccactgccctctcctttctccttcaaggttctttccccctcagttttgttgttgtcttactctggagatgccaagtgtattttttctttctatgtaat

SEQ ID NO: 2290 - DNA, 499 bp, Homo sapiens
gtggtatactgatgaagaccatggaatagctagcagcacagcacaccaacatatatatacccacatgagccacttcataaaacaatgtttctctttaccttagcacctcaaaataccatgccatttaaagcttattaaaactcatttttgttttcattatctcaaaactgcactgtcaagatgatgatgatctttaaaatacacactcaaatcaagaaacttaaggttacctttgttcccaaatttcatacctatcatcttaagtagggacttctgtcttcacaacagattattaccttacagaagtttgaattatccggtcgggttttattgtttaaaatcatttctgcatcagctgctgaaacaacaaataggaattgtttttatggaggctttgcatagattccctgagcaggattttaatctttttctaactggactggttcaaatgttgttctcttctttaaagggatggcaagatgtgggcagtgatgtcact

SEQ ID NO: 2291 - DNA, 596 bp, Homo sapiens
gacagaggggcttaaagattattgatcgtaaaaaggaccttgtaaaactacaggcaggggaatatgtttctcttgggaaagtagaggcagctttgaagaatcttccactagtagataacatttgtgcatatgcaaacagttatcattcttatgtcattggatttgttgtgccaaatcaaaaggaactaactgaactagctcgaaagaaaggacttaaagggacttgggaggagctgtgtaacagttgtgaaatggaaaatgaggtacttaaagtgctttccgaagctgctatttcagcaagtctggaaaagtttgaaattccagtaaaaattcgtttgagtcctgaaccgtggacccctgaaactggtctggtgacagatgccttcaagctgaaacgcaaagagcttaaaacacattaccaggcggacattgagcgaatgtatggaagaaaataattattctcttctggcatcagtttgctacagtgagctcagatcaaataggaaaatacttgaaatgcatgtctcaagctgcaaggcaaactccattcctcatattaaactattacttctcatgacgtcaccatttttaactga

SEQ ID NO: 2292 - DNA, 422 bp, Homo sapiens
gttatttgaaggtgatgtttgaaagattttctaactgtgccttttagttagtcttaaatttctaattgtagttaaaaacatgccattctcatttctgacattttaagtatatggtttagaagtggttagtatagttctattgttttgcagtaggttttagataatttgtgtcttacaaaagtaaaagtgaatactcattacttatgaaagaagttagttagcttgccttaggtagatagcaagagaagagtccctggaaagtccctggtcagtgcctcatccctgcataacatataaagaagcctggaaaaaatcaagctgcagacactaacaagggaactagcatatgttgttgtgcttggggacatgcccgtggctgcacagatagaaaaacctctggcccatttggataaaaacttgta

SEQ ID NO: 2293 - DNA, 270 bp, Homo sapiens
ggtgtgtttggggaactaaaaagaggccggtatagtttatttccttcattattttgtcttacatttcctggtctttgggaatataaaaaaaggggaactgtgtaaactgagaaaaggtgcagtaaacaccctgcaaataattctgcattcagcatatatattcttaacagagttgatagctataatgaattataaattttgagaattatagtagaggtatatactgacctagaaatgcctctgttcagggtgataaatatcttaaacatg

SEQ ID NO: 2294 - DNA, 269 bp, Homo sapiens
gaaaaaggctattgcccactatgaacagcagatgggccagaaggtgcagctgcccacagaaagcctccaggagctgctggacctgcacagggacagtgagagagaggccattgaagtcttcatcaggagttccttcaaagatgtggaccatctatttcaaaaggagttagcggcccagctagaaaaaagcgggatgacttttgtaaacagaatcaggaagcatcatcagatcgttgctcaggtttacttcaggtcattttcagtcctct

SEQ ID NO: 2295 - DNA, 227 bp, Homo sapiens
gattaatggagaagtctatggggtcacgtggaaactgtttaccttgccacctctctgtagtcattaaaactcttgaaaatgaattttcttatcctaagagtgtaaaactgatgttgtggagcattttgcacatgccagacacagatgaattcaagacgcagtccctacactccgggtttctacagtttagctggacagagatgaacaaaattgcaatggagtgtgta

SEQ ID NO: 2296 - DNA, 275 bp, Homo sapiens
gaaaaagggggcggcggactcggcttgttgtgttgctgcctgagtgccggagacggtcctgctgctgccgcagtcctgccaactgtccgacaatgtcgtcccacctagtcgagccgccgccgcccctgcacaacaacaacaacaactgcgaggaaaatgagcagtctctgcccccgccggccggcctcaacagttcctgggtggagctacccatgaacagcagcaatggcaatgataatggcaatgggaaaaatggggggctggaacacgtacca

SEQ ID NO: 2297 - DNA, 384 bp, Homo sapiens
gaagggtacggctgcgagaacgacagaagggtacggctgcgagaagacgacagaagggtacggctgcgagaagacgacagaagggtacggctgcgagaagacgacagaagggtacggctgcgagaagacgacagaagggtacggctgcgagaagacgacagaagggtacggctgcgagaagacgacagaagggtacggctgcgagaacgacagaagggtacggctgcgagaagacgacagaaggggaacaccgaatagaaggccgggcacagtggctcacgcttgtaatcccaacactttgggagaccaaggtgggtgatcacctgaggtcaggagtttgagaccagcctggccaacttagtgaaaccctgtctctactagaaa

SEQ ID NO: 2298 - DNA, 454 bp, Homo sapiens
ggttttccactccaccagagatgaaaattaaattgacttgtcactattttctcctcatataggcattcatcttgctcagggctttatttcttcaaattattccaatggcttacttaacagatgtagtttctttcttagttaagtcaaaaggtatttattgagcaagtactgctaatactaccactgctactgctggtactgttaatactactgtctctactactgcaatgactggtctcatagtgttttaggctgccttcaaggtgcatcaccttatttaaattgtacaacaaacccttaagttatgtacaattatatgaggaactaggtctcaaaagttttataatttcctccagctcgtagtggcagggctggactccaagctgagatgtgtctggttgtccggttctaaacctttctacaggtcaccttgtaaagaataaggatggagctc

SEQ ID NO: 2299 - DNA, 344 bp, Homo sapiens
acgacagaagggtacggctgcgagaagacgacagaagggtacggctgcgagaagacgacaaaagggtacggctgcgagaagacgacagaagggtacggctgcgagaagacgacagaaggggtttgtaggctgtgtgacagatctatactgatatttttatatgtagatagaagccatggttagtaacaaaatatgtagtttttttctaacataaatactactattatatgcatgtctggagattattttaatatttaaaaatgactccccatatgggcaaatgttgggttcactgatccgcaataagcatttcaataaaatatctcatctgtttaaggaatatg

SEQ ID NO: 2300 - DNA, 390 bp, Homo sapiens
atttcatttctaaaagaaaagccccaaaaccaagtgctgttttcctggtctgtggaaacagagtctccgaggaattaggctagacatggtaagaacaaagttctgttgtgataaaagctttggcctgaggttccaaccattcagtttgccagctcagacttgatcttgaacgaaggcggggttctgtgactggagaccatttctctccttttgtatttgttggtgtgtccaaaaacctcagatctcccagcttcaggcttctttgagggcagtgctaaattggttgaaaccttatttgaggcagttcctgaaaagggtaggtgaaatttcctgctgataaaaggcatcctgtgtcttgttcatccttagcaaattgccaattagcaaaga

SEQ ID NO: 2301 - DNA, 479 bp, Homo sapiens
ggtttttactttacccttcaggattttttacttcacaacacggaattggctatttggagatttactttgtaagatttctgtgatgctgttttataccaacatgtacggaagcattctgttcttaacctgtattagtgtagatcgatttctggcaattgtctacccatttaagtcaaaagactctaagaaccaaaagaaatgcaaagattgtttgcactggcgtgtggttaactgtgatcggaggaagtgcacccgccgtttttgttcagtctacccactctcagggtaacaatgcctcagaagcctgctttgaaaattttccagaagccacatggaaaacatatctctcaaggattgtaattttcatcgaaatagtgggattttttattcctctaattttaaatgtaacttgttctagtatggtgctaaaaactttaaccaaacctgttacattaagtagaagcaaaataaacaaaact

SEQ ID NO: 2302 - DNA, 187 bp, Homo sapiens
ggatttttcccaaatgctgtgtagaaagtcactggagttaaatctactccaaccatttttctgctgtttcttgaaaagacaggatgattcatttacatctcttttccttcacagaatcatgagggaagtattgtgattaccagtgttaagcatttgtgaatattttattccaaaaagaaaaaaaatc

SEQ ID NO: 2303 - DNA, 530 bp, Homo sapiens
  misc_feature 478: n = A,T,C or G
agacgacagagggggatctaacttgcttttcagaagcacgtgactggcatatttgggtcattaaatataaagacattctgcttatgaattatgccagcaagatgttttcagatcatacaaaaacaatgtgtgtggtgactgccaagtagtgtttttatgtgtatgtctgtacacaccacccactgatctatgcaaggcagtggtgctttgcactaaatgccacatcgttccttctgggatctcagaacctttcataaacagtcacttaagactctaaggagttaaataaataataagatccttacccccttgaaaagaatatgtagcctacatattgaaaaattaggcaatttagcccaaggcagaatgagcagagaaagcatgacctggtgagccagacctaagtgccagcagcaagaattttgatctgtaaacattctgatgatggcagatggcagtgcggccttgagaggggctntcagtcaatctgcaaccttttattctgtacctgataagtctctggtactgag

SEQ ID NO: 2304 - DNA, 608 bp, Homo sapiens
gtttttgctgaaatgaacaccttaggatgctgaagaatatgacccgtcccatggaaaacattcaaaaatgtgtgtagcgctttcttcccaagggtgtgtgtgcgcatattttaacactaattcactttctacttccgttgctatcctttctgtgagtctttctcagaatctcagaaaagaaactaaattgttcactctagttatcaatgctgtactctatacctggaatttgctaaaagggcagattttaagtattctcaccacagaaaagagaaaagaaaatggtaattatgtgacgtggtggacatgttaactagctttattacggtgagcatttcacagcggatatccagtcatcacgctgtacacattaaacatgtacaattgggtttttttgagacaaggtctccttctgtcacccagtctggagtgcagtggctcagtcgtggctcattgcagcctcgacctcctgggctcaatccatccttccccctcagcctcctgaaaagctggggccacaggcatgtaccatcatgccaggctaatgcatatatatttatattttttggtggagatggggttggtctcgaactctgggctcaagtgat

SEQ ID NO: 2305 - DNA, 512 bp, Homo sapiens
agcacacctgttgcccccaacagagggcagaaccatttctctttcaagcatgggctactgataaattcagctaggcgagctagttcagccttctcattaagggaagttaagagagaagtgatgaaatcttaaaaattaggagtaactggacatttcgttaagggagatgcattacttcttacagcactaggtatgagttgaagtcaatgcattttaaacgtggttttcctaaattgaagtctttaaaaaataaaactttaagaaagtatcctaaatacatatggtaaaaattttcacaaatactgctctttggccattcaagaaatcttcaaatgaaatatgatgttggaattttttctgcagcagttattctgatgtaatatacatctgccttattttttccatcactaattttttttcagtttgggtaataaaacttgttcatgaagcgtggtatatagaccatttttaaatggccctactccagtggacttcaagtccaaaatgcaatg

SEQ ID NO: 2306 - DNA, 494 bp, Homo sapiens
ggagcatcagaagttcttaaagcataagttcctggtgcaggaaattatgtttgatcgttgcttaaacaaggcgtctactgtccgcagcaaggcactgtccagctttgcacactgtctggagttgactgttaccagtgcgtcggagagtatcctggagctcctgattaacagtcctacgttttctgtaatagagagtcaccctggtaccttactgagaaattcatcagctttttcctaccaaaggcagacatctaaccgttccgaaccctcaggggagatcaacatagacagcagtggtgaaacagttggatctggagaaagatgtgtcatggcaatgctgagaaggaggatcagggatgagaagaccaacgttaggaagtctgcactgcaggtattagtgagtattttgaaacactgtgatgtctcaggcatgaaggaagacctgtggattctgcaggaccagtgtcgggaccctgcagtgtctgtccggaagc

SEQ ID NO: 2307 - DNA, 524 bp, Homo sapiens
gagttttgcaatcaattcctgttcaaaggccaccctactcttcctatccgtctttctccagcccaaacactcacagccccctgccagaccaggggacctcggagaggcaaggacagaggttcaggatcttcctctccctcgggacccaaggccacaaaggagagctccgtggagagaagaaaatcatttgactcctggggacacagatttgctgccacagaggctgatggacaaccaggcggagagagaaagtgaggctggtgttggtttgcaaagggatgaggatgacgctcctctgtgtgaagacgtggagctacaagacggagatctgtcccccgaagaaaaaatatttttgagagaatttcccagattgaaagaagatctgaaagggaacattgacaagctccgtgccctcgcagacgatattgacaaaacccacaagaaattcaccaaggctaacatggtggccacctctactgctgtcatctctggagtgatgagcctcctgggtttagcccttgccc

SEQ ID NO: 2308 - DNA, 530 bp, Homo sapiens
aaggaaactggggtgcagaaaggtgaattaactttacaaagtagacatgacaagtgaacagcagagctgggatctaaacagcaataactaacattaacagagaatttaaaatgttcttagtgctgtgttataagctttggtggatgtcactcctttaatcctcacaacaccctgtcgggtagtcatattttgcaagtatggaagctgaggcagggcaacatgaagtaacttacataactcatacagtaatttgtgcagttgggagatgttcagccttagtccctggctaattgcctgttcttttccagcctgattttttttcccacaggaagagcccacatgtagccctgaggtttccttcccaggacagctgcagggtagagatcattttaagtgcttgtggagttgacatccctattgactctttcccagctgatatcagagacttagacccagcactccttggattagctctgcagagtgtcctggttgagagaataacctcatagtaccaacatgacatgtgactt

SEQ ID NO: 2309 - DNA, 522 bp, Homo sapiens
gtctgaaatggaacagatttcaaaaaaaaaccccacaatctagggtgggaacaaggaaggaaagatgtgaataggctgatgggcaaaaaaccaatttacccatcagttccagccttctctcaaggagaggcaaagaaaggagatacagtggagacatctggaaagttttctccactggaaaactgctactatctgtttttatatttctgttaaaatatatgaggctacagaactaaaaattaaaacctctttgtgtcccttggtcctggaacatttatgttccttttaaagaaacaaaaatcaaactttacagaaagatttgatgtatgtaatacatatagcagctcttgaagtatatatatcatagcaaataagtcatctgatgagaacaagctatttgggcacaacacatcaggaaagagagcaccacgtgatggagtttctccagaagctccagtgataagagatgttgactctaaagttgatttaaggccaggcatggtggtttacgcctataatccc

SEQ ID NO: 2310 - DNA, 451 bp, Homo sapiens
agtgaaaaacttggaatccagatgtggcagaatgttgctgcgtctaaaaattcctatttgtcatcgggtagtcggggttagaagtgcacaaatggcttgcttcctctcatagccaaaccagtgttcctcgtggctcaatatgacacctagatatgtaacctcttcatggaaaatttgggctttcttttttgatattttgtaacttgctttctataggagatggaggagatcctgggttccccgataacactcctctcaggttggggcaggcaaagaaagctcgtctatgtactgcaacaaggcacagttgttacttggcagggtataggccatgaggtctgaggccaatgtttctctaaagattgtgggagagaacggggcatggtggtttgcgcctctcatcccaacactttgggcggccacatggctggatcatgaggtcaggagtcca

SEQ ID NO: 2311 - DNA, 506 bp, Homo sapiens
atagtgcagttttctagcttccctttcacaaacggtgttgaagaaagtaaattaagcaactcagctatcactgggaatgcagtagaagtaatcaagtccagtgctgggagatagttgccatgatattccaacatggacaccaggatcacagtcgatgactatgccctcccttgaagatggtggcttgcctctctttctgtaagcaaatgtcatgtcataacagtattaaacaattacgagtaatgtccccatctgcttctgcactgcctttgaaatactatttcagatctgccaaaataaatggcaaactcattaacaagaaagcagggtggggggtgcattcatccctgccttcctgagtagtctattcacccaaagacaaaaggatgaccagcttccatcagggatattcaaagacacagtcaccctgccatgcagccagaggctggcaaaggtccaatcccctttttaagaagcttgttggatgagctctttaaacatacaac

SEQ ID NO: 2312 - DNA, 392 bp, Homo sapiens
cacgtactcccaaatcatcatcatcattatcgtcatcattatcaccatctgataaaattaaggaaacagtaaatcatgagaaaaaaaaatgaaagaggagattcagaaagttgtggagatgaatcaaaagtacaaaatacagaaaccctgggaatcaagattttaaaaatgctataatcagtggccagcatggtggctcacgcctgtaatcccagcactttgagagacagaagcaggcggatcacctgaggtctcctgacctcagagaccagcctggccaacatggtgaggcccggcctctactaaaaatacaaaaattagttggacgcaatggcacacgcctgtaatcccagctactctggagactgaggctggagaatcacttgaacccg

SEQ ID NO: 2313 - DNA, 400 bp, Homo sapiens
gaaaaatataacaagcacattgtcgatttcgtgagtattattgcttaagatcgggttaagtaataagtaaaccaattgaatattttatttcagttgaaaagaaaaatactgaagaattttaatgcctttaatggggtacttgagtatggcaaaaatcgggaaggctgaaagtgtcatttgggagctgtgtcccaagtccctcgtgggcctttaatcagcagttacagatctgcagctcctcctgtaggatggaagcactttgctctttggccttttgaggtcacccagctatttgaaggtcaggggcaactcgattctaatgagatcaaggtcacagggtcatgttgcccccaggaaagtgggagatggagttctgtggtccaggctgtggccctgctgc

SEQ ID NO: 2314 - DNA, 424 bp, Homo sapiens
acagaaggggaaaatggtgctgatagacttgctcaaccagggttgccacaaacctgtgatgtgtaacaaaacacagtatccgcaaagtgcaataaaacagataagggctggaggctctggagttgaaagccctctacatggcagatgatcattgaagacatgtgatgtatgcagtcactaagagagaagctgtagaagaaaaagctgagtgttggagaatgttgcctatggggtatgaagatgaaggggagctggtgactgagactgggtaggagcagtcagatgagtaggagacagaacaggagggggtggagtgaaggaaaggaagaaaagtaagggcttaagaaagacttggccattctttacacaaacaaggcagacaaattcagagcatagacctgggatagtgatgagtgggtttctt

SEQ ID NO: 2315 - DNA, 309 bp, Homo sapiens
gccccttataaaaccccttcgattgctgagacaacatattaaagccatatgctgcttccttgttggggctcctccacagtgctcccaacaccggcgacccctaggaagacggggagcaaggaggatctggccaggagtcacaggatatacacccattctggagctctcctctgttgttctagaagatgttatttgattagttggggctgagagcaggggatatatgattctgtggaaaaggtgtcagataatcaaatcaggtctgcctctgctatagccagagtgctgctgcgttaaaagggaacaaaa

SEQ ID NO: 2316 - DNA, 130 bp, Homo sapiens
ttttccatgcgtgtttctgactctgagctacagagtctggtgaagctcacttctgggcttcatctggcaacatctttatccgtagtgggtatggttgacactagcccaatgaaatgaattaaagtggacc

SEQ ID NO: 2317 - DNA, 289 bp, Homo sapiens
ggagagagcgtttcaggcttgggtcagtcttaaagcagatctcatgtggagggtttctgctaacctgcatctcttacaacacagtactagtcagtatgctgtagtattaatcagtaggtcaagttcagtgaagtaaaggagaattgaattcttgaagttcacatttaggcaaaaatttggcgttttaagaggtgagtataagacatgatctttatagaaaacgctgatgataaaaacagcgctctctgttaggtgcctttatgcttgactccattgtcatcttttctta

SEQ ID NO: 2318 - DNA, 227 bp, Homo sapiens
ggatttttcccaaatgctgtgtagaaagtcactggagttaaatctactccaaccatttttctgctgtttcttgaaaagacaggatgattcatttacatctcttttccttcacagaatcatgagggaagtattgtgattaccagtgttaagcatttgtgaatattttattccaaaaagaaaaaaaatcactttaccagccttttctgcagagataaagactggaggtc

SEQ ID NO: 2319 - DNA, 560 bp, Homo sapiens
gacagaaggggagagtactttgcaaatgattatcgagtagtcaaccaatttgccagacattatcagactggacagccactgccaaaaaatatggtgtctcgtctttgtgaatctaaaaaggtttgtgctgcagctgatatgcaacttcaggtcttttatgccactctggatcaaatctaccatgggaagcatcccctgaggaattcaaccacagacattctcaaggaaacacaagagaaattctatggcctaccatatgttccaaatactgcctggcagctgcgattcagccacctcgtggggtatggtgctagatattactcttacctcatgtccagagcggtcgcctccatggtttggaaggagtgttttctacaggatcctttcaacagggctgccggggagcgctatcgcagggagatgctggcccacggtggaggcagggagcccatgctcatggttgaaggtatgcttcagaagtgtccttctgttgatgacttcgtaagtgccctcgtttccgacttggatctggacttcgaaactttcctcatggattctga

SEQ ID NO: 2320 - DNA, 551 bp, Homo sapiens
tacggctgcgagaagacgacagaaggggaaaaggataagccaagatggctgtaaacacagagcatttgagctgccactcttggagcacattgatttttcaaaagccagctctgtcaggaaaggaggtgctgttatgagcagctcttccagtgggcaaagaggacgcccataatttcttccattgctagctcatctgtgggaccaatttggtgtaagcaacctgtggcctgcacttgtggcctcgaaggaagcacaaaccctccatccacttcccatttcctctgcccttttccacctcccccttccatcccaccagctgccagtggctcccaaaaagccttattgagccccttgttgacacttggggctgcggaggcctctccctactggtctggcctttcctgagaggcaggtcttccgtcctcagagcctttctggaacaaggagaatgcctgtgcaggtggacacacaggcctggcctgtcgctctcacttgtcttccagcggggagcttcacgttgccgagtggaagaaccatgacctccacttgct

SEQ ID NO: 2321 - DNA, 297 bp, Homo sapiens
atgacatatttctgagaacactttaatatatttccacacctactggaatctaattcagtcgatcggataaaagaaagacttttttgttgttgtttttgaaaatccataatgtagcaggttctgcgctggttttttaatgtattttatttttgtgctctcctgccaaaagaaaaggctgataagtaagtacacagtacaacatgtaaatttgtataaaaatatgcttgtttagattgctctacaataactatattaaggtaaattgtgtgtgtgtgtgtgagagagagagagagagag

SEQ ID NO: 2322 - DNA, 240 bp, Homo sapiens
tggctatatgcctattctccatgtaccctgcatggtagtgctgcaaactttaaagtacatttctttcacagcagtattttttttcataagtggcatataaatctcattcaatgaaatggggaaatcacgttgagaagttggtctgtcatctcccattgagcaaagactggcaggagataataaaaataaatatgggcacacatgtattaatatacagcacgcatttacaagtttattttt

SEQ ID NO: 2323 - DNA, 470 bp, Homo sapiens
gaagacgacagaagggtacggctgcgagaagacgacagaagggtacggcgcgagaagacgacagaagggtacggctgcgagaagacgacagaagggtacggctgcgagaagacgacagaagggggctgaggttccttctattctgatggagtactttgcaaatgattatcgagtagttaaccaatttgccagacattatcagactggacagccactgccaaaaaatatggtgtctcgtctttgtgaatctaaaaaggtttgtgctgcagctgatatgcaacttcaggtcttttatgccactctggatcaaatctaccatgggaagcatcccctgaggaattcaaccacagacattctcaaggaaacacaagagaaattctatggcctaccatatgttccaaatactgcctggcagctgcgattcagccacctcgtggggtatggtgctagatattactcttacctcatgt

SEQ ID NO: 2324 - DNA, 445 bp, Homo sapiens
tacggctgcgagaagacgacagaagggtacggctgcgagaagacgacagaagggtacggctgcgagaagacgacagaagggtacggctgcgagaagacgacagaagggtacggctgcgagaagacgacagaagggtacggctgcgagaagacgacagaagggtacggctgcgagaagacgacagaagggtacggctgcgagaagacgacagaagggtacggctgcgagaagacgacagaagggtacggctgcgagaagacgacagaagggtacggctgcgagaagacgacagaagggtacggctgcgagaagacgacagaagggtacggctgcgagaagacgacagaagggtacggctgcgagaagacgacagaagggtacggctgcgagaagacgacagaagggtacggctgcgagaagacgacagaagggtacggctgcgaga

SEQ ID NO: 2325 - DNA, 225 bp, Homo sapiens
atattttcattctgtaattgcaccattgctattcttaattctttgtgtttctgatttaaagggaaaacacacacaaaaacagactgttgtgtaaaattgacaagaatgagtgtgaacctgacagtcagagacagaggttgttgtaaaattagcaatggaaatagctttcttctctggaggttaaaaataatgtatttacaaggaagttatttacattggccactt

SEQ ID NO: 2326 - DNA, 362 bp, Homo sapiens
agttttgggaataggcatcaatgggtggtatttgctttgtaactccccccaggtacgatagggactgaatatggaccctgctgaaagcagtgtattgacgcatatttaactcgccctctatccgtagagtagtcatgacactatacagatggttcgagttcatactgcagcttaaaacaagcaaaatacacagatgataatatgctaaattttcctctatcctgtatatttcacaaaaaggcatatgcaatatttacatttttaatttagtttacagaatggaaccaaaatgtataaatgttatgtttgctaaaacttcacaatgtatattgggtctttgtacattttgcctgacttacctt

SEQ ID NO: 2327 - DNA, 202 bp, Homo sapiens
tacggctgcgagaagacgacagaagggggagtggagcggcggcatgcttgcagctcggcggcagcctgtgagagctgagggtcagttcttcgagtagatctcaagctgcgttttcctccttctccaaagcagggatgggaaggtggaggctactggttgaagagaagaaaggggttgggggaatgcaacacctgcaaacact

SEQ ID NO: 2328 - DNA, 80 bp, Homo sapiens
tgcaattgggccatatgctaatttgcacgttgattcaccttctttgcctttaagccttttttttcttttttttttttggg

SEQ ID NO: 2329 - DNA, 220 bp, Homo sapiens
agaatatgagcccatttgaaataaggttttaggcaattttgctgttggctctgatttgtatatagcaaatttaaagttacagagtgtttcctagatagaagattagttcatttggttcattttgtctttgaagcaagccaagctcatgagccagttggttatttgtcataaatgaacacccatcactatatgctatgttgaggggaggcaagtctgatct

SEQ ID NO: 2330 - DNA, 130 bp, Homo sapiens
tttatttatttatttatttttgcttaggatagtattatttcttatagtgaaagcattctatgttatttattattagtctaattttgtagttttacaatgctatcctcttttacaaagctatgatcaactc

SEQ ID NO: 2331 - DNA, 365 bp, Homo sapiens
actctaccgaagttttaatttgtcactagtttaaagggccaaaagatctgttttcttcagatattagagacacaaaccaagcatctcccactttcttggaattccttctcaaaaatgactaaagtctgagactgttttcttatttaatgtctattgaattctgttttacagaatttcaaaagagcaggttcttagcttacttttcaatggaacattttagccaggtagtataagtacaggtgcgggtaacctcagataaatcaaggtgttatgcagctgtctctatattaaaaatatttgctgacatcagtgtagacttcatcttgtagttcttcagtgttttctttccttatcttttgctcata

SEQ ID NO: 2332 - DNA, 196 bp, Homo sapiens
gctccttgaaatgggctgagtccctgttgctcacccttgactaggaaaaaccagtttctcttttattgtatgatactaatctctattctaaaaattacgatcagttctcaaccatactccaaactctctcttttccagctacctttactccctctccttcaattccactttcctatgcttactttttttttttttt

SEQ ID NO: 2333 - DNA, 192 bp, Homo sapiens
gtattctgtgagaagtcagacagatttgtggggaatggattggtttgttgtatggtatgtattttagcaataatctttatggcagagaaagctaaaatcccttagcttgcatgaatgatcacttgctaaattcctcaaggtaggcatgatgaaggagggtttagaggagacacagacacaatgaactgacct

SEQ ID NO: 2334 - DNA, 283 bp, Homo sapiens
gggtacggctgcgagaagacgacagaagggtacggctgcgagaagacgacagaagggtacggctgcgagaagacgacagaagggtacggctgcgagaagacgacagaagggtacggctgcgagaagacgacagaagggtacggctgcgagaagacgacagaagggtacggctgcgagaagacgacagaatggtacggctgcgagaagacgacagaagggtacggctgcgagaagacgacagatgggtacggctgcgagaagacgacagaagggtacggctgcg

SEQ ID NO: 2335 - DNA, 507 bp, Homo sapiens
atacatactcctgccaaatactataaggtgtcaaaatttggcattggggtttcaaaagtataaacccagcccaaaacggaatgatctttacttgtgtaatttttaataagtaagacattgatatggggtttaataaaaacagctgcatgttgaatttagtaagattactagcacttctaatcctgcggcatttggcagtctagtccacagacaataaggtaaggactgttactgcctttgtttcaaatctaaactataaaccaggttcctctcagtgttagttcagcctatgcccaggaatgaacaaggacagcttggaggttatgagcaagatggagccagttaggtcaaatctttttttcactgtctcagttataattttgcaatggcggcttcataactttaaatcatgactatcacagatttcataaataatctagataaacaattaaaataattaggtaattgtaatgggataaatacttgtagacaaactggtcataattt

SEQ ID NO: 2336 - DNA, 147 bp, Homo sapiens
ggaaaattctgttaattatactgcccttcccctttataggttttctgtaggagttaaaatacactttttcaattgcttgacataatgctcaacactggtaggggagctaaaaatgtcagctattgtcctatgtgccaaaaaaaaaac

SEQ ID NO: 2337 - DNA, 323 bp, Homo sapiens
atatttgaagatcttcattgtatatttatacaagttagcaaatgctgcctaacaaaccacctcaaaggtaattgcctaaaacaacacacgttattactcttgagtttgtgtatcagcagaatgactcctcctgtctcagtttgccttcattgtgtatctggagtcagctgtgcatcagtcagtcaactctgttgactgcaaatttctcttgaatggactcatctgtactctcctctatacattgtctgattttccagaaggctacacagggcttttgacatagcaatgactgggttcccatggaagtgagcagaagcactcat

SEQ ID NO: 2338 - DNA, 460 bp, Homo sapiens
acgacagaagggtacggctgcgagaagacgacagaagggtacggctgcgagaagacgacagaagggtacggctgcgagaagacgacagaagggtacgggtgcgagaagacgacagaagggtacggctgcgagaagacgacagaagggtacgggtgcgagaagacgacagaagggtacggctgcgagaagacgacagaagggtacggctgcgagaagacgacagaagggtacggctgcgagaagacgacagaagggtacggctgcgagaagacgacagaagggtacggctgcgagaagacgacagaagggtacggctgcgagaagacgacagaagggtacggctgcgagaagacgacagaagggtacggctgcgagaagacgacagaagggtacggctgcgagaagacgacagaagggtacggctgcgagaagacgacagaagggtacggctgcgagaaga

SEQ ID NO: 2339 - DNA, 429 bp, Homo sapiens
gacagagggtactgatttgtaaaattgtataaaaaatattaactttcaggctgggcgcagtggctcatgcctgtaatcccagcactttgggaggccaaggtgggtggatcatgaggtcaggagtttgagaccagcctggccagcatggtgaaaccccgtctctactaaaaatacaaaaaattagccaggcatggtggcgggtgcctgtaatcccagctacttgggaggctgaggcaaaaaaatcacttgaacccgggaggtggaggttgcagtgagctgagatcgtgccattgcactctagcctgggcaatgagagtgaaactccatctcaaaaaaaaaaaaattaactttctctattatacataataagcatatttcctagtttctcttgtttaattaaatagaacgttttgacataaacaatctgtt

SEQ ID NO: 2340 - DNA, 551 bp, Homo sapiens
acagaagggactatatatcactctggctagaggcgagccccgtggcagctctgtcacccaatgccttgtcttatccttcttgtaccttccccaagcatggttcgtagcatgtgcgtgcatggttcatagtgtgtgagtactaaggaattaaaaaaacaaaaagtagtagagcaggttgactcttctttaaaaataaacatattgacctgcatggaaggtgaggctgaccctccccattctccattcatcactggattcccagcagggtgtgtgaattcagtggaatgggaagcattgaccaacctctgtgtttctgaagaagtgagagcttttgtaggtgagcagataatgtatttaaatagctctaattttacagtgaaaaacacccacagtgtgacaacatggaaagaatataatcaacttcaacccaatatactcaactccaatcccaattttggcagatagaacaaaaagtcaatacatgttatctgacattaaacagagcttatggaagacagaagtgggtgaggcagataggccgtacttggtca

SEQ ID NO: 2341 - DNA, 496 bp, Homo sapiens
tagctgaatatatctttatacatatgtaaagccaatattttagaataagtattttagtataaatattttagtaaaatactataaaaataaaaggacatataatttatttttatggaaaacatcaacatgtaatatcagaagagttgtcatcagtttctttggaaaggctaccaattttactaagtgaaattgtaaaacatagtacatcagttaggactctgttggttgcatgtgaactattctaactagtttaagtcagaaaaaaaatttcttacaggctctatacctatcaaatctaggaggaatttagactacaggcattgctgaatctaaggactaaaactatatgagtaggatcttctccttccctagcagctcctggcttacattctcttaggttcatgcctgtgtctctgtggtttctgcagctgcctatgcatctcaggacccctgattgcccacatgcctacggtagtcctgagccattcaccatgac

SEQ ID NO: 2342 - DNA, 93 bp, Homo sapiens
ggcaactccatccaaaacatatggatagagtggggaatcagggtactattatcagaagcaagtatatatgaatattgggcagcaagataaaca

SEQ ID NO: 2343 - DNA, 488 bp, Homo sapiens
acgcatgctgggtataggcaaggaaagtaattttcaaagtacatttgcagttctctttttcagagatgattctatgatagtgcctctgaaagttgatgcagcatttttgcctttccaaaaagtatttatcctcactgctttttgcagtacttgtattttcacagatggattatctggggtaattttcttcaaagggagtttgttatacacagtgaaaatgtattatagagtagaatagtaaagctctaggggtttcagaaagctttgatgaacagatgacaaacatctgaaaccccctccgcactgttacccagtgtgtatataatgacttgttatagctcagtgtgcccttgaatccatacagtttcttaaaagacaataaaatcttattaataaagttaatgtaacttctaagttctagaaaatgctgattctgtctgccccattcaattgggggctactaattgatttgttgcttggatttcctg

SEQ ID NO: 2344 - DNA, 624 bp, Homo sapiens
gtatgttgggtccacctcagtgcagacctcacggctggcaaaatccaagatgctcactcctgagcatgtgtttattcatccgggatggaagctgctggaagtcccagaaggacgaaccaattttgataatgacattgcactggtgcggctgaaagacccagtgaaaatgggacccaccgtctctcccatctgcctaccaggcacctcttccgactacaacctcatggatggggacctgggactgatctcaggccggggccgaacagagaagagagatcgtgctgttcgcctcaaggcggcaaggttacctgtctctcctttaagaaaatgcaaagaagtgaaagtggagaaacccacagcagatgcagaggcctatgttttcactcctaacatgatctgtgctggaggagagaagggcatggatagctgtaaagggacagtggtggggcctttgctgtacaggatcccaatgacaagaccaaattctacgcagctggcctggtgtcctgggggccacagtgtgtgacctatgggctctacacacgggtaaagaactatgttgactggataatgaagactatgcaggaaaatagcaccccccgtgaggactaatccagatacatc

SEQ ID NO: 2345 - DNA, 74 bp, Homo sapiens
aaacaaacaaacaaaaaaggataaaataaaagaaacaaaagcccaggtggtaaattttccagtcttcttggaga

SEQ ID NO: 2346 - DNA, 473 bp, Homo sapiens
attgatctgttaggactgcttaagagctaacttgtcacctgtgaaatggttggcttgatattttgatatttaaaggtttgccttttgcttctcgtgggtacaagccagagagagcagtggttacatgggggtagaatggtgactcgtttttacctgactgtggatcagctgggtggttcctgaatctcactgggctcattgtggctctttgcttgtcctgtatttactgtctgtggtagtgagatagaagaaccaccatgttcttctggttctagactcaaactacagggagaaggaagagatgtgtctggcatcatttccgtgttggagtaactttgtggtagattgctgtggcctttctttgtggcctgccacttgtcttacattcttcagagcatttatgcacaggagcataaatatatgattttcatcttgccattgaaagtaaactttccggccgggcgtggtggctc

SEQ ID NO: 2347 - DNA, 407 bp, Homo sapiens
agaaaagaaagggaagaactgccttcttatactacagaacatgcattagtgtgggctatatagctgtggctcatgctacccaattccagatttctttgtcctctaagagttgattgctgtatattaaaattgaacatcagaagatgggaagagggctctgtaagccagaaccttactaaagtagagggcacaatcagtgtgaataaattcacttcagaatctcaagtcaaggccaggcacggcggctcacgcctgtaatcccagcactttgggaggccgagacaggcggatcacctgaggtcgggagttcgagaccagccttaccaacatggagaaaccccatctctactaaaaatacaaaattacctgggcgtggtggtgcatgcctgtaatcccatcatctactc

SEQ ID NO: 2348 - DNA, 256 bp, Homo sapiens
ggaagcacatatctttccactcagaatttcaaggggaaaatgttgatagtttttagcaaaggtgtgtccaaatctgaaagttggggtttgctttcattatttctttcttttctgtatttcttcacctatcttgatcaagaaaataaacagcttatatttttctaaatttcacacgatgtaataaaatttagaagtaaaagactaggaattctgacatggtctgtacgatggtctatacagggcattaaacaatgcc

SEQ ID NO: 2349 - DNA, 489 bp, Homo sapiens
gattcctgaagctgacagcattcgggccgagatgtctcgctccgtggccttagctgtgctcgcgctactctctctttctggcctggaggctatccagcgtactccaaagattcaggtttactcacgtcatctagcagagaatggaaagtcaaatttcctgaattgctatgcgtctgggtttcatccatccgacattgaagttgacttactgaagaatggagagagaattgaaaaagtggagcattcagacttgtctttcagcaaggactggtctttctatctcttgtactacactgaattcacccccactgaaaaagatgagtatgcctgccgtgtgaaccatgtgactttgtcacagcccaagatagttaagtgggatcgagacatgtaagcagcatcatggaggtttgaagatgccgcatttggattggatgaattccaaattctgcttgcttgctttttaatattgatatgcctatacacttacac

SEQ ID NO: 2350 - DNA, 194 bp, Homo sapiens
agtgaaactatctgctattcttgatcatacttgggaaaatattattaaatatccttacactaggaatgagaagaaaaaacacctgtcaaaattttatggaatatttttgcatttcactagcattcgttgatcttttacttttggtaaacatttccattatattgtatttcagggattttgtacttttaagcatt

SEQ ID NO: 2351 - DNA, 190 bp, Homo sapiens
aatgagggttgttaatccatcacaagcaaaaggtcagaacagttaaacactgcctttcctcctcctcttattttatgataaaagcaaatgtggccttctcagtatcattcgattgctatttgagacttttaaattaaggtaaaggctgctggtgttggtacctgtggatttttctatactgatgttttcg

SEQ ID NO: 2352 - DNA, 521 bp, Homo sapiens
tacggctgcgagaagacgacagaagggtacggctgcgagaagacgacagaagggtacggctgcgagaagacgacagaagggtacggctgcgagaagacgacagaagggtacggctgcgagaagacgacagaagggtacggctgcgagaagacgacagaagggtacggctgcgagaagacgacagaagggtacggctgcgagaagacgacagaagggtacggctgcgagaaacgacagaagggtacggctgcgagaagacgacagaagggtacggctgcgagaagacgacagaagggtacggctgcgagaagacgacagaagggtacggctgcgagaagacgacagaaggggccttccgccacggccgtctctggagagcagcagccatggccctacgctaccctatggccgtgggcctcatcaagggccacaaagtgaccaagaacgtgagcaagcccaggcacagccgacgccgcgggcgtctgaccaaacacaccaagttcgtgcgggacatgattcgg

SEQ ID NO: 2353 - DNA, 520 bp, Homo sapiens
tggacatttgcttacatggggaacaccacacaagaccgtatgagccagtaagaagatctggctagaaactttaaacaaattgctaaaggctgaacatgggctcgcaggagagggtggcagacccggggaggtttgtactttgttgtaggcgtctcctctgccaggtgccccaagggaagacctgggagaatctcgagaagcctttcctgtggtcttgaccgaggaagttgaacagcagccactgcagaacctctagctgaacccatgtccttcatctttcctactgactagaacattaatcttcaggaaggatacagaactgcagcctgagggcactggtggatccctctagaggaggggaagaagaatggcaaccactagcaatattcaactcagaatcatattccctgtcattcctaagaaacaaatgccctaatctacaggaggaagggcaaccaagatgtatcctgaggttcctggtggaaactcactgtacccagagggggagaaaagaagaaca

SEQ ID NO: 2354 - DNA, 678 bp, Homo sapiens
gagtcagttctgagactctgcatactgaataataggtgaaataaggaaagactttgagaagcaataagaaatatatctgatttgaccttgtccattaggtgaactactgagttcttcattatgtctgatggagattatgattacctcatcaagtttttagctttgggagactctggtgtagggaagaccagtgtactttaccaatatacagatggtaaatttaactccaaatttatcacaacagtgggcattgatttcagggaaaaaagagtggtgtacagagccagtgggccggatggagccactggcagaggccagagaatccacctgcagttatgggacacagcagggcaggagaggtttcgtagcttaacgacagcgttcttcagagatgctatgggttttcttctactttttgatctgacaaatgagcaaagtttcctcaatgtcagaaactggataagccagctacagatgcatgcatattgtgaaaacccagatatagtgctgtgtggaaacaagagtgatctggaggaccagagagtagtgaaagaggaggaagccatagcactcgcagagaaatatggaatcccctactttgaaactagtgctgccaatgggacaaacataagccaagcaattgagatgcttctggacctgataatgaagcgaatggaa

SEQ ID NO: 2355 - DNA, 254 bp, Homo sapiens
ggctctgatgtgtctctcacagcttgtaaagtgtgagacagctgccttgtgtgggactgagaggcaagagttgttcctgcccttccctttgtgacttgaagaaccctgactttgtttctgcaaaggcacctgcatgtgtctgtgttcatgtaggcataatgtgaggaggtggggagaccaccccacccccatgtccaccatgaccctcttcccacgctgacctgtgctccctccccaatcatctttcctgttgc

SEQ ID NO: 2356 - DNA, 478 bp, Homo sapiens
gagaaggacccggtgctgcaggctgtgtgggtagctgagcagagctaagcggcttgacggaccaacatctctccagctggttgaagacaagctctcagaagacaatgctgcatgtcacagccccagcaaccaacaacaccagcctgacaacttgctggggtggccgccttgtggtctgaggtggccgtctaaactatgtggtctgatctcaggctgcagaccttgcaggactgtcttcacacagactggaagtgctaacaggtggtgaggacaccgctttacaacgatgcagggggccccatgtcaccctcacccatgggaagtttgacttggtggactcagccaagccacagaggtctaacgcttctctgcggtgatttcaggctgccctggcagaaagcacagtgcctgcagacatgctgtcactgctccacacatcaacgctggcagtccttggggctctgtgtgtatatggtgc

SEQ ID NO: 2357 - DNA, 149 bp, Homo sapiens
ggagatgctggcccacggtggaggcagggagcccatgctcatggttgaaggtatgcttcaaaagtgtccttctgttgatgacttcgtaagtgccctcgtttccgacttggatctggacttcgaaactttcctcatggattctgaataaa

SEQ ID NO: 2358 - DNA, 457 bp, Homo sapiens
gaagagcaacacgattctgggatcccaggaggggaacaccatgaagactaacgacacatacatgaaatttagctggttaacggtgccagaaaagtcactggacaaagaacacagatgtatcgtcagacatgagaataataaaaacggagttgatcaagaaattatctttcctccaataaagacagatgtcatcacaatggatcccaaagacaattgttcaaaagatgcaaatgatacactactgctgcagctcacaaacacctctgcatattacatgtacctcctcctgctcctcaagagtgtggtctattttgccatcatcacctgctgtctgcttagaagaacggctttctgctgcaatggagagaaatcataacagacggtggcacaaggaggccatcttttcctcatcggttattgtccctagaagcgtcttctgaggatctagttgggcttt

SEQ ID NO: 2359 - DNA, 463 bp, Homo sapiens
gggagaaactcacttatggtctccacaagtatctgaagatgggaaagcccatcctttcaaaatcaacttagaatcagaaccacaggaattcaaacccattggtaccgcgcacaacagaagggcccagccttttgttgcagctgcaaacattgatgacaaaagacaggtagtgagcgcttcctataactcgccaattgggctctattcaactagcaatatacaagatgcgcttcacggacagctgcggggtctcattcctagctcacctcaaaacgagcccacagcctcggtgccccccgagtcggacgtgtaccggatgctccacgacaatcggaatgagcccacacagcctcgccagtcgggctccttcagagtgctccagggaatggtggacgatggctctgatgaccgtccggctggaacgcggagtgtgagagctccggtgacgaaagtccatggcggt

SEQ ID NO: 2360 - DNA, 431 bp, Homo sapiens
tggaaagacataaattgtaataaaaagtgttagcaccttgcacctcctgctaattgcattcctagtcaagaggaagcaaaattgtataacaaatgtcagaggtacatcatgaacaaagtgcaaagagttgtctgttcctttcaatagtgaattgaaaaagagtagcaaacctgtttaagctatgtatagtagctttaattttggctcctaacctttctgggactcatctatttcatttgtctaatgaggataatagtaacccattcaacttactgtacacagactgtactgtacacagactgtttcttcattatattcattaaagatggatttaacattaattcattcattcacccatgtattttttagtttaagaaatatttttgggccagatgcagtggctcacacctataatcccagcagtttgaaag

SEQ ID NO: 2361 - DNA, 429 bp, Homo sapiens
gccacttcatggtgcgaagtgaacactgtagtcttgttgttttcccaaagagaactccgtatgttctcttaggttgagtaacccactctgaattctggttacatgtgtttttctctccctccttaaataaagagaggggttaaacatgccctctaaaagtaggtggttttgaagagaataaattcatcagataacctcaagtcacatgagaatcttagtccatttacattgccttggctagtaaaagccatctatgtatatgtcttacctcatctcctaaaaggcagagtacaaagtaagccatgtatctcaggaaggtaacttcattttgtctatttgctgttgattgtaccaagggatggaagaagtaaatatagctcaggtagcactttatactcaggcaaatctcagccctctactgagtccctt

SEQ ID NO: 2362 - DNA, 536 bp, Homo sapiens
atagtaaggaagcccatgtctagtctggtacctttaaaccaggccatctccaacttttcaaaatgactcaaaagttgagctagccttattttaaaaactaaaagttcaaaatcagtggtgacatgaggacttatttatttaaagtgcttaagccttggttttagagtttctaagagacctagtggaatttgctattatgaaaagcatgaaaagattaagaaacctggctaaaggtcaggtgcccagcttcgaggaaaagttgggcttttagggaccgggaagcattaaaggcacagaaactttacattttgggggtcattttgttgagtaggtgaagtgagggatttgggcttgatatttggctgccccatctctatgtgggaactcaaagttaaaaacccactgtaggtaaattagaagggcagctcttgaatctgggccagtctatatcccttctgtgaagtgctaacagccaggctatctgtagcctgggtgggagcccagataatgtgagctggtaaagggtattggaaaag

SEQ ID NO: 2363 - DNA, 513 bp, Homo sapiens
catataaaagttttccaggccaggcacggctgttcatgcctgtaatcccaacatttggggaggccaaggcaggaggatatcttgaagccaaatgtttgagtccagtacaggcaacatggtgaaattctgtcaccataaaaaaataaataaaataaatatggctgggcatggtggttcacgcttgtaataccagcactttgggagtcggaggcaggtggataatgaggtcaggggttcgagaccagcctggccaaaatggtgaaaccctttctctcctaaaaataataacagtaaaaaatcagccaggcatggtgctgtgcgcctgtaatgccagctactcaaaaggttgaagcaagagaattgcttgagcctgggaggtggaggttgcattgagctaagatcatgccactacactctagcctgacccacagagcaagacactgtcttgaataaataaataaataaataaataaataaagttagccaggcctggaggtgcatgcctatagtcct

SEQ ID NO: 2364 - DNA, 185 bp, Homo sapiens
gtgggtttccttcttttacatccttgcgcattgctatattgatatggataattagattctaaaagtaaaatcactgggacaaaggatacacacacactacacacacacacacacacactcttttttgtgacaggatctgactctgacacccaggctggagagcagtggcgcaatcacagtttact

SEQ ID NO: 2365 - DNA, 463 bp, Homo sapiens
gtcaaagttcatagagttcccatgaactatatgactggccacacaggatcttttgtatttaaggattctgagattttgcttgagcaggattagataaggctgttctttaaatgtctgaaatggaacagatttcaaaaaaaaaccccacaatctagggtgggaacaaggaaggaaagatgtgaataggctgatgggcaaaaaaccaatttacccatcagttccagccttctctcaaggagaggcaaagaaaggagatacagtggagacatctggaaagttttctccactggaaaactgctactatctgtttttatatttctgttaaaatatatgaggctacagaactaaaaattaaaacctctttgtgtcccttggtcctggaacatttatgttccttttaaagaaacaaaaatcaaactttacagaaagatttgatgtatgtaatacatatagcagctcttga

SEQ ID NO: 2366 - DNA, 568 bp, Homo sapiens
tacggctgcgagaagacgacagaagggtacggctgcgagaagacgacagaagggtacggctgcgagaagacgacagaagggtacggctgcgagaagacgacaggagggtacggctgcgagaagacgacagaagggtacggctgcgagaagacgacagaagggtacggctgcgagaagacgacagaaggggacgcaagagtgcgtctcggacagcgaatgcgccgacaacctcaagtgctgcagcgcgggctgtgccaccttctgctctctgcccaatgataaggagggttcctgcccccaggtgaacattaactttccccagctcggcctctgtcgggaccagtgccaggtggacagccagtgtcctggccagatgaaatgctgccgcaatggctgtgggaaggtgtcctgtgtcactcccaatttctgagctccagccaccaccaggctgagcagtgaggagagaaagtttctgcctggccctgcatctggttccagcccacctgccctcccctttttcgggactctgtattccctcttgggctgaccacagcttctccctttccca

SEQ ID NO: 2367 - DNA, 380 bp, Homo sapiens
acacacacacacacacacaaagacacacatggagggagaggaagtaaagattaaaaagcagcacatagtgtatcggtaggcaatgggaccactagggattttcatattcttttttattttcttctttatactgcttacattttgagggttatataatgagcatgtattacttctgtaatcaaaaaaagggggtataaacctgaccttaatataataaaacaaaattactggccaggcacagtgtctcatgcctgtaatcctaccactttggaaggctgaaactggtaaatctcttgagctcaaaaatttgaaaccagcctgagctcagtgagacagtgagacctcgtctctggaaaaaatacaaaaattagccaatgata

SEQ ID NO: 2368 - DNA, 309 bp, Homo sapiens
agcctggggagggggtcattgttctcctcgtccatcagggatctcagaggctcagagactgcaagctgcttgcccaagtcacacagctagtgaagaccagagcagtttcatctggttgtgactctaagctcagtgctctctccactaccccacaccagccttggtgccaccaaaagtgctccccaaaaggaaggagaatgggatttttcttttgaggcatgcacatctggaattaaggtcaaactaattctcacatccctctaaaagtaaactactgttaggaacagcagtgttctcacagtgtggggc

SEQ ID NO: 2369 - DNA, 482 bp, Homo sapiens
gacagaaggggggcacaaagctggaataaccctgccagttcttagaagctttaagattcatcgtcttgaacttgatacacatagtatagcaccttaaaaacgaatcatctgctagttcagtattttctacttacaatcactccctcccagggcatgtaattaatttactgagcttaaaaaaaatatcaggattactcacacagtcttgaagatgcaatgtcagctatttaggacagaaacatccaaggccgtgtcagaactcaattacgactacatatgcattaaggcaggaactggcaggcctcagggtacgccaactataggactcgtgcttctcgtacgctgggctataatctatgaaactgagctccagagccagccaatcacttagctcctcataacaagtctaactggctctggaaagctgaaagggctgcactggaacacacagatgagatattctacacattaatctacttatc

SEQ ID NO: 2370 - DNA, 494 bp, Homo sapiens
tacggctgcgagaagacgacagaagggtacggctgcgagaagacgacagaagggtacggctgcgagaagacgacagaagggtacggctgcgagaagacgacagaagggtacggctgcgagaagacgacagaagggtacggctgcgagaagacgacagaagggtacggctgcgagaagacgacagaagggtacggctgcgagaagacgacagaagggtacggctgcgagaagacgacagaagggtacggctgcgagaagacgacagaagggtacggctgcgagaagacgacagaagggtacggctgcgagaagacgacagaagggtacggctgcgagaagacgacagaagggatttaaggattctgagattttgcttgagcaggattagataaggctgttctttaaatgtctgaaatggaacagatttcaaaaaaaaaccccacaatctagggtgggaacaaggaaggaaagatgtgaataggctgatgggcaaa

SEQ ID NO: 2371 - DNA, 317 bp, Homo sapiens
gacagaggggacaaaattagctgggcatggtggtgtgtgcctgtagtctcacctactcgggaggctgaggcaagcttaacccgggaggcggagattgcagtgagctgagattgggccactgcactccagctggggcaagagagcgagactgtctcaaaaaaaaaaaaaagttgggaagggggaaggggccacctggggggaaaataatttggggggttctttaaggccttggttgtttcctttaaaacacccttttttattttttaaaccccttcggccatttaaattaaacccagtggttggggattttattttta

SEQ ID NO: 2372 - DNA, 181 bp, Homo sapiens
ggaaaccatcaacctggacagagatgcagaggatgttgatttgaatcactatcgcatagggaagattgaaggatttgaggtactgaagaaagtgaagactctctgcctccgccaaaatttaattaaatgcattgagaatctggaggagctacagagtcttcgagagctggatctttacgac

SEQ ID NO: 2373 - DNA, 460 bp, Homo sapiens
ggctgtgcagggcagggaagctccaggcaaacagcccagcaaacagcagcactcagctaaaaggaagactcacagaacacagttgaagaaggaaagtggcgatggacctcatcccaaatttggcggtggaaacctggcttctcctggctgtcagcctggtgctcctctatctatatgggacccgtacacatggactttttaagagactgggaattccagggcccacacctctgcctttgttgggaaatgttttgtcctatcgtcagggtctctggaaatttgacacagagtgctataaaaagtatggaaaaatgtggggaacgtatgaaggtcaactccctgtgctggccatcacagatcccgacgtgatcagaacagtgctagtgaaagaatgttattctgtcttcacaaatcgaaggtctttaggcccagtgggatttatgaaaagtgccatctcttt

SEQ ID NO: 2374 - DNA, 574 bp, Homo sapiens
ataaaaagaaaaacctggctctctgcttaaggccaagaaacctggcattaatggaatcaggaaaagaaaagcagttgccacaaatcaaatcctttcatagggtatatctgtctgttattcctttgacatctgaaaattgccacatattgggaaagagaaatcattgcctttcttcatgtccctccagcacagttgtttctgagctgcgctgtctctaactgccagctcatgtacgctccttccagagagtcattctgtctgcacttagaggaaagaaaacatggactccttgacaccacgtctctgaggactcatcttgtgtcttccatcctggcacaagaaccaagtgtaccagacagcctttgaggctgaaaagagatcgaggaacagcaggggaaaggcaaatagcacaatatttgtttccacaactgatgtcactacaatgaatatgaaactcagaattttctgttaagtcaagcactagctgaggttgaataacatgctatgacaatagtggtgctataaacccaaggacattgttatgagttttcacattaaaaaaatggctggaaac

SEQ ID NO: 2375 - DNA, 522 bp, Homo sapiens
tacggctgcgagaagacgacagaagggtacggctgcgagaagacgacagaagggtacggctgcgagaagacgacagaagggtacggctgcgagaagacgacagaagggtacggctgcgagaagacgacagaagggtacggctgcgagaagacgacagaagggtacggctgcgagaagacgacagaaggggctctgaagccattacaaaggttgcttaacttctaattatttgatcactgaggaaaatccagaaagctacacaacactgaaggggtgaaataaaagtccagcgatccagcgaaagaaaagagaagtgacagaaacaactttacctggactgaagataaaagcacagacaagagaacaatgccctggacatggctccagagatccacatgacaggcccaatgtgcctcattgagaacactaatggggaactggtggcgaatccagaagctctgaaaatcctgtctgccattacacagcctgtggtggtggtggcaattgtgggcctctaccgca

SEQ ID NO: 2376 - DNA, 285 bp, Homo sapiens
taatgcgttcggtgatttcagaaagctagaaagtgtatgtgtggcatttgttttcactttttaaaacatccctaactgatcgaatatatcagtaatttcagaatcagatgcatcctttcataagaagtgagaggacggtgacagccataacaggagtgccacttcatggtgcgaagtgaacactgtagtcttgttgttttcccaaagagaactccgtatgttctcttaggttgagtaacccactctgaattctggttacatgtgtttttctctccctccttaaat

SEQ ID NO: 2377 - DNA, 471 bp, Homo sapiens
gaaaaatataatacacataaataaaaaaatatatttttcatttctatttcattgttaatcacaactacttactaaggagatgtatgcacctattggacactgtgcaacttctcacctggaatgagattggacactgctgccctcattttctgctccatgttggtgtccatatagtacttgattttttatcagatggcctggaaaacccagtctcacaaaaatatgaaattatcagaaggattatagtgcaatcttatgttgaaagaatgaactacctcactagtagttcacgtgatgtctgacagatgtcgagtttcattgtgtttgtgtgttcaaatttttaaatattctgagatactcttgtgaggtcactctaatgccctgggtgccttggcacagttttagaaataccagttgaaaatatttgctcaggaatatgcaactaggaaggggcagaatcagaatttaagc

SEQ ID NO: 2378 - DNA, 395 bp, Homo sapiens
atgagtgcctaatccacttgtgaaaattaaagaaaggggatcttttttatgaaaaacacctaatatggaaagacataaattgtaataaaaagtgttagcaccttgcacctcctgctaattgcattcctagtcaagaggaagcaaaattgtataacaaatgtcagaggtacatcatgaacaaagtgcaaagaattgtctgttcctttcaatagtgaattgaaaaagagtagcaaacctgtttaagctatgtatagtagctttaattttggctcctaacctttctgggactcatctatttcatttgtctaatgaggataatagtaacccattcaacttactgtacacagactgtactgtacacagactgtttcttcattatattcattaaagatgga

SEQ ID NO: 2379 - DNA, 221 bp, Homo sapiens
aagaaaatttacctggatgaaaagaggcttttggctggggaccatcccattgaccttctcttaagggactttaagaaaaactaccacatgtatgtgtatcctgtgcactggcagtttagtgaacttgaccaacaccctatggatagagtcttgacacattctgaacttgctcctctgcgagcatctctggtgcccatggaacactgcataacccgtttctt

SEQ ID NO: 2380 - DNA, 457 bp, Homo sapiens
tacggctgcgagaagacgacagaagggtacggctgcgagaagacgacagaagggtacggctgcgagaagacgacagaagggtacggctgcgagaagacgacagaagggtacggctgcgagaagacgacagaagggtacggctgcgagaagacgacagaagggtacggctgcgagaagacgacagaagggtacggctgcgagaagacgacagaagggtacggctgcgagaagacgacagaagggtacggctgcgagaagacgacagaagggtacggctgcgagaagacgacagaagggatcatctcagagatcaccacggactgatagggatatcaacatatcaccgtttagaaaagacttcttttttaatctatgagatgtttacactggttttgtagagaagatcaagtgacaggtataccgtaacttttttgattacacgtttatgatagattct

SEQ ID NO: 2381 - DNA, 500 bp, Homo sapiens
actggacagtggaacggcagattttactcaggactgttgcagtagaggaaatgaaagctcagtgtagaactgggctccactccaaatacagcacaggcaagtggggatatatagccaaggagcaggctgggtttggtggatggaaaatcatgaagaggaaccgtcagaggtgagggagattctggctaaaatgacctcacaggattcttgctgaagacaggccagggtgaccaggcatcacctgggagatggtgagggttgaggaacctgagaagatactgagcatggccagatttagccaggtttttgggaaactgggctcttgaggacagggcccaacagagagtggctcctaagaacctatctagagtttggtcaaggagagagtccttgtcaaaaggctaaactcaaacatagctcatttcattatttatttgcttacttgtctgcctgcagcaggaaataatatacctagggaaattacttctttctatccctat

SEQ ID NO: 2382 - DNA, 413 bp, Homo sapiens
acagaagggtacggctgcgagaagacgacagaagggtacggctgcgagaagacgacagaagggtacgggtgcgagaagacgacagaagggtacggctgcgagaagacgacagaagggtacggctgcgagaagacgacagaaggggaaaccccagaagatgagaggagtcgagtcccaaggcatgcttctgtgtgcttctatagaagggataaaccgccaggttgaacctctggaccctccggcaggctctgctcctggtgagcacgtgtttgtgaagggctatgaaaagggccaaccagatgaggagctcacgcccaagaagaaagtcttcgagaagttgcaggctgactacaaaatttctgaggagtgcatcgcacagtggaagcaaaccaacttcatgaccaagctgggct

SEQ ID NO: 2383 - DNA, 664 bp, Homo sapiens
gacagaggggggtgtgttacctgcccaaagctaatgcgaagcaaggtccagctgttccgcccgtcatacaagcttatggagcagccccctttgaagatgtccaggtggacttcacagagacgccaaagtgtggaggtaatcgagtgtggatcaaggactggaacgtaacttctttgtgcccacggtggaaagaccgtagtctgtcgtcctgaccactcccaccgctgtgaaggtagagggaatcccagcctggatccaccacagccgtgtaaaacctgcagcacctgaaacctgggaggcaagaccaagcccagacgacccttgcagagtgaccctgaggaagacgacaagccctgctccagtcacacccagaagctgactggtccacgcacggccgaagcatgaggaagctcatcgtgggattcatttttcttaaattctggacttacacagtaagggcttcaactgaccttactcaaactggggactgtttcccagtgtattcatcaggtcactgaggtaggacagcaaattaaaacaatctttctgttctatagttattatgaatatatgggaatgttaaaagaaacttgtttgtataatgccactcagtacaaggtatgtagcctgggaaatgaccgacctgatgtgtgttataacccat

SEQ ID NO: 2384 - DNA, 203 bp, Homo sapiens
gataggagcctctctccctactgctgctacacaagaccctgagactgacctgcaggacgaaaccatgaagagcctgatccttcttgccatcctggccgccttagcggtagtaactttgtgttatgaatcacatgaaagcatggaatcttatgaacttaatcccttcattaacaggagaaatgcaaataccttcatatcccctc

SEQ ID NO: 2385 - DNA, 373 bp, Homo sapiens
gattcggtaggtctgggatggtgatggggatgggacctcagaatgtatattgctaacatgctcccaggtaatgctgatgcttcaagtcttggaaccacacttcgagaatcactgttataatgtacagcagaactgcatgatcaggtaagtgtgctgagctgttgatcctcctcattcctgagctgggtgtgtagagacaagagcaggagactaggggctgatgatcttttagtcacatccatttaccccagagtgctctatacaaatagcatttttatgtattccccggcatgaaaaagctggaaagcaccaagagaggttggtgttaaacaacatgaagttttggaatctcagaaagtctgaatgagttaat

SEQ ID NO: 2386 - DNA, 388 bp, Homo sapiens
tacggctgcgagaagacgacagaagggtacggctgcgagaagacgacagaagggtacggctgcgagaagacgacagaagggtacggctgcgagaagacgacagaagggtacggctgcgagaagacgacagaagggtacggctgcgagaagacgacagaagggtacggctgcgagaacgacagaaaggtacggctgcgagaatacgacagaatggtacggctgcgagaatacgacagaatggtacggctgcgagaagacgacagaagggtacggctgcgagaagacgacagaagggtacggctgcgagaagacgacagaagggtacggctgcgagaagacgacagaagggtacggctgcgagaagacgacagaagggtacggctgcgag

SEQ ID NO: 2387 - DNA, 230 bp, Homo sapiens
gagtgcctgacctcaagtgatctgcccccccgacttcccaaaatgctgggactactggcatgagccagtgctcctgtcctcattccattcttcaccgtggtactgaccatccatttattcagcaccaattgtgtgccagaccttgtgtcagcattatggaggacttcccttgggaggcttgttagctgtacttgcaatctgatttgggttcccaaatcagcatataacac

SEQ ID NO: 2388 - DNA, 434 bp, Homo sapiens
caccgctgctgaccacccacactcaacctccctctgacctcataacctaatggccttggacaccagattctttcccattctgtccatgaatcatcttccccacacacaatcattcatatctattcacctaacagcaacactggggagagcctggagcatccggacttgccctatgggagaggggacgctggaggagtggctgcatgtatctgataatacagaccctgtcctttctcccagtgctgggatttctccatgtgagggggcagcaggacacccagggatctagcgtgggggaggagaggagcctaatgagaaaatgaccatctaaagcctgcccttcattggtctggttcacgtctccaaaccagcttggatggtagcagagacttcagggtgctccagccaaacgtatttgggcatcaccatgacct

SEQ ID NO: 2389 - DNA, 480 bp, Homo sapiens
tacggctgcgagaagacgacagaagggtacggctgcgagaagacgacagaagggtacggctgcgagaagacgacagaagggtacggctgcgagaagacgacagaagggtacggctgcgagaagacgacagaagggtacggctgcgagaagacgacagaagggtacggctgcgagaagacgacagaagggtacggctgcgagaagacgacagaagggtacggctgcgagaagacgacagaagggtacggctgcgagaagacgacagaagggtacggctgcgagaagacgacagaagggtacggctgcgagaagacgacagaaggggtacggctgcgagaagacgacagaagggatcgtggtggagaagaaggacccaaaaaagacctgttctgtcagtgaatggataatctaatgtgcttctagtaggcacagggctcccaggccaggcctcattctcctctggcctctaatagtcaatga

SEQ ID NO: 2390 - DNA, 165 bp, Homo sapiens
taattctttgtgtttctgatttaaagggaaaacacacacaaaaacagactgttgtgtaaaattgacaagaatgagtgtgaacctgacagtcagagacagaggttgttgtaaaattagcaatggaaatagctttcttctctggaggttaaaaataatgtatttaca

SEQ ID NO: 2391 - DNA, 183 bp, Homo sapiens
gagtgaataaaagcgtattgtaatttcatgtctgcttcagatcatggggacagtaccacccaggaactgctgctgaggcctgggaagctcccttgccttcgggtttggagcagtggcatcatcccaccaacctgagccatgaaagggctgagcagaaagttaaatggtagtttcctgactgga

SEQ ID NO: 2392 - DNA, 275 bp, Homo sapiens
aagatatatagtatgtaaatatattttttagacaatagcttgtaaatgcaatttaattttttttcctcttcttgctgaatttttttttttttttcaaattcgggtttttggccccacccgggggctccccccggagggcccagccttttgagaggctggggcgggcggttcccctggggttaggaccttgaaacccccctgggcaacttggcaaaaccccgtccttcctaaattccaaaatttacctggttttgttggcgtgcccctgtattccc

SEQ ID NO: 2393 - DNA, 435 bp, Homo sapiens
atttcaagtctggtttctaagtgcagtgtgtttgaagcaaacgaacttccaactcacttatttggcattgggcaacttggccaagtctgctactttggaagatggctctggaggaaactctcatatggctaaaaaggcaggctagtttcttacttctacaggggtagagcctttaaaaaagaacgtgctacaaattggttctctttgagggtttctggttctccctgcccccaataccatatactttactgcaattttatttttgcctttacggctctgtgtctttctgcaagaaggcctggcaaaggtatgcctgctgttggtccctcgggataagataaaatataaataaaaccttcagaactgtttggagcaaaagatagcttgtacttggggaaaaaaattctaagttcttttatatgactaatattcttg

SEQ ID NO: 2394 - DNA, 376 bp, Homo sapiens
aactctattacccccacgattcttcaccgctgctgaccacccacactcaacctccctctgacctcataacctaatggccttggacaccagattctttcccattctgtccatgaatcatcttccccacacacaatcattcatatctactcacctaacagcaacactggggagagcctggagcatccggacttgccctatgggagaggggacgctggaggagtggctgcatgtatctgataatacagaccctgtcctttctcccagtgctgggatttctccatgtgagggggcagcaggacacccagggatctagcgtgggggaggagaggagcctaatgagaaaatgaccatctaaagcctgcccttcattggtctg

SEQ ID NO: 2395 - DNA, 489 bp, Homo sapiens
gctctttcccatcttgcaagatggcgggtgaaaaagttgagaagccagatactaaagagaagaaacccgaagccaagaaggttgatgctggtggcaaggtgaaaaagggtaacctcaaagctaaaaagcccaagaaggggaagccccattgcagccgcaaccctgtccttgtcagaggaattggcaggtattcccgatctgccatgtattccagaaaggccatgtacaagaggaagtactcagccgctaaatccaaggttgaaaagaaaaagaaggagaaggttctcgcaactgttacaaaaccagttggtggtgacaagaacggcggtacccgggtggttaaacttcgcaaaatgcctagatattatcctactgaagatgtgcctcgaaagctgttgagccacggcaaaaaacccttcagtcagcacgtgagaaaactgcgagccagcattacccccgggaccattctgatcatcctcactggacgcc

SEQ ID NO: 2396 - DNA, 601 bp, Homo sapiens
gacagaagggggccttttaggcttgggccagccagctttcttgagatgagtgaataaaagcgtattgtaatttcatgtctgcttcagatcatggggacagtgccacccaggaactgctgctgaggcctgggaagctcccttgccttcgggtttggagcagtggcatcatcccaccaacctgagccatgaaagggctgagcagaaagttaaatggtagtttcctgactggaagccacacgtaggtcacttgagtagtcaggaagcacagtgggtgtggagccatcatctgtcttgggctggttcctcccaatctttgtccagtggtataaatggactgtctgctgatggccatacgcagcactggctgttaagatggggaaggggtacatcaggattccactcatagccctggttcgttattgttactcatggctctgacgtccccaagccctcttgaatgttgcaagcaatgttaaatatcacacctcggtctccttttgagcagcccaggtacctaaagcaaggtcaccaaacttgggtttaaacttcagttgccatcacagcagggttcaggttatgcagtttttgcagtgtggagttg

SEQ ID NO: 2397 - DNA, 510 bp, Homo sapiens
gggctaaatgacttttcttaattttaggaattatatagtcagtggcagaaaagtggccaattttttctggaatcaatagcacacaatataacctgggatcccacaggtaagaaaataagcaggattaactaaaatgaaatatcacttgcctagttgttcttatttttattactcttatgtatttcacttctgctgggtgtgaggttgtggggaataccaaagaagtaaaatggattatgcccttttagagtttatactgaaatgaagacagatatgcactgtaagaaatgagagaatgttctaagtgccataataggatacccattgtttttggaaagagatatttctctggagaattaacgtttcattgaaaaggagcctttggacctgagagtaaacagactttagcaatgagagttgggtagatggaacaggaaaaaagtgaaatttaagaaaatatatgccatgcgtggtggctcacgcctgtattcccagcactttgggaggctg

SEQ ID NO: 2398 - DNA, 414 bp, Homo sapiens
atttattcttgggtggccagttttgaaacctaaaaagggacaataaagcaaaaagtatcagtaaggataggtggctgagacccactgccctgagctactagtgtggctgtgcctgtgggtctctaaaaccatctgcattggacgtgaagccacagcaggtggctggactgctggcctgttcctaatgagctacgctgggctttgaggtagaggttggggtttatgaaccccaactctggcttaaagatcttgctgtggctctgttatgttctgaggccttgggattagcctcttcctcattatggagctgattttctagtctgtggatcagctatgcctttggacacttctcttttccattgtgccttttgaatgttgtcttctcactcagcatcagcacttcgatctaaatgc

SEQ ID NO: 2399 - DNA, 622 bp, Homo sapiens
gacagaaggatctgattagaacttccctcaatttttaaaatgcttcttgactggtttggatttgtgcaccccccacccccaatctcatatggaattgtaattgtcagtgttggaggaggggcttgctggaaggtgactggatcatagaggtggtttctaatggtttagcctcatccacctcgtgctgtctgatgataaagttctcctgagatctgcttgtttaaaaagtgtgtagcacctcccctgactcttttcagccatgtgaatatgtgcttgcctccttttcaccttctgccatgattgtaagtttcctgaggcctccctataagcataagtctgtacagcccacagaactgtgagccaattcaatcccttttctttttcaattacccactctcatgtatatctttataacagtgtgagaacagattaatacactcctcctcagaaagcattcaatttagttgtgtctaaagtatgccaggtgttctagggtgttatcttagccaataattcttcctcttcagcaagatctatttgcctatgacagcttgacctacatttcctaccatacttgtcagtaacaagtagcccataacatctgaatggacttcattgaatc

SEQ ID NO: 2400 - DNA, 487 bp, Homo sapiens
ggagatgatattcagatattctctcaaaggcaggactccaacaccgcaggtggaaaaccaacaaaaggaagaaaacagaaaggtgggggagataaggagtagccaggaaaaagaaaatagtgataaaggaagagccaaaaaggaggaaagggaagatgaaagaccgacttcaagaactaaagcagagaacaaaggaaattgaactctctagagacagtcatgtatcaactacagaaacagaggaacaaggggtgtttctacagcaagctgttatttatgaaagaaagcctgtagctgagagacacctacatgaaatccaaaaactactggaagtattaacaatttggcagataatgttcaaaaatttgggcagcaacagaaaagtctggtggcttcaatgagaaggtttagtctacttaagagagagtctaccattacaaaggagataaaaattcaggcagaatacatcaacagaagtttgaatgat

SEQ ID NO: 2401 - DNA, 543 bp, Homo sapiens
gaatagttgaattggggctcaatacatgtttgctaaatgatgattgcatttaactgtgagcagctttttcagatattaatcaaaatgcctgcaaagactacacagttgcaagggacatcagcttatatcccaacattattggttcctgatccatagttgtgagaccttggttgattccctgatagtacagcaactccctgggaatggaagttcaacttgttggctttagaacaacataagcagtttcattgaacattcactgaatgtctcctctgtgctgagcccatgtcagggactgggtctttaatcatgtccttgtatgcagcatccctgcactctacctgcacatgacttctgaacagcatgctctgcccagacagcctcagtgagggccaggacttgaaccctgtggaagcatgtaaagacatatttccgtggtggcagaaggctgaaagttcagcatactgtctgtcttcacttttgagttgttctttcatctgcctaagactcatggcagagcactcatttcacaaactttcactg

SEQ ID NO: 2402 - DNA, 642 bp, Homo sapiens
acagaagggatgtgaaaatgtttcatttaaattatttttgtgtggcttggcatggtggctcatgcctataatcccagcactttgggaggctgaggtgggcggatcccctgaggtcaggagtttgagagcggcctggcccacatggtgaaactccatctctactaaaaacacaaaacgtagccgcgtgtggtggtacacacctgttgttccagctacttaggaggctgaggcaggagaatcacttgaacctgagaggtggaggttgcagtgagccgagatcatgacactgcactccagcctaggcgacagagtggcaccctgtgtcaaaaaattaaaaaataaataattttgttgtgtccttgttagtgtccaaaattcactggagagattctttcagaattgtaaagtttaattaaaagtgttaggtttgccgggtgtggtggctcacacctgtaatcccagcacattgggaggccgaggagggcggatcacctgagatcaggagtttgagaccagcctggcccacgcggtgaaaccccatctctactaaaactacaaaaattagccagatgtggtggcaggtgcctgtaatccttactacttcggaggctgaggcaggagaatggcttgaatccgggatgc

SEQ ID NO: 2403 - DNA, 490 bp, Homo sapiens
gagatccactgattgcaatgcaatgggacaatatctggaagcaattttatccagaaaaatcaatagctttaaaacaattcacaaccttggacctaatacctctacttctaggaagctagcctatgaaggtttctgctgaaggatgtttatcacagtattatttataatgtgaaaaagccaaagaggagacctaaaatgtttcaaagatgaaaatggtttgataaaattattttttttttgaaacaaggtctcactcttgcccaggctggggtgcagtggtgcaatctcggcttaccacaacctccaccttccaaattcaagcacttctcctgcccagcctcccaagtagctgggaatacaccccaccatgcctggctatttttttgtattttagtaaagatggggtttcaccgtgttggctaggctggtgtcaaactcctgagctcaggcaatccaccttcctcagattcccaaaatgctgggattacag

SEQ ID NO: 2404 - DNA, 463 bp, Homo sapiens
atttctgagaacactttaatatatttccacacctactggaatctaattcagtcgatcggataaaagaaagacttttttgttgttgtttttgaaaatccataatgtagcaggttctgcgctggttttttaatgtattttatttttgtgctctcctgccaaaagaaaaggctgataagtaagtacacagtacaacatgtaaattcgtataaaaatatgcttgtttagattgctctacaataactatattaaggtaaattgtgtgtgtgtgtgagagagagagagagagagagagaaacagagggagaattgactcaatgtgttttctatgaagagtcttatcttaagaatcaggtaacagagaggtcctagaccatagacccagccatcaactagcttgctgatgttgaacagatcatctctcaaccatagactgaagatggaatgaatatatcaaaagttcctt

SEQ ID NO: 2405 - DNA, 170 bp, Homo sapiens
gctgctgtgcggtgggactccacatgcgccggaaggagcttcaggtgagcactgctcatgtgtggatgcccctgcaacaggcttccctgtctgtagagccaggggtgcaagtgccatccacacttgcagtgaatggcttttccttttaagtttaagtcctgtctgtctgt

SEQ ID NO: 2406 - DNA, 525 bp, Homo sapiens
atatcattgcaagttttcaaccccacactaaggacatactattttatttcttcttccataggaacaatgcacctttgtctgtgtcactggatggagattttccaaccctttaccacagtagcacaactctgcattagtgcaaaatcctgggccccaaaacaatccttgttcctctcctgatggagaagtatttttcttgcatccctcccccagaagcagtgatcctttgccttgtctcaggtgggatagggtagggtatgagaggtttcttaaccttctcggaaagctgatgtgttttgctgcttcttatctcccaaaaacagtagacttttgcgtgggttcatggacacagatgctttttttgccacagaaaacgaagggttttgattcttaagagagaagcaaatgttcatgtagtcaatttttttcttatttattttttgctttgttttattatttcagtagtgatgagtatgatcattattttccacttatgccacttgcaactctaatattttgttttta

SEQ ID NO: 2407 - DNA, 531 bp, Homo sapiens
gcagagcgtgactattgattgttctttgaggccggaggaacaaagcagtcaggagcgataaaggcaggtgatccctgctggtttgccctttctcccagctctgaccgtcaccgtcacacatgacattcttgaatgaggtcacctgctcactacagattctaaaaggggcttgcttggcaaagacctccagggtcagagtgccggcctttactgtttttggcagttgtgtgcatggaacattggaagcgtttggaacggaatgcttaaggaagatattatttggcagcaagaaaaagggagtgtgcagactccccctacccctcctgggatgagtaggtactgcctgcccgttttttctctacaggagttgaatagtagccagagtacaggcttggcatcagaaggccttagttcaatccttatctcttctacctaccagcagtgtggctttatgcaagctcttgttcatctgaaccttaccgctcttgtctgtaagggatagcaatatcggttttacagagtgggctgaaa

SEQ ID NO: 2408 - DNA, 95 bp, Homo sapiens
acgacagaagggtacggctgcgagaagacgacagaagggtacggctgcgagaagacgacagaagggtactgctgcgagaagacgacagaagggta

SEQ ID NO: 2409 - DNA, 303 bp, Homo sapiens
gggcgcaatgggcacccgcgacgacgagtacgactacctctttaaagttgtccttattggagattctggcgttggaaagagtaatctcctgtctcgatttactcgaaatgagtttaatctggaaagcaagagcaccattggagtagagtttgcaacaagaagcatccaggttgatggaaaaacaataaaggcacagatatgggacacagcagggcaagagcgatatcgagctataacatcagcatattatcgtggagctgtaggtgccttattggtttatgacattgctaaacatctcacata

SEQ ID NO: 2410 - DNA, 255 bp, Homo sapiens
ggaaaaatcagatattgattattgatgaagcgacggcaaatgtggatccaagaactgatgagttaatacaaaaaaaaatccgggagaaatttgcccactgcaccgtgctaaccattgcacacagattgaacaccattattgacagcgacaagataatggttttagattcaggaagactgaaagaatatgatgagccgtatgttttgctgcaaaataaagagagcctattttacaagatggtgcaacaactgggca

SEQ ID NO: 2411 - DNA, 467 bp, Homo sapiens
tacggctgcgagaagacgacagaagggtacggctgcgagaagacgacagaagggtacggctgcgagaagacgacagaagggtacggctgcgagaagacgacagaagggtacggctgcgagaagacgacagaagggtacggctgcgagaagacgacagaagggtacggctgcgagaagacgacagaagggtacggctgcgagaagacgacagaagggtacggctgcgagaagcgacagaagggtacggctgcgagaagcgacagaagggtacggctgcgagaagacgacagaagggtacggctgcgagaagcgacagaagggtacggctgcgagaagacgacagaagggtacggctgcgagaagacgacagaagggtacggctgcgagaagacgacagaagggtacggctgcgagaagacgacagaagggtacggctgcgagaagacgacagaagggtacggctgcga

SEQ ID NO: 2412 - DNA, 226 bp, Homo sapiens
tagggctgcgagaagacgacaggaggggctatctctcctagcctaaggcgtgcacacagagcgccgctgggaggctgaaacgtttaggccgatgcttgcttgcaaggtcgggcgagctggattctggtccccacctttgcagagagaacagcgatgttgtgcgcccatttctcagatcaaggaccggcccatcttactacctccaagagtgcttttctctctaata

SEQ ID NO: 2413 - DNA, 474 bp, Homo sapiens
gctctcggctttcggctcggaggaggccaaggtgcaacttccttcggtcgtcccgaatccgggttcatccgacaccagccgcctccaccatgccgccgaagttcgaccccaacgagatcaaagtcgtatacctgaggtgcaccggaggtgaggtcggtgccacttctgccctggcccccaagatcggccccctgggtctgtctccaaaaaaagttggtgatgacattgccaaggcaacgggtgactggaagggcctgaggattacagtgaaactgaccattcagaacagacaggcccagattgaggtggtgccttctgcctctgccccgatcatcaaagccctcaaggaaccaccaagagacagaaagaaacagaaaaacattaaacacagtgggaatatcacttttgatgagattgtcaacattgctcgacagatgcggcaccgatccttagccagagaactctctggaacca

SEQ ID NO: 2414 - DNA, 98 bp, Homo sapiens
cactgaaaaagatgagtatgcctgccgtgtgaaccatgtgactttgtcacagcccaagatagttaagtgggatcgagacatgtaagcagcatcatgga

SEQ ID NO: 2415 - DNA, 427 bp, Homo sapiens
acagaaggggagcatcccgctctggtgccgctgcagccggcagagatggttgagctcatgttcccgctgttgctcctccttctgcccttccttctgtatatggctgcgccccaaatcacgaaaaggctgtccagtggggtgtgtacatcaactgttcagcttcctgggaaagtagttgtggtcgcaggagctaatacaggtatcgggaaggagacagccaaagagctggctcagagaggagctcgagtatatttagcttgccgggatgtggaaaagggggaattggtggccaaagagatccagaccacgacagggaaccagcaggtgttggtgcggaaactggacctgtctgatactaagtctattcgagcttttgctaagggcttcttagctgaggaaaagcacctccacgttttgatcaacaatg

SEQ ID NO: 2416 - DNA, 296 bp, Homo sapiens
gaagtgagggatttgggcttgatatttggctgccccatctctatgtgggaactcaaagttaaaaacccactgtaggtaaattagaagggcagctcttgaatctgggccagtctatatcccttctgtgaagtgctaacagccaggctatctgtagcctgggtgggagcccagataatgtgagctggtaaagggtattggaaaagtgccaagaaatgccaagcttttggttcgtaaccactataaaaagtttatgaacatgtcagaggaatggatgagtgatttgtgaggtcttaact

SEQ ID NO: 2417 - DNA, 356 bp, Homo sapiens
gtaacaaatttgtgtgtgtgtgtgtatatatatatgtatatgcttatatatatatatatgtatatgcttgagaaagtggtttttcaagatgtatgtgtacagtacacacatggacacgcttcagtcctctgacttcccatgtgctacctcatgtgtttctcttctcatgaggatttgcaatggatagttgtacaacctggggactgtcagtgactcattggtatcagcatatgctaaagaagctcttgaatccaatcttgaaacctgatctcccttcgtcaacattccccaataccaaactggcccgtttacccatacaaatgcacagtaaagggaagaacagcggtattttttct

SEQ ID NO: 2418 - DNA, 371 bp, Homo sapiens
atactaatcctctttcaggaccctaaagttgcaggttagtaggtcttcaaggacaaatctgtaagtttcttatttctgtagtgcaagtaaaatttcactttttgaaactatagagagatccctttctgattagcctacagaacttaaagtgagggaaccatttcctctcacagacaaagaggcctgggatattaggactttggggtttgagagcatcatggggcagacagatggtggatggtctggacaagaagcgagtaagccactgcggttggtcatactgaagggaattgatggcaagaggatcccctgagcaagtcagaagttactctcatcagtcgttcatggtcacaacctgaggtactctgctg

SEQ ID NO: 2419 - DNA, 491 bp, Homo sapiens
gacactaaaactcccacagaaagggggaaaattagaaaaggggtgatataatttgactctatgtcaccacccaaatctcatcttgaattgtaatccccgtaatttctcacctggcaagagtgggaccaggtggagacaattggatcatgggggcagttttccccatgctcttctcgtgataatgattgagtctcatgggatctgatgattctataagtgtctggcttttctcctacttgcactcactccatcctgccaccctgcgaggaaggtgcctgcttcttctttgccttccgccgtgagtgtgagtctcctgaggcctccccagcaatgtggaactgatacgtcatggaacagagggcaacctgcctcctggaaatgtggagtgtctagggagtcacagctgagatcttccttggattaaaggctgcgggtgtcacaaacaggatgctgtaacaacaccataaactttcaaacaactctatttccta

SEQ ID NO: 2420 - DNA, 468 bp, Homo sapiens
ccgtgcggtgcggccagtgaggctccggtcttcctcctcgtcctgccgcagggccagaacccctgacggtattcagctgcgcgtaagtctggccggtgccatctgtctccgcaatgccccccaagaaacaggctcaggccgggggcagcaaaaaggcggagcaaaaaaagaaggagaagattatcgaagacaaaactttcggtttgaagaataagaaaggagcaaagcaacagaagtttatcaaggctgtcacacatcaagttaaatttggtcaacaaaatccacgtcaggtagcacagagtgaagctgaaaagaaattgaagaaggatgacaagaagaaagaattgcaggagctaaatgagctgttcaaacctgtagttgctgctcaaaaaataagtaaaggtgcagatcccaagtctgtagtatgtgcattcttcaagcaaggacagtgtactaaaggagataagt

SEQ ID NO: 2421 - DNA, 586 bp, Homo sapiens
caaagtacactgcagatgttcaaactctccatttctctttccccttccacctgccagttttgctgactctcaacttgtcatgagtgtaagcattaaggacattatgcttcttcgattctgaagacaggtccctgctcatggatgactctggcttccttaggaaaatatttttcttccaaaatcagtaggaaatctaaacttatcccctctttgcagatgtctagcagcttcagacatttggttaagaacccatgggaaaaaaaaaatccttgctaatgtggtttcctttgtaaaccaggattcttatttgtgctgttatagaatatcagctctgaacgtgtggtaaagatttttgtgtttgaatataggagaaatcagtttgctgaaaagttagtcttaattatctattggccacgatgaaacagatttcaactgataaagagctggagaactccatgtactttggaatctcctccaagatagccagagtttaatacatcttcattctcaacactctccaaagaacttgacctaccttatgggttccatatttttcttcttaatgtgcatcaatcatgccttgccc

SEQ ID NO: 2422 - DNA, 462 bp, Homo sapiens
ggcattccatgtgagtcggctcatgcagtatgtccggctcctttcactgagcataaggtcttcagcactcatccaggttgcagcctgaatttcattccctcttctggctgaatcgtattccattgtgtatcttggacatatcctattctgctcacccagccgttggtgggcgtttggagtgttttcgcctttcagctgctttaagagggttgcagtgaacatttgtacaagttttggacccaatgcctgttttcaattctcttgtgtagagagcactttttagcagaaaaagaatagatttgtggcctccctttgtgtgcggtcagtgccttgagaagagtgaactgtgctgccacctccggagccgtggagagcgcggggcttgggtagcagctaggacgatacaagttgggacaaggccaggtgcaatggctcacgcctgtaattccaacactttgggag

SEQ ID NO: 2423 - DNA, 280 bp, Homo sapiens
ggcgccaccggctacgtgcccagcgctcgcgtctgctccagtcgctctggcggtgcggggcgctggcgacgggacagggtttttgctgcccggggcctagtctacctcggcacgcctttctctgaaggagacacgcacttgcacgacgtgggcctctgtgcagctctactttgtccttaactcctctgactcaacgttatcgcagtttgactctggagccactcaggtttttcctaagctcaactctagccagctaggttcctggtgctttgggggctgg

SEQ ID NO: 2424 - DNA, 362 bp, Homo sapiens
gcacttttgatttacttctgacttcacgagtcactttctgccaaagaaatctctccttttgcttctagcaccgactagatttccttcagctgatgattgactcccagaattcgaaagaaactgagtcccacaaagctctgtctgatctggagctcgcagcccagtcaataatcttcatttttgctggctatgaaaccaccagcagtgttctttccttcactttatatgaactggccactcaccctgatgtccagcagaaactgcaaaaggagattgatgcagttttgcccaataaggcaccacctacctatgatgccgtggtacagatggagtaccttgacatggtggtgaatgaaacactc

SEQ ID NO: 2425 - DNA, 449 bp, Homo sapiens
gagcagatacaccgaggagttaaaggatttgtccgagaccttcaaggtaacccaattgcgaatgccaccatctccgtggaaggaatagaccacgatgttacatccgcaaaggatggtgattactggagattgcttatacctggaaactataaacttacagcctcagctccaggctatctggcaataacaaagaaagtggcagttccttacagccctgctgctggggttgattttgaactggagtcattttctgaaaggaaagaagaggagaaggaagaattgatggaatggtggaaaatgatgtcagaaactttaaatttttaaaaaggcttctagttagctgctttaaatctatctatataatgtagtatgatgtaatgtggtcttttttttagattttgtgcagttaatacttaacattgatttattttttaatcatttaaatatta

SEQ ID NO: 2426 - DNA, 450 bp, Homo sapiens
ggaccacgttattagtgccattccagcttcaggtaatggaatagccaccttccccttccccaacccctaccagtgagaagcaaaagctataccttcctgggtcagcaggaccacaccatgcccctgaactggtcatctctatgggagtctaatcccaaagaggactgacaactgtaatgggaatgccttctgagtcaggcctctgcctgatctctagtgctcagtgagctgctccctgctgaggctgcccctctggctcatgccctgagtgccatcactgcagtgtctgtagctgtggtgaatctgcagtaccaaggagcccatctgcctgtccagggatttggacatttggtgccatcttcagaagatccaggagtcctgggaatcgtgtatgactcagttgctttccctgagcaggacgggagcccccctggcctcagagtgactgtg

SEQ ID NO: 2427 - DNA, 497 bp, Homo sapiens
ataacttaaaataacaagtttggaaggaataaaaagtctgggagactatttgttttgtctaaattctgcttttactctggtcttttaacagttggcttttgataatgtattactgccttagtgtgttcctgtgtattgaaggaatacattgtctgacagaattgtggttgaaaatattacaagttctaaataataagagtaataaatatcatatcttgtttgctttgttgtcatagtcgcctgatctcatgcttccctgaattcggctggtgtcttgattacgatggaatcactaagcagagagttttgccatgtgtgatttattcgtttgtgcatagccacagcagagcatccatgcagcccgcagtggctctgtgttccagtgtggcaagtcaccaagacttgctaccttaaggccaggcgcagtggctcacgcctgtaatcccagcactttgggagactgaggcgggcagatcacttgaggtcaggagttcaag

SEQ ID NO: 2428 - DNA, 430 bp, Homo sapiens
agagacatattggctgtttgttttgatgataaaaggagaataagaaaaggcatcactttcctggatccaggataatttttaaaccaatcaaatgaaaaaaacaaacaaacaaaaaaggaaatgtcatgtgaggttaaaccagtttgcattcccctaatgtggaaaaagtaagaggactactcagcactgtttgaagattgcctcttctacagcttctgagaattgtgttatttcacttgccaagtgaaggaccccctccccaacatgccccagcccacccctaagcatggtcccttgtcaccaggcaaccaggaaactgctacttgtggacctcaccagagaccaggagggtttggttagctcacaggacttcccccaccccagaagattagcatcccatactaggctcatactcaattgatggttatta

SEQ ID NO: 2429 - DNA, 511 bp, Homo sapiens
ctattttatgccaggcattgggcaaggacccattggatatacagagatgactgacacagcatttagtttttcagaatctcatcggatagaggagacaatccaggctgagagcactatataaacaaaaggctggagtcctgaaaatgctttatgtgtttgcaggggatatagtttatgaaggaggggattaggcttaaaaagagctagacagtgaaaggtgaaagtagggaacagtggaaggtgatatggcctttaaactttgctgcttacaggtctttcaggttacagtttgaacttgatcctggaagcagcagagaaatcaatcactggctactcttaaaacagctgagtgacacaatcaaatgtgtacttcagaaattttccatgtggcaatgtggaggatgggctggattgccttgttattgggagacaaattagaaggctactgcaatagtcctagcaagagatgatgacaggctgggcacggtggctgacacctgtaatcccaaca

SEQ ID NO: 2430 - DNA, 652 bp, Homo sapiens
acagtaagggagtgtatggttaacagaaaaaaattatacaattttgacaatattatttttcgtatcaggttgctgtttaattttggaggggtggggaaatagttctggtgccttaacgcatggctggaatttatagaggttacaaccacatttgttcacaggagtttttggtgcggggtgggaaggatggaaggccttggatttatattgcacttcatagacccctaggctgctgtgcggtgggactccacatgcgccggaaggagcttcaggtgagcactgctcatgtgtggatgcccctgcaacaggcttccctgtctgtagagccaggggtgcaagtgccatccacacttgcagtgaatggcttttccttttaggtttaagtcctgtctgtctgtaaggcgtagaatctgtccgtctgtaaggcgtagaatgagggttgttaatccatcacaagcaaaaggtcagaacagttaaacactgcctttcctcctcctcttattttatgataaaagcaaatgtggccttctcagtatcattcgattgctatttgagacttttaaattaaggtaaaggctgctggtgttggtacctgtggatttttctatactgatgttttcgttttgccaatataatgagtattacattggcc

SEQ ID NO: 2431 - DNA, 129 bp, Homo sapiens
atttcagtccacatatgaatcatcagtgtattttccataaagtgattcgggcatatttgtgtgaaaacctcagttctgtcacttcttacctctataaacttggacgataatgtgccttctctgagactc

SEQ ID NO: 2432 - DNA, 469 bp, Homo sapiens
atagactacctccttcctggaaaagtctcagcttcatattctgttgaatatatgcagaattcttagtgtgaaaggtgatgtaccacttcagatcagttttcactggagagacttgtaattggtagctgtagctcgtatccgtggcgtagtcactttgccaggatgaatgctgttgggcagcagtagcctaagttacggaaggggagcagattgaatggggttttgagacatcttctctgataccttagctttccttctgctctggtcgctatccactcagtcgtgtgctagaaatgtttaacaaccaggatctctggggtgggggtgggggggagcgctgaatttgtagcatttgctgcaaatataaattataaataaaattctaatataaattagaattttatatcaaattctttgatataaattagttactcctcctgtggctgatttcaagctaccaccttagagt

SEQ ID NO: 2433 - DNA, 171 bp, Homo sapiens
ttgaggctgcagtgaactatgattttaccactgcactccagcttgggcaacagggtgagaccctgtctcaaaaaaaaaaaaaaagtttttttaaaataaccgggataattgtttattttgaaaagggaccgggaacttaaagggctttaaaaagggtgggtttttttttaa

SEQ ID NO: 2434 - DNA, 444 bp, Homo sapiens
gcttccttaactggagctacacagaaggagttgagtgatggtagatatcaggccctggtctgcggcttggaagtttcctgtgaataagaaaaacatcatcgcttcttgagtcacaaggatgataggatgagaaaaagaaaggacaaaggcaccagaggaggtaagaacatatgagaggcaggctgagaccaattttctaccaggccagctaattcatcacaatgacaagctatgggtcatatgctttcaggaaccagacactggaacatgtcgtctgatgtacatcacaccaagaaataaaaaaagaattggaaagccaatgtccaattatttactaaaacaggatccactggagagaaatgcaaaggcaggtaaaaaggcaatctcttaacatgaaaactcacaactgtaaaatgagaacctaaactatacagcgacaaactc

SEQ ID NO: 2435 - DNA, 478 bp, Homo sapiens
agttcaatggggatggagaaaacagagcattcctctgagagcagagatcttgtcattattgcaattaatgcccaaacaggttaaatgtggaagaaagtatggaggaaataaccccagccttcctcataccactggatttccacatcaccttttaacttatgcttgagctcccttttgagaaaaaatatttaaaaacaaattggctatgtaacaaatttgtgtgtgtgtgtgtatatatatatgtatatgcttatatatatatatatgtatatgcttgagaaagtggtttttcaagatgtatgtgtacagtacacacatggacacgcttcagtcctctgacttcccatgtgctacctcatgtgtttctcttctcatgaagatttgcaatggatagttgtacaacctggggactgtcagtgactcattggtatcagcatatgctaaagaagctcttgaatccaatcttgaaacctgatct

SEQ ID NO: 2436 - DNA, 473 bp, Homo sapiens
agctctgatcaaatccctcctaagcagaagccttccaggctcccctccataaggctccaggtgtttacttaccttgcctgtcaggggcttctgcagcttgcttcctacctgctatctccactcctctccaaaccaccatatcctgaggcttctagaaagcaaactctggcggcatggggttaatgggtctgtgtacccaagacactgtacctgggtgctgtcatctgcctgactgaccttcctgtgtcctggtccgatggtgtctttgatcctatagctaagatcaagacactgaaaatctctagactcaagtctgtgcttttgctgggataaagtttgtgttgagtacatctaggctgggtgtggtagctcacgcctgtaatctcagcactttgggaggccaaggcaggtggatcatctgaggtcaggagttcgagaccagcctggacaacatggtgaaaccctgtctctgc

SEQ ID NO: 2437 - DNA, 425 bp, Homo sapiens
gggagaaaatgactcaaattatgtttgagactttcaatgtcccagccatgtatgtggctatccaggcggtgctgtctctctatgcctctggacgcacaactggcatcgtgctggactctggagatggtgtcacccacaatgtccccatctatgaaggctatgccttgccccatgccatcatgcgtctggatctggctggccgagatctcactgactacctcatgaagatcctgactgagcgtggctattccttcgttactactgctgagcgtgagattgtccgggacatcaaggagaaactgtgttatgtagctctggactttgaaaatgagatggccactgccgcatcctcatcctcccttgagaagagttacgagttgcctgatgggcaagtgatcaccatcggaaatgaacgtttccgctgc

SEQ ID NO: 2438 - DNA, 420 bp, Homo sapiens
gacaccacccagtgtggagcagcccagccaagcactgtcaggaatcctgtgaagcagctccagctatgtgtgaagaagaggacagcactgccttggtgtgtgacaatggctctgggctctgtaaggccggctttgctggggacgatgctcccagggctgttttcccatccattgtgggacgtcccagacatcagggggtgatggtgggaatgggacaaaaagacaactacgtgggtgacgaagcacagagcaaaagaggaatcctgaccctgaagtacccgatagaacatggcatcatcaccaactgggacgacatggaaaagatctggcaccactctttctacaatgagcttcgtgttgcccctgaagagcatcccaccctgctcacggaggcacccctgaaccccaaggccaaccggg

SEQ ID NO: 2439 - DNA, 434 bp, Homo sapiens
ggacccgccttctctctcggcgtttccgctgtcagggccctgcggtgtgactcgcgggctcagctggtccggccgtagcacctccgcgccgtcgccatgtcgcggtttttcaccaccggttcggacagcgagtccgagtcgtccttgtccggggaggagctcgtcaccaaacctgtcggaggcaactatggcaaacagccattgttgctgagcgaggatgaagaagataccaagagagttgtccgcagtgccaaggacaagaggtttgaggagctgaccaaccttatccggaccatccgtaatgccatgaagattcgtgatgtcaccaagtgcctggaagagtttgagctcctgggaaaagcatatgggaaggccaaaagcattgtggacaaagaaggtgtcccccggttctatatccgcatcctggctgacct

SEQ ID NO: 2440 - DNA, 506 bp, Homo sapiens
atctgatggagtaattgtttttgcaagcatctgagagcattttatgattaaacatattaacttcacctattcaaatatagttggaaaaactatagaagaacacaatggtttatctagatcataaagggtacctctctgtccagaaattaaaaagcttgccttttgtcactgctccaaataaattggaagctctggctgctcatgatgctctggtggagctctgtggagccatgaacactgccacctgcagtctgatgaagatagcaaatgatattcattttctgagttctggtccttggccaggtctgggagaactgatcttgctgaaaatacaacaggaagcagtatcgtgccaggcaaggcaaaccctcgtcagtgtgaagcaatggccatcgttgcagcccaagtcatggggttttgtgtggcagtaaccgttggaggcggcaatggccattttgagttggatgttttcaagccaatgatgattaaaaatttatgttacactc

SEQ ID NO: 2441 - DNA, 100 bp, Homo sapiens
tacggctgcgagaagacgacagaagggtacggctgcgagaagacgacagaagggtacggctgcgagaatacgacagaagggtacggctgcgagaagacga

SEQ ID NO: 2442 - DNA, 182 bp, Homo sapiens
ggctgtcgccagacactatcatggagtgtgcaatgggggaccgcggcatgcagctcatgcacgccaacgcccagcggacagatgctctccagccaccacacgagtatgtgccctgggtcaccgtcaatgggaaacccttggaagatcagacccagctccttacccttgtctgccagttgtac

SEQ ID NO: 2443 - DNA, 255 bp, Homo sapiens
ggaagcacatatctttccactcagaatttcaaggggaaaatgttgatagtttttagcaaaggtgtgtccaaatctgaaagttggggtttgctttcattatttctttcttttctgtatttcttcacctatcttgatcaagaaaataaacagcttatatttttctaaatttcacacgatgtaataaaatttagaagtaaaagactaggaattctgacatggtctgtacgatggtctatacagggcattaaacaatgc

SEQ ID NO: 2444 - DNA, 261 bp, Homo sapiens
cctctgtttgccgctctgggtatctctcctatgggcaaagccattagaaatgcataaaacctcgagacatggtttttggcaaaaactccatgactttaaactagctcttttactactgacctttcacagagaaaaaatatttcccttgaaaaaaactgggcttgtcattttttcccttgtagctttaagcagagacataagtgtcttgcattacacatagtaaactttctttaaaaaaaaaaaaaaaaaatttgggaaact

SEQ ID NO: 2445 - DNA, 438 bp, Homo sapiens
ggttttcccgaacgcccgcagcagggtcagaagggaggtggccggtctccgtcgtgacctctgacggtttctgagcgttggcctttggcacgcgctacccccttttgctttggttctgccatgccgatgtaccaggaagagtctaacctgtctcggcaagctcttgagtcccgccaagatgatattttaaaacgtctgtatgagttgaaagctgcagttgatggcctctccaagatgattcaaacaccagatgcagacttggatgtaaccaacataatccaagcggatgagcccacgactttaaccaccaatgcgctggacttgaattcagtgcttgggaaggattacggggcgctgaaagacatcgtgatcaacgcaaacccggcctcccctcccctctccctgcttgtgctgcacaggctgctctgtgagcacttc

SEQ ID NO: 2446 - DNA, 417 bp, Homo sapiens
atccaaattcaaaaaaggcatgctgaaaaatttaacagctgaaaaacactttctccttgctgggaaaacttaaaccttgctaggctttatgcaacttaaaaaaaaaaaatcacttctgtgctgaaaactagcatgaaaaatctcaccatgaaaggttgggggattttttttcttcataaaactaaccccaattgttggttttaaaagtgatgccacaatatacatatgctttgttaggaacaaatataatctaatttcaagggcatcttcaacaaaaattagggggaaaaaataaaggctacttaaccagtgatccagtgtctgaaagcaaaggttgaaaacatcattgtaccatcaaggtctaaaaatgctgctaaccctgaccgggttgttactgtttgaaaagcctatgggtat

SEQ ID NO: 2447 - DNA, 517 bp, Homo sapiens
agccactcaaaaatgctgggttcctgtccttggtcttaatgaaaaaacaatgttgttataaagaaggaggggaaaattacctgatttccgaatgtagaaataaacaagcaaaatataagccaggctatttatatttgcttaacaagaaagaacttctttcttgctttgcgatgcatttgaaataccgtttgtggccagataaattacgattgcttttcaaggttacatggtgtttctcactcaccatgctccaccttctggccaaaaggagtactctctgttcctgttttcccaactagctcactaaatatggggcaagattctgaccacccacctaattcatattgacttctaactttgaggtcatcgtgagagtctggggggcagcaattacttccgtagttctatcttaataacagatgacacagtttgcctccatccatcctaaagttaattgacccaatcacatgctactttcccagtattttcacttaatcatcagcaactatttcagtga

SEQ ID NO: 2448 - DNA, 454 bp, Homo sapiens
gcatttttcctctttgaccactaaccatgtgaaattctcatattgacctttataatgatcatgaactcttagtatcattgggaaggccacatttgccacttatgattgtaaaccttatcctccatttttcctgttattgttggtgcaaaaagcacctattataccaggactttaaaaatcagtctgataagtctttgataagtctaataataataactgataagtccattgaatttgcttctgattactttttctttagtagctaaacatgtatgtactcctatgattacaatgaacactcctctccatttaaattaattatttacattgatgaaatagcaaaatgttaatgactaaatactgtcttggttttttcgttccaggtcagtcaatattaacttcttataattttcttttttttctttatgtgtgtgtgtgtgtgtatttttttttt

SEQ ID NO: 2449 - DNA, 464 bp, Homo sapiens
tgggattacagctttgggatgaccgcttacaaagttctgtttggttagtattggcatagtttttctatatagccataaatgcgtatatatacccatagggctagatctgtatcttagtgtagcgatgtatagggggacacatccacctacatgttgaagggcctaaccagccttgggagtattgactggtcccttacctcttatggctaagtctttgactgtgttcatttaccaagttgacccagtttgtcttttaggttaagtaagactcgagagtaaaggcaaggaggggggccagcctctgaatgcggccacggatgccttgctgctgcaaccctttccccagctgtccactgaaacgtgaagtcctgttttgaatgccaaacccaccattcactggtgctgactacatagaatggggttgagagaagatcagtttgggcttcacagtgtcatttgaaaac

SEQ ID NO: 2450 - DNA, 509 bp, Homo sapiens
gaaaggaatcacaccattattccttagaagtaattacatgtgttctaacacatttgagacagggttggactcccatttctcatccgagaagttacttaacccttcctggcgctgtacagtcatcttttattctatttcctctttgctgtttgtagtagagacattttgaatgaaacttggcactgcttgattcaaaactgtggaaaccagatctgtttagtctcctgtttgtatgcgtttgctaatggtagctaaataaccagtttttgttgtaaatgcaccaattctgaaggcactttatgtactacatggaggtcatatctggttttgtttttatttttttatcatgaacattaaatgtgatgatgatttcttttccctgcacacatctttccggtgcaatatctatcaattgtgaatctggctgctggtgtataaaaacctggatgtaaagctgagcctacagacctgtcctcaccaactgttttgtgatttctactcaactacaa

SEQ ID NO: 2451 - DNA, 549 bp, Homo sapiens
gagaccagcctgaccaacatggtatcgctcctaaaatacaaaaattagctgggcctggtggcgcatgcctgtaatcccagctactcaggagacttgaggcaggagaatcgcttgaacctgggaggtagaggttgctgtgagccgagatcgcaccaccgcactctagcctgggtgacagagcgagactccatctcaaaaagaaagaaagaaagaaaatgccagacatttattgaggggctggaatgatatagtgaagtgttctgagtcagtcgggctctgattgataaagagcttggcatgtttgaaggacagcaaggaagccagaatagctggagcgtagcagcggggagacaaatgccacaaggttagttggagaaaggcattgggaaaggtttgtcttttaagtgctctgagaagcaattgaaggtttgaaatagaatagtgacttgcttgatcacatttgtacttttgaaaagtttctctggctgctgtggggaaaggcttcagtagatgcagggtcggagaagataaccagcagtagactcttgt

SEQ ID NO: 2452 - DNA, 163 bp, Homo sapiens
acgacagaagggtactgctgcgagaagaccacagaagggtactcctgcgataagacgacagaagggtactgctgcgagaagacgacataagggtacggctgctagaggacgacagaagggtactgctgcgagaagactacataagggtactgctgcgagaaga

SEQ ID NO: 2453 - DNA, 280 bp, Homo sapiens
tacggctgcgagaagacgacagaagggtacggctgcgagaagacgacagaagggtacggctgcgagaagacgacagaagggtacggctgcgagaagacgacagaagggtacggctgcgagaagacgacagaagggtacggctgcgagaagacgacagaagggtacggctgcgagaagacgacagaagggtacggctgcgagaagacgacagaagggtacggctgcgagaagacgacagaagggtacggctgcgagaagacgacagaagggtacggctgcg

SEQ ID NO: 2454 - DNA, 394 bp, Homo sapiens
gagcagctcttccagtgggcaaagaggacgcccataatttcttccattgctagctcatctgtgggaccaatttggtgtaagcaacctgtggcctgcacttgtggcctcgaaggaagcacaaaccctccatccacttcccatttcctctgcccttttccaccccccccttccatcccaccagctgccagtggctcccagaaagccttattgagccccttgttgacacttggggctgcggaggcctctccctactggtctggcctttcctgagaggcaggtcttccgtcctcagagcctttctggaacaaggagaatgcctgtgcaggtggacacacaggcctggcctgtcgctctcacttgtcttccagcggggagcttcacgttgccgagtgga

SEQ ID NO: 2455 - DNA, 75 bp, Homo sapiens
actatgccctcccttgaaaaggtggcttgcctctctttctgtaagcaaagtcatgtcataaacagtattaaacaa

SEQ ID NO: 2456 - DNA, 502 bp, Homo sapiens
agaaaaaggtgcacaagaaagagcataggattgtgccagcattgatgttatcttctggttatatgagagtgttttgccaagaatcggtcaaatgttttacattagggaaaaagcattattgttactggcatagggagggccccagttaaaatagcagtccaattcagagaccttcgtatttgtcgttaagatcaaaaggactcttggaataatggactatgctacaggattattttaagttcagatagataaattagcttcttcccaaattctcattctgcttttcctgtggtactgtatagtatcatgaagttatatctttaaactcttagtttgtactatgtggtgtcttatgaaaaccttgatttgtttatacttagtgaatgaaacacttgggtttaaagttctttaactgatgtcacttcttaagctagaaagctgttgaaagaacttagtgttccacccttagaccaaggttcatgtcaccatatttaacagcagc

SEQ ID NO: 2457 - DNA, 416 bp, Homo sapiens
agaagacgacagaagggtacggctgcgagaagacgacagaagggtacggctgcgagaagacgacagaagggtacggctgcgagaagacgacagaagggtacggctgcgagaagacgacagaagggtacggctgcgagaagacgacagaagggtacggctgcgagaagacgacagaagggtacggctgcgagaagacgacagaagggtacggctgcgagaagacgacagaagggtacggctgcgagaagacgacagaagggtacggctgcgagaagacgacagaagggtacggctgcgagaagacgacagaagggtacggctgcgagaagacgacagaagggtacggctgcgagaagacgacagatgggtacggctgcgagaagacgacagaagggcaccctctaaatcaccacgat

SEQ ID NO: 2458 - DNA, 369 bp, Homo sapiens
ggaaatgggctgagtccctcttgctcacccttgacttggaaaaaccagtttctcttttattgtctgttactaatctctattctaaaaattcagctcaattctcaaccatactccaaactctctcttttccagctacctttactccctctccttcaattccactttcctctgcttactttttttttttttttaacagggtctcattttgccccccaggcagaattgcaggggctaaattttgggctcactgaaccctaaacctcccaggttaaagcaattttcctgcctaaccccctaaagtacctggaactacaagcccacaccaccaccccggacaaatttttggaattttttggaaaaggcggggtt

SEQ ID NO: 2459 - DNA, 466 bp, Homo sapiens
gaaacactggaagagctagtaaattgtaaatgaagtaatactgtgttcctcttgactgttatttttcttagtagggggcctttggaaggcactgtgaatttgctattttgatgtagtgttacaagatggaaaattgattcctctgactttgctattgatgtagtgtgatagaaaattcacccccctgaactggctccttcccagtcaaggttatctggtttgattgtataatttgcaccaagaagttaaaatgttttatgactctctgttctgctgacaggcagagagtcacattgtgtaatttaatttcagtcagtcaatagatggcatccctcatcagggttgccagatggtgataacagtgtaaggccttgggtctaaggcatccacggctggaagggactactgatgttctgtgatacatcaggtttcagcacacaacttacatttctttgcctccaaattg

SEQ ID NO: 2460 - DNA, 411 bp, Homo sapiens
gatgaccgcttacaaagttctgtttggttagtattggcatagtttttctatatagccataaatgcgtatatatacccatagggctagatctgtatcttagtgtagcgatgtatacatatacacatccacctacatgttgaagggcctaaccagccttgggagtattgactggtcccttacctcttatggctaagtctttgactgtgttcatttaccaagttgacccagtttgtcttttaggttaagtaagactcgagagtaaaggcaaggaggggggccagcctctgaatgcggccacggatgccttgctgctgcaaccctttccccagctgtccactgaaacgtgaagtcctgttttgaatgccaaacccaccattcactggtgctgactacatagaatggggttgagag

SEQ ID NO: 2461 - DNA, 380 bp, Homo sapiens
gaagacgacagaaggatacggctgcgagaagacgacagaagggtacggctgcgagaggacgacagaagggtacggctgcgagaagacgacagaagggtacggctgcgagaagacgacagaagggtacggctgcgagaagacgacagaagggtacggctgcgagaagacgacagaagggtacggctgcgagaagacgacagaagggtacggctgcgagaagacgacagaagggtacggctgcgagaagacgacagaagggtacggctgcgagaagacgacagaagggtacggctgcgagaagacgacagaagggtacggctgcgagaagacgacagaagggtacggctgcgagaagacgacagaagggtacggctgcgaga

SEQ ID NO: 2462 - DNA, 565 bp, Homo sapiens
gagcgcagtctgctttggtgaatacacgatttggtgcagccggggtttggtaccgagcggagaggagatgcacacggcactcgagtgtgaggaaaaatagaaatgaaggtacatatgcacacaaaattttgcctcatttgtttgctgacatttatttttcatcattgcaaccattgccatgaagaacatgaccatggccctgaagcgcttcacagacagcatcgtggaatgacagaattggagccaagcaaattttcaaagcaagctgctgaaaatgaaaaaaaatgctatattgaaaaactttttgagcgttatggtgaaaatggaagattatccttttttggtttggagaaacttttaacaaacttgggccttggagagagaaaagtagttgagattagtcatgaggatcttggccacgatcatgtttctcatttagatattttggcagttcaagagggaaagcattttcactcacataaccaccagcattcccataatcatttaaattcagaaaatcaaactgtgaccagtgtatccacaaaaagaaaccataaatgtgatc

SEQ ID NO: 2463 - DNA, 148 bp, Homo sapiens
aatagagattctgacgacacactgtgacatgattatgtctttgcatgtatggatatgatggggatgataaaatgaagaacttatggcttatttgcacccccactatcttctgttcattattgggactctttccctccgagtcaaaaac

SEQ ID NO: 2464 - DNA, 494 bp, Homo sapiens
ggaaccaccgtggcatatgccgtctgtcattgactgaaacgtcattatgcagggcatgactgtacttacaaaattagatggcacttcttaggaacattcctttgctatgagttgttttaaaacttaatgtacttaaattttttttattataaaaaatttccaacataaacaaagagggagaatgtatgtatattaagggtctcactctgttgcccaggctgtagtgccgtggtgcgatcatggctcactgcagcctcgacctcctggactcaagtgattgagggagaatattataatgaatgactttatattcctcacctgggttaggatgaaatgctaaggtcacagctaagcaaaagccactttaaaggaaaggaatgttgctgccacgagtggcgttcctgcagaaaggtcattaagtcagaattactactctgtgttctggagggaaaataccatgacactaagaatttagctgtgggtcagggaggcat

SEQ ID NO: 2465 - DNA, 197 bp, Homo sapiens
atgactggccacacaggatcttttgtatttaaggattctgagattttgcttgagcaggattagataaggctgttctttaaatgtctgaaatggaacagatttcaaaaaaaaaccccacaatctagggtgggaacaaggaaggaaagatgtgaataggctgatgggcaaaaaaccaatttacccatcagttccagcct

SEQ ID NO: 2466 - DNA, 439 bp, Homo sapiens
atgtttgatcgttgcttagacaaggcgcctactgtccgcagcaaggcactgtccagctttgcacactgtctggagttgactgttaccagtgcgtcggagagtatcctggagctcctgattaacagtcctacgttttctgtaatagagagtcaccctggtaccttactgagaaattcatcagctttttcctaccaaaggcagacatctaaccgttccgaaccctcaggggagatcaacatagacagcagtggtgaaacagctggatctggagaaagatgtgtcatggcaatgctgagaaggaggatcagggatgagaagaccaacgttaggaagtctgcactgcaggtattagtgagtattttgaaacactgtgatgtctcaggcatgaaggaagacctgtggattctgcaggaccagtgtcgggaccctgcagtgtctg

SEQ ID NO: 2467 - DNA, 535 bp, Homo sapiens
cacggacagaggatgcacttgtccaatcctcaatcctggtttggaataccttgtagcaggacatgaggatataagaacaggcaaactaattgtgaatatgaaaagctttgtccagcactggaaaccttctcttggaagaaaagtcatggatattgtaaaaagagagtgcaagtagcattaagatggatagcacataatggcacttgtctatgtacaaaacacaaactttagagcaagaagacctcagacaggaaactggaattttttaaagtgccaaaacatatagaaatgtttgaatgcatgggtcttatctaatttatctcttctggacccatgtttaaatacagttttatttcatgaagagaaatgaaaacccctacactgatatctgttttctatgggactgattctgaaattcttaactattaagaatattttaatagcagcatgacatttagcagtaatccattaagggcagtacctctaacaaggacgccttccagcttcagctatgttacttacgtttgatgctact

SEQ ID NO: 2468 - DNA, 596 bp, Homo sapiens
gggagaagccacttcccctctctggatctctgtttcactacctatgaggagattaaactagactgtctataagagtccttctctgagttgttctctgatcttagattctaaaggctggcacttgtatgaaaccagctgtcctgctttctggaaaaagtccagcgccattgttaagcaggaaaatttctcctgtgtggttctgccaaaacaaaagctcagactattattcagatctggctgggcaagagagatttgtcagctacatgtttattgaatgatgaaacagctgaacacattcctgcacagaaaacacacattgtctaggtgacaaagagtaatgtggacacatcagggccaccttctgacctttgctagtttttttgttagtttgttttgtttttgtttctttgtattttttgtttgtttttgtgtctgtttttgagacagggtctcattctgtcctccggctggagtgcagcagtatgatcacggctcactgtagccttgacctcccagcctcaagcgatcctcccacctcagactcccaagtagctgggactacagtcatgcaccaccatgcccagctaaattttttt

SEQ ID NO: 2469 - DNA, 594 bp, Homo sapiens
atacacatatttaataaatagtacactgtactatggaaggatgagataaaatattatggaagcattagagagaaagagagaatttccaatctatgggtatcataggtggtttcttggaggaaagtggaactgaactaagcctcgaagttggtaaggaacagatggttggctatggtagggtggagaaaagcagagttgcagaattctcttatgttgtagtcccaaattaatagtaatgtactagattttcttctcctctcttgtgaatttccagcaacagcttgattttaacctccacagaaacacaaatgagagctgtgatggaaacaataattactagagtccagttttaactccaagtcaaaattttagtcacattcagccctgaataagaaataaggcaaagcatgcaacaggactttataactttttaattttaaggcattataaatataaatttttattttatcttatttttttagagatggggtcttgctctgttgcccaacaggagtgtagtggcaccttcttagcttactgcagccttgaactgttgggctcaagcgatccttctgcctcagcctgctgagtatg

SEQ ID NO: 2470 - DNA, 409 bp, Homo sapiens
tacggctgcgagaagacgacagaagggtacggctgcgagaagacgacagaagggtacggctgcgagaagacgacagaagggtacggctgcgagaagacgacagaagggtacggctgcgagaagacgacagaagggtacggctgcgagaagacgacagaagggtacggctgcgagaagacgacagaagggtacggctgcgagaagacgacagaagggtacggctgcgagaagacgacagaagggtacggctgcgagaagacgacagaagggtacggctgcgagaagacgacagaagggtacggctgcgagaagacgacagaagggtacggctgcgagaagacgacagaaggggaaaagacaggatgattcatttacatctcttttccttcacagaatcatgagggaagta

SEQ ID NO: 2471 - DNA, 492 bp, Homo sapiens
ggctttccaactgcctgactgcttgttcgtctcactggtgtgagctccagcatcccctttgctcgaaatggaccccaactgctcttgcgccactggtaagggaagctctgcgccctggaatccccatttcccagccctattacagagggtctctgggtttcaggaagtcgcattttaagttctgagcgacggggactccagtacttcgttagatgctttcttcctgatcacgcccctgagagcattgccctcatccctgggcctctacgtcagagttaagaatactgaggctcaaggctgaactgctccacatcacccagttggtcatgggcctgctggctgggccccagtgctctgtccaggctctgagcaatcagtgtggttgggggtgctggaaacattgactcttcagagttcaggacagaaggttctggctcgcagtctcaatattcctgggttgtatgtgcacgtgggaccttcctggtgcggtaa

SEQ ID NO: 2472 - DNA, 388 bp, Homo sapiens
atcctcagtgtctttgcccatactgaaattcatttcccacttttgtgcccattctcaagacctcaaaatgtcattccattaatatcacaggattaacttttttttttaacctggaagaattcaatgttacatgcagctatgggaatttaattacatattttgttttccagtgcaaaaatgactaagtcctttatccctcccctttgtttgatttttttccagtataaagttaaaatgcttacccttgtactgaggctgtatacagccacagcctctccccatccctccagccttatctgtcatcaccatcaacccctcccatgcacctaaacaaaatctaacttgtaattccttgaacatgtcaggcatacattattccttctgcctg

SEQ ID NO: 2473 - DNA, 222 bp, Homo sapiens
gagcgcctgcaggttccgggaggtcagctcccagccgaggacgtcggatgtcatcgtccttgctgctttgccaccccattcccgtcaataaagtggtttgaacccgaaaaaaaaaaaaaaaaaaaaaaaaaaaaaaaaacccccaaaaaaaaaaaaaaaaaaaaaaaagggggggggttttttttttaaaaccccccaaaaaaaaaaacttggggggggggg

SEQ ID NO: 2474 - DNA, 262 bp, Homo sapiens
aaatcgctgggctgtttcttggtggtgttggaatggtgggcacagtggctgtcactgtcatgcctcagtggagagtgtcggccttcattgaaaacaacatcgtggtttttgaaaacttctgggaaggactgtggatgaattgcgtgaggcaggctaacatcaggatgcagtgcaaaatctatgattccctgctggctctttctccggacctacaggcagccagaggactgatgtgtgctgcttccgtgatgtccttcttggc

SEQ ID NO: 2475 - DNA, 458 bp, Homo sapiens
gactctgatgggggctcagacttgataacacccgtggtgccccatccctataggagctggtgagattgcagcctgctgcctcccctccatcagccacagctattggacttcccacccagaatctttaggtaaatgaggtaagtcctgatttttaaaacttcttttgaatctggaatccaaacacctgagtggaaagagaagcctgctttaaactggacagatgaaactagaacagactcttggagacggctggcaggaagtgaagctcaccttacctgggcttacctcactgggtcaaatcagaattttattttggagggcaggttggctactttggatattatctgtgaatttcctgcatgtctggacttctaatctctgtgaatttaaaagccccctcgtttccctatgcctgggtggcaaaaccattcccctgggttgaattcttctggacaaat

SEQ ID NO: 2476 - DNA, 562 bp, Homo sapiens
  misc_feature 413: n = A,T,C or G
cagcacatgaagtacatttcagagcgtttgttttatcttgctagtttcgaatgatagattcctgtgaaagccaacaccatctcttctttgcccttgactgtgacctgcatgttaaaagatctagttttctggttatgctactgacttagaacattggaaaaccactttatacctgatttccctttaagcactatttatttgccatcttgatatttcagaatccttcaaatttatttagaggactttgaaaatatatcattgcacataaaatgcagttgattcaaaagagaacatttaaaacatacattttattaatcaaacttttattgttttaaaatgaagttttattttggccaccaccagtggctcacgcctgtaatcccagcactttgggaggccaaggcaggcagatncaccttaggtcgggagttcaagaccagcctgtccaacatggcaaaacctcgtctctactaaaaatacaaaaactagcctggcacagtggcatgcccctgtagtcccagatacttgggaaggctgagtcaggagaatcacttgaacctgg

SEQ ID NO: 2477 - DNA, 606 bp, Homo sapiens
gacagaagggggagcaagtgagcagatcctccgaggcaccagggactccagcccatgccatggcggattctgagcgcctctcggctcctggctgctgggccgcctgcaccaacttctcgcgcactcgaaagggaatcctcctgtttgctgagattatattatgcctggtgatcctgatctgcttcagtgcctccacaccaggctactcctccctgtcggtgattgagatgatccttgctgctattttctttgttgtctacatgtgtgacctgcacaccaagataccattcatcaactggccctggagtgatttcttccgaaccctcatagcggcaatcctctacctgatcacctccattgttgtccttgttgagagaggaaaccactccaaaatcgtcgcaggggtactgggcctaatcgctacgtgcctctttggctatgatgcctatgtcaccttccccgttcggcagccaagacatacagcagcccccactgaccccgcagatggcccggtgtaggcgaacttccctcatttctctctgcaatctgcaaataactcctccattgaaataactcctccccaccccaacaacaacattcccagca

SEQ ID NO: 2478 - DNA, 595 bp, Homo sapiens
acagaagggatagctcctatacaagtccaggatttgctattagactccttgaattatgtgcccagctctgagccaatggctgtgcttaggaggctcctgtctcatgcacccaccccagtactgggcatcagaaacaaccagtgatccctataatgaaccacgggttcacagacttaagtgtaatcctgcagcagggcctcaggaagacttgaaacccaaaatcagaaagccatggtttcttgtcttcctggtgtctgttttgtcccttccctctgtagaggagtcctgctatcactgcaggcaacggggctgccctgcagctcctgctgtttacatttcactcggtgtagccataggcagagacctcagggagaacctgattcggcttggattgagtcaggttccaccccagtccagtcagttgtggactgagaggtgatgaggctgggccctttaagacaaatctgggtgggtggagtctgtgcttaatgaagttgtgatgttagctgatggcccagaagggactggtaggtgcctctcactgtctggttgggaagcattctcttaagtccaagatgatgataaatagtattag

SEQ ID NO: 2479 - DNA, 302 bp, Homo sapiens
acgacagaagggtacggctgcgagaagacgacagaagggtacggctgcgagaagacgacagaagggtacggctgcgagaagacgacagaagggtacggctgcgaggagacgacagaagggtacggctgcgagaagacgacagaagggtacggctgcgagaagacgacagaagggtacggctgcgagaagacgacagaagggtacggctgcgagaagacgacagaagggtacggctgcgagaagacgacagaagggtacggctgcgagaagacgacagaagggtacggctgcgacaagacgac

SEQ ID NO: 2480 - DNA, 490 bp, Homo sapiens
gataccttgccctcctcccacctcagtggtagaaaacctttgatttatatcattgcaagttttcaaccccacactaaggacatactattttatttcttcttccataggaacaatgcacctttgtctgtgtcactggatggagattttccaaccctttaccacagtagcacaactctgcattagtgcaaaatcctgggccccaaaacaatccttgttcctctcctgatggagaagtatttttcttgcatccctcccccagaagcagtgatcctttgcctggtctcaggtgggatagggtagggtatgagaggtttcttaaccttctcggaaagctgatgtgttttgctgcttcttatctcccaaaaacagtagacttttgcgtgggttcatggacacagatgctttttttgccacagaaaacgaagggttttgattcttaagagagaagcaaatgttcatgtagtcaatttttttcttatttattttttgc

SEQ ID NO: 2481 - DNA, 617 bp, Homo sapiens
gaacaactgcgaggagatgagcagtctctgcccccgccggccggcctcaacagttcctgggtggagctacccatgaacagcagcaatggcaatgataatggcaatgggaaaaatggggggctggaacacgtaccatcctcatcctccatccacaatggagacatggagaagattcttttggatgcacaacatgaatcaggacagagtagttccagaggcagttctcactgtgacagcccttcgccacaagaagatgggcagatcatgtttgatgtggaaatgcacaccagcagggaccatagctctcagtcagaagaagaagttgtagaaggagagaaggaagtcgagactttgaagaaaagtgcggactgggtatcagactggtccagtagacccgaaaacattccacccaaggagttccacttcagacaccctaaacgttctgtgtctttaagcatgaggaaaagtggagccatgaagaaagggggtattttctccgcagaatttctgaaagtgttcattccatctctcttcctttctcatgttttggctttggggctaggcatctatattggaaagcgactgagcacaccctctgccagcacctactgagggaa

SEQ ID NO: 2482 - DNA, 542 bp, Homo sapiens
acagaagggcaaagtggtcgactagtaatttaataacctgctagaagaaaaatgcattgcattagagaaagataaccaaacccagagtttgtataaatatcatgcacaatgttcaactgtaattcaaaaattaccagtgatggatacagaaaaatgtgacatgtaatttttttttaaagtccatggaaatagattcctcgatgattcagaagttgtagacaaggactttaaagcagaaattataaatatattcaggattttaaaaaaatatgttttcaggcccggtgcggtagttcacgcctataatccaccagatgtggtggcgtatgcttataatcccagctactcagaaggctgaggcatgagaatagatagcttgaacccaggaggtggaggttgcagtgagccgagattgctccactgcactctagcctgggcaacagagtgagaccctgtctctaaaaatatatgtatatatatagtcataatgagggaacagatgagaaaataagcagagaaatgaaaattttcaaaaataagta

SEQ ID NO: 2483 - DNA, 516 bp, Homo sapiens
acagaagggatattatgcctggtgatcctgatctgcttcagtgcctccacaccaggctactcctccctgtcggtgattgagatgatccttgctgctattttctttgttgtctacatgtgtgacctgcacaccaagataccattcatcaactggccctggagtgatttcttccgaaccctcatagcggcaatcctctacctgatcacctccattgttgtccttgttgagagaggaaaccactccaaaatcgtcgcaggggtactgggcctaatcgctacgtgcctctttggctatgatgcctatgtcaccttccccgttcggcagccaagacatacagcagcccccactgaccccgcagatggcccggtgtaggcgaacttccctcatttctctctgcaatctgcaaataactcctccattgaaataactcctccccaccccaacaacaacattcccagcagaccaactcccaccccctctttgaggtaaaagtgcctttattgggagacttttgtc

SEQ ID NO: 2484 - DNA, 509 bp, Homo sapiens
cagaagggtacggctgcgagaagacgacagaagggtacggctgcgagaagacgacagaagggtacggctgcgagaagacgacagaagggtacggctgcgagaagacgacagaagggtacggctgcgagaagacgacagaagggcaacatagtgagacactgtctctaccaaaaaaaggaaggaagggacacatatcaaactgaaacaaaattagaaatgtaattatgttctaagtgcctccaagttcaaaacttattggaatgttgagagtgtggttacgaaatacgttaggaggacaaaaggaatgtgtaagtctttaatgccgatatcttcagaaaacctaagcaaacttacaggtcctgctgaaactgcccactctgcaagaagaaatcatgatatagctttgccatgtggcagatctacatgtctagagaacactgtgctctattaccattatggataaagatgagatggtttctagagatggtttctactggctgccggaatct

SEQ ID NO: 2485 - DNA, 126 bp, Homo sapiens
gctcatggacgagatgggaaggcacagggagaagggataaccctacacccagaccccaggctggacatgctgactgtcctctcccctccagcctttggccttggcttttctagcctatttacctgc

SEQ ID NO: 2486 - DNA, 385 bp, Homo sapiens
tctggaatagaacaagaagatctatgtagcacaacaaaaaagttaattggaaactatgattaatggagaagtctatggggtcacgtggaaactgtttaccttgccacctctctgtagtcattaaaactcttgaaaatgaattttcttatcctaagagtgtaaaactgatgttgtggagcattttgcacatgccagacacagatgaattcaagacgcagtccctacactccgggtttctacagtttagctggacagagatgaacaaaattgcaatggagtgtgtaaggggccatagtgtgcaaggcccaacacctccctgagcgaaggacgtcagcactggttggctggatcctggccaagcttgctgtggggaagtggtcgatgt

SEQ ID NO: 2487 - DNA, 500 bp, Homo sapiens
tacggctgcgagaagacgacagaaggggatttgctttctctttttcctttcttccggatgagaggctaagccataatagaaagaatggagaattattgattgaccgtctttattctgtgggctctgattctccaatgggaataccaagggatggttttccatactggaacccaaaggtaaagacactcaaggacagacatttttggcagagctcagttttctgtgcttggaccctctgggcccatcctggccatggtgggtgaagacgctgatctgccctgtcacctgttcccgaccatgagtgcagagaccatggagctgaagtgggtaagttccagcctaaggcaggtggtgaacgtgtatgcagatggaaaggaagtggaaggcaggcagagtgcaccgtatcgagggagaacttcgattctgcgggatggcatcactgcagggaaggctgctctccgaatacacaacgtcacagcctctgacagtggaaagtactt

SEQ ID NO: 2488 - DNA, 578 bp, Homo sapiens
gtgatatccgaacctagtgaatggtatgcttgggtgttttccattgagagcggatggacctctttataaagttggttgctgcaaaatccagttcttccaaaagccactttatttagggtttattcacaagtcatatccattttggtacagtgtttgtttcctaatatttattaaccaccttataccaaatgtcttgcaaagaaatgttattaaaaccttgaatttttacaaatgtaaaaaacaaaaagtgtattaatgtatttgttcaggaaaagctacataccgaagggcttttgtatatgaattctgtggtggggagacccatttgtaatctatatggcagttccatctgggttttaagtttaaatttcaccgtgtcttaatgcttcattctattggtttattggaacatgtaataaataggagtagtgatgtattaaaacacaagtattcattaatgttttatatcttcactaaaattctatagttatgaaactattttatcaatcaaggtgttatatttcagtcagaagtgaaaatttatgaagagtatttggaagtgtgtacagaaataaact

SEQ ID NO: 2489 - DNA, 94 bp, Homo sapiens
accattaaaaacttcaactcacacgcactacctagaaaaacccaaacatataactgaactcctcacacgcgattggaccaatctatgaccctat

SEQ ID NO: 2490 - DNA, 396 bp, Homo sapiens
gacagaagggtacggctgcgtgaagacgacagaagggtacggctgcgagaagaccacagaagggtacggctgcgagaagacgacaccgaggtacggctgcgagaagacgacagaagggtacggctgcgagaagacgacagaagggtacggctgccagaagacgacagaagggataggtttggtcctagcctttctattagctctgagtaagattactacatcgcaagcatccccgttccggtgagttcacgctcgaaatcaccacgatcaagagggacaagcatcaagcacgcagcaatgcagctcaaaacgcttagcctagccacacccccacgggaaacagcagtgattaacctttagcaataaacgaaagtttaactaagctatactaacccc

SEQ ID NO: 2491 - DNA, 400 bp, Homo sapiens
tacggctgcgagaagacgacagaagggtacggctgcgagaagacgacagaagggtacggctgcgagaagacgacagaagggtacggctgcgagaagacgacagaagggtacggctgcgagaagacgacagaagggtacggctgcgagaagacgacagaagggtacggctgcgagaagacgacagaagggtacggctgcgagaagacgacagaagggtacggctgcgagaagacgacagaagggtacggctgcgagaagacgacagaaggggcttcctttctgggctcggacctaggtcgcggcgacatggccaaacgtaccaagaaagtcgggatcgtcggtaaatacgggacccgctatggggcctccctccggaaaatggtgaagaaaattgaaatca

SEQ ID NO: 2492 - DNA, 236 bp, Homo sapiens
gaagggtacggctgcgagaagacgacagaagggtacggctgcgagaagacgacagaagggtacggctgcgaagacgacagaagggtacggctgcgagaagacgacagaagggtacggctgcgagaagacgacagaagggtacggctgcgagaagacgacagaagggtacggctgcgagaagacgacaggagggcaaccacctccctccagacagggatgtactagatggcgagcag

SEQ ID NO: 2493 - DNA, 519 bp, Homo sapiens
gaccattcttagtggcactggggaaatcttggcacccagaagaattcaactgcgctcactgcaaaaatacaatggcctacgttggatttgtagaggagaaaggagccctgtattgtgagctgtgctatgagaaattctttgcccctgaatgtggtcgatgccaaaggaagatccttggagaagtcatcaatgcgttgaaacaaacttggcatgtttcctgttttgtgtgtgtagccagtggaaagcccattcggaacaatgtttttcacttggaggatggtgaaccctactgtgagactgattattatgccctctttggtactatatgccatggatgtgaatttcccatagaagctggtgacatgttcctggaagctctgggctacacctggcatgacacttgctttgtatgctcagtgtgttgtgaaagtttggaaggtcagacctttttctccaagaaggacaagcccctgtgtaagaaacatgctcattctgtgaatttttgaaagtcaacagttc

SEQ ID NO: 2494 - DNA, 409 bp, Homo sapiens
taccagaaagctgtaggtttaacttaagatgacttagacaatgaaaacgctactgggaaagagatactaaaatgttcacagttttgactgacagaaagactcatgagaattgtataactttgaaataagtcagataaatcctttctaggatgatgggacagagaaattgtaaaggtttaggattacctgtttactgcttcagagaaattaaaaaatacacttttacgaaggccagtaagaactattttctggaacaaacggaaaaagctggataatgctactgactgagtgaaggggataagccacccagtacccaggcctgagtttcacctaacaaggagacaggcctcgagcattgttaagagccataagattctattttccagtgagagagtaccacttacgtgat

SEQ ID NO: 2495 - DNA, 336 bp, Homo sapiens
gcaatctttgtattgtttttctactaagtaaaaaggtcagacttggatatggtacatttaaagaggatgctgattagtcacaaaattttagccatctaagagttcattcagtttctcccttaggtgtttcccttttattaatttcctttgctttctggccccagaagtgtaactggtaaccaattttaggtgtggtttctaatataagtttactcatggagacaatgaaaaaaaaaaaaaaaaccccaaaaaaaaaatattaaattggttttaaaaaacccagggtttttttaaaagggggcctgggttttttaaaaaaacttttaatttcaaaaa

SEQ ID NO: 2496 - DNA, 501 bp, Homo sapiens
gattctgctttccaaccgcctgactgcttgttcgtctcactggtgtgagctccagcatcccctttgctcgaaatggaccccaactgctcttgcgccactggtaagggaagctctgcgccctggaatccccatttcccagccctattacagagggtctctgggtttcaggaagtcgcattttaagttctgagcgacggggactccagtacttcgttagatgctttcttcctgatcacgcccctgagagcattgccctcatccctgggcctctacgtcagagttaagaatactgaggctcaaggctgaactgctccacatcacccagttggtcatgggcctgctggctgggccccagtgctctgtccaggctctgagcaatcagtgtggttgggggtgctggaaacattgactcttcagagttcaggaacagaagttctggctcgcagtctcaatattcctgggttgtatgtgcacgtgggaccttcctggtgcggtaaaaca

SEQ ID NO: 2497 - DNA, 584 bp, Homo sapiens
acagaggggtggtgttgtttgtgtggatggtgacaagtcctactgctggacagagtgagtaggtcctctctgcagtttcttagctacctcatatggcttagggtggatcctgctgtgggatttataccagcgtgccaatgctaagaggggcctaattctccctctggggagtggccagagaggataacatgactgagaagtgtgcgagggaccttcagagggggaaagtgaggaaacagttcaacctcccagggcaggcaaagcaagacatccctggtttaaggggttgagtcttctggggcaggcaaggcaagacatccctggtttgaggggttgagccttccagtaatttcaggagattgaacctgacaagtacccaacatgggaaatgtttctagtaaaacaaggacagggagtaaagatgactcagggaaaggtgaaggtgatcagatttcttctagtagtccttcagggtgtatgttaatatattagaaggataatgaaaggaccaaaatcaagaaaaagcagctgctgtcccagacccttctcctatccctgttgtcctcctctttataaccctgcct

SEQ ID NO: 2498 - DNA, 294 bp, Homo sapiens
tacggctgcgagaagacgacagaagggtacggctgcgagaagacgacagaagggtacggctgcgagaagacgacagaagggtacggctgcgagaagacgacagaagggtacggctgcgagaagacgacagaagggtacggttgcgagaagacgacagaatggtactgttgctagaagacgacagaagggtacggctgcgagaatacgacagaagggtacagctgcgagaagacgacagaagggtacggctgctagaagacgacagaagggtacggctgcgagaagactacagaa

SEQ ID NO: 2499 - DNA, 592 bp, Homo sapiens
gacagaagggtggtgttgtttgtgtggatggtgacaagtcctactgctggacagagtgagtaggtcctctctgcagtttcttagctacctcatatggcttagggtggatcctgctgtgggatttataccagcgtgccaatgctaagaggggcctaattctccctctggggagtggccagagaggataacatgactgagaagtgtgcgagggaccttcagagggggaaagtgaggaaacagttcaacctcccagggcaggcaaagcaagacatccctggtttaaggggttgagtcttctggggcaggcaaggcaagacatccctggtttgaggggttgagccttccagtaatttcaggagattgaacctgacaagtacccaacatgggaaatgtttctagtaaaacaaggacagggagtaaagatgactcagggaaaggtgaaggtgatcagatttcttctagtagtccttcagggtgtatgttaatatattagaaggataatgaaaggaccaaaatcaagaaaaagcagctgctgtcccagacccttctcctatccctgttgtcctcctctttataaccctgcctcttggga

SEQ ID NO: 2500 - DNA, 591 bp, Homo sapiens
aagggtgagccctttacttgggatgtacaggctttgagcagtgcagggctgctgagtcaaccttttattgtacaggggatgagggaaagggagaggatgaggaagcccccctgggatttggtttggtcttgtgatcaggtggtctatggggctatccctacaaagaagaatccagaaataggggcacattgaggaatgatactgagcccaaagagcattcaatcattgttttatttgccttcttttcacaccattggtgagggagggattaccaccctggggttatgaagatggttgaacaccccacacatagcaccggagatatgagatcaacagtttcttagccatagagattcacagcccagagcaggaggacgctgcacaccatgcaggatgacatgggggatgcgctcgggattggtgtgaagaagcaaggactgttagaggcaggctttatagtaacaagacggtggggcaaactctgatttccgtgggggaatgtcatggtcttgctttactaagttttgagactggcaggtagtgaaactcattaggctgagaaccttgtggaatgcagctgacccagctgat

SEQ ID NO: 2501 - DNA, 541 bp, Homo sapiens
aagtcatctgatgagaacaagctatttgggcacaacacatcaggaaagagagcaccacgtgatggagtttctctagaagctccagtgataagagatgttgactctaaagttgatttaaggccaggcatggtggtttacgcctataatcccagcattttgggagtccgaggtgggcagatcacttgagctcaggaggtcaagatcagcctgggcaacatggtgaaacctggtctctacataaaatacaaaaacttagatgggcatggtggtgtgtgcctatagtcccactacttgtggggctaaggcaggaggatcacttgagccccggaggtcgaggctacagtgagccaagagtgcactactgtactccagccagggcaagagagcgagaccctgtcccaataaataaataaataaataaataaataaataaataaataaaaaaaaacaaagttgattaagaaaggaagtataggccaggcacagtggctcacacctgtaatccttgcattttggaaggctgaggcaggaggatcacttt

SEQ ID NO: 2502 - DNA, 306 bp, Homo sapiens
gagacgcacgatgcaggagctggagatcgagctgcagtcccagctcagcatgaaagctgggctggagaactcactggccgagacagagtgccgctatgccacgcagctgcagcagatccaggggctcattggtggcctggaggcccagctgagtgagctccgatgcgagatggaggctcagaaccaggagtacaagatgctgcttgacataaagacacggctggagcaggagatcgctacttaccgcagcctgctcgagggccaggatgccaggatggctggcattggcatcggggaagcctcttc

SEQ ID NO: 2503 - DNA, 387 bp, Homo sapiens
atttatcgggatgacaaatccatagaatatattcttttatgttaaattattatcttcatattaatcttaaaattttgtgacgtgtctttttcctttttttccacagttttaatatattattcttcaacgacattttttgtaactttacacttttttggttattttattttaaaaaaatgaaaaattaatttaaaaaaatgcaaaaaaactgttggattatttattttagaaattcccccctttgtgttggactgcaaattgagtttctttctctttaggcctttcacaactaggactgagaatgtatgtaaaagttctgtgacagtacagaaggaaaacaactttttatgtatagcttctaaaaggggaaaaaaaaaaaaaaaaaac

SEQ ID NO: 2504 - DNA, 541 bp, Homo sapiens
gacttcctgcgaggcccctgcagcagcagcggcgtggtcagagcgagcttcggagaagcagtggtgggttccacgtgatggtggagtaggaggcaggtctccgcggttcatctgtgttgctctaaatgacactgcttcattattttgatggctggagaatatttcctagtgtatgtatatgagagtttcttgatctctttatctgtggatgaacagctactttgaaacatatggtacatttgtgttaaggctagtcaccctgctgtggaatagaaggccagaattgatcagtctcatctgagagtaactttgtacccatcactgattccttctgagactgcctccacttccccagcagcctctggtttcttcatgtggctgcagatggcaggatttcccaaaggtttctggctgaaacatattccgtggtgtatctgtacagcagtttcctcatccctgcagctgtgtttgaacaggtcatttaccatgctgtcctccaggttcaacagtatggctccaaaggatgaaatttcattctgat

SEQ ID NO: 2505 - DNA, 572 bp, Homo sapiens
gatgagatccgacactatggaccagccaagtgggtcagcacgtccgtggagtctatggactgggattcagccatccagacgggctttacgaaactgaacagctacattcaaggcaaaaacgagaaagagatgaaaataaagatgacagctccagtgacaagctacgtggagcctggttcaggtccttttagtgagtctaccattaccatttccctgtatattccctctgaacagcaatttgatccacccaggcctttagagtcagatgtcttcattgaagatagagccgaaatgactgtgtttgtacggtctttcgatggattttctagtgcccaaaagaatcaagaacaacttttgacattagcaagcattttaagggaagatggaaaagttttcgatgagaaggtttactacactgcaggctacaacagtcctgtcaaattgcttaatagaaataatgaagtgtggttgattcaaaaaaatgaacccaccaaagaaaacgaatgagaaaaatgaaaggaagttctgctgtcagaggcaaaacatctgtttatcatagacatcaacatgac

SEQ ID NO: 2506 - DNA, 114 bp, Homo sapiens; identical to SEQ ID NO: 675
  misc_feature 70: n = A,T,C or G

SEQ ID NO: 2507 - DNA, 430 bp, Homo sapiens
gggactcgccacctcctcttgcacccctgccaggcccagcagccaccacagcgcctgcttcctcggccctgaaatcatgcccctaggtctcctgtggctgggcctagccctgttgggggctctgcatgcccaggcccaggactccacctcagacctgatcccagccccacctctgaacaaggtccctctgcagcagaacttgcaggacaaccaattccaggggaagtggtatgtggtacgcctggcagggaatgcaattctcagagaagacaaagacccgcaaaagatgtatgccaccatctatgagctgaaagaagacaagagctacaatgtcacctccgtcctgtttaggaaaaagaagtgtgactactggatcacgacttttgttccaggttgccagcccggcgagttcacgctgggcaacattaag

SEQ ID NO: 2508 - DNA, 527 bp, Homo sapiens
ctgctaatacagccctggctgtggaatccttcaccgtctcagctggtatcagccccagcctgccttgtgccatatctcagcttggatctctgctagagtccccccaaccatatatcatagagttgaatcacaatgagaccgttggctttgaatttgagtcgttggttcccatggtgagatgcttgttaagactttatacttgggtcaatctctcactttattttgtagaaccatttgaaatcctaggatgtgcttgttctggaaggatgacatgggcccagactgaacaagtcagcttgatgatcttaaatgatggaagtataggacgttgcttattttaaaacaagggaaggacacaaaatggaatgactgcttagtcctttctcagatactcttaaaacaattttttattgttaaatttgtggtaatacatggtcacaaccgtggatcaaacaaggtcagtctaaagtggcaggtcctaggtgtgacctgataccaccaccctttgtggcagcaccgggctggac

SEQ ID NO: 2509 - DNA, 262 bp, Homo sapiens
  misc_feature 186, 188: n = A,T,C or G
ccggcctcgtggaccagcctgggctctcgctggaggaagtggcttgcaaggaggcttgggaggagtgtggctaccacttggccccctctgatctgcgccgggtcgccacatactggtctggagtgggactgactggctccagacagaccatgttctacacagaggtgacagatgcccagcgtacgntnccaggtgggggcctggtggaggagggtgagctcattgaggtggtgcacctgcccctggaaggcgcccaggcctt

SEQ ID NO: 2510 - DNA, 201 bp, Homo sapiens
gccactgaaaatccttgttaaaaaccagatcacaaatctggggctcttggtcccattggagaaggaaggaagagcctcaaaataagtgtgcacccatgcacatattcaggaacagcttgtttagtctttacactttgcctgaaagttgcttctcctcgtccctttgtgtgcctgggtggcctcggccctgtgcgttggcaa

SEQ ID NO: 2511 - DNA, 621 bp, Homo sapiens; identical to SEQ ID NO: 1210

SEQ ID NO: 2512 - DNA, 548 bp, Homo sapiens
gacagcatggacatgagggtccccgctcagctcctggggctcctgctactctggctccgaggtgccagatgtgacatccagatgacccagtctccatcctccctgtctgcatctgttggagacagagtcaccatcgcttgccgggcaagtcagagcattggcatctatttaaattggtatcaacaaaaaccagggaaagcccctaaactcctgatctatgattcatccagattgcaaagtggggtcccatcaaggttcagtggcagtggaggtgggacacacttcactctcaccatcagcagtctgcaacctgaagatttagcaacttactactgtcaacaagggtacagtacacctggcaccttcggccaagggacacgactggaaattaaacgaactgtggctgcaccatctgtcttcatcttcccgccatctgatgagcagttgaaatctggaactgcctctgttgtgtgcctgctgaataacttctatcccagagaggccaaagtacagtggaaggtggataacgccctccaatcgggtaactc

SEQ ID NO: 2513 - DNA, 430 bp, Homo sapiens
tatacacaacatttatttcaaactattgggagggatgagagtggcttaaaaacttccatccctacttttcaagagtgcagttgattctgaatctgaaagcccgcctctgtcctaaaatacaaacaagcacagacattaaacctggatactatatgataaagagggatgtaactattgaattggatacaaggatcagaatggaaagaaactcacgatgaaattgaacctggtttttgtatatttatcaaacttgtgctgagaatagtgtctgattatacgacttttaagcaaagttgggtgtaattaggtgaaaacagcccaggtcctcccgggagcacagaggggctaggggctggtccttctcgtttgctctagtcttgctttgctgtctggtgtagctcctctgctgctcccatctgcactaattgac

SEQ ID NO: 2514 - DNA, 493 bp, Homo sapiens
ctcactatttggaatttggccctcgaggccaagaattcggcacgaggcggcacgaggtgtaactattgaattggatacaaggatcagaatggaaagaaactcacgatgaaattgaacctggtttttgtatatttatcaaacttgtgctgagaatagtgtctgattatacgacttttaagcaaagttgggtgtaattaggtgaaaacagcccaggtcctcccgggagcacagaggggctaggggctggtccttctcgtttgctctagtcttgctttgctgtctggtgtagctcctctgctgctcccatctgcactaattgacccaaaacgtgggtatttcctgctacacaaaagccaaaaggtttcatgtagattttagttcactaaagggtgcccacaaaatagagattaattttaacttaaattttaagcttgaagattaggtactatctgtgaagttacactttttttttttttttaaaaggaaaaaatgt

SEQ ID NO: 2515 - DNA, 472 bp, Homo sapiens
cggcacgaggtgtaactattgaattggatacaaggatcagaatggaaagaaactcacgatgaaattgaacctggtttttgtatatttatcaaacttgtgctgagaatagtgtctgattatacgacttttaagcaaagttgggtgtaattaggtgaaaacagcccaggtcctcccgggagcacagaggggctaggggctggtccttctcgtttgctctagtcttgctttgctgtctggtgtagctcctctgctgctcccatctgcactaattgacccaaaacgtgggtatttcctgctacacaaaagccaaaaggtttcatgtagattttagttcactaaagggtgcccacaaaatagagattaattttaacttaaattttaagcttgaagattaggtactatctgtgaagttacacttttttatttttttttaaaggtagagatgtgtgtgtgtgtaggtattaaagatgtg

SEQ ID NO: 2516 - DNA, 271 bp, Homo sapiens
gtttttcttttttttatacacaacatttatttcaaactattgggagggatgagagtggcttaaaaacttccatccctacttttcaagagtgcagttgattctgggggggaaagcccgcctctgtcctaaaatacaaacaagcacagacattaaacctggatactatatgataaagagggatgtaactattgaattggatacaaggatcagaatggaaagaaactcacgatgaaattgaacctggtttttgtatatttatcaaacttgtgct

SEQ ID NO: 2517 - DNA, 343 bp, Homo sapiens
gtttttcttttttttatacacaacatttatttcaaactattgggagggatgagagtggcttaaaaacttccatccctacttttcacgagtgcagctgattctgaatctgaaagcccgcctctgtcctaaaatacaaacacgcacagacattagacctggatactatatgatacagagggatgtaactattgaattggatacacggatcacaatggaaagaaactcacgatgaaattgaacctggcttttgtatatttatcaaacttgtgctgagaatagcgcctgattatacgacttttaagcaaagctgggtgtaattaggtgaaaacagcccacgtcctcc

SEQ ID NO: 2518 - DNA, 345 bp, Homo sapiens
agtggcgagcaggttcccacttgccaaagatcccttttaaccaacactagcccttgtttttaacacacgctccagcccttcatcagcctgggcagtcttaccaaaatgtttaaagtgatctcagaggggcccatggattaacgccctcatcccaaggtccgtcccatgacataacactccacacccgccccagccaacttcatgggtcactttttctggaaaataatgatctgtacagacaggacagaatgaaactcctgcgggtctttggcctgaaagttgggaatggttgggggagagaagggcagcagcttattggtggtcttttcaccattggcagaaacg

SEQ ID NO: 2519 - DNA, 401 bp, Homo sapiens
ttttccaagtccgtttcagtcccttccttggtctgaagaaattctgcagtggcgagcagtttcccacttgccaaagatcccttttaaccaacactagcccttgtttttaacacacgctccagcccttcatcagcctgggcagtcttaccaaaatgtttaaagtgatctcagaggggcccatggattaacgccctcatcccaaggtccgtcccatgacataacactccacacccgccccagccaacttcatgggtcactttttctggaaaataatgatctgtacagacaggacagaatgaaactcctgcggctctttggcctgaaagttgggaatggttgggggagagaagggcagcagcttattggtggtcttttcaccattggcagaaacagtgagagct

SEQ ID NO: 2520 - DNA, 442 bp, Homo sapiens; identical to SEQ ID NO: 1172

SEQ ID NO: 2521 - DNA, 256 bp, Homo sapiens
  misc_feature 96: n = A,T,C or G
gaatatgtagatttgcttcttaatcctgagcgctacactggttacaagggaccagatgcttggaaaatatggaatgtcatctacgaagaaaactgntttaagccacagaccattaaaagaccttaaatcctttggcttctggtcaagggacaagtgaagagaacactttttacagttggctagaaggtctctgtgtagaaaaaagagcttctacagacttatatctggcctacatgcaagccattaatgtgcattt

SEQ ID NO: 2522 - DNA, 405 bp, Homo sapiens
attctgtgatttatttgaaactgtgaaaccatgtgccataatagaattttgagaattttgcttttacctaaattcaagaaaatgaaattacacttttaagttagtggtgcttaagcataatttttcctatattaaccagtattaaaatctcaagtaagattttccagtgccagaacatgttaggtggaattttaaaagtgcctcggcatcctgtattacatgtcatagaattgtaaagtcaacatcaattactagtaatcattctgcactcactgggtgcatagcatggttagaggggctagagatggacagtcatcaactggcggatatagcggtacatatgatccttagccaccagggcacaagcttaccagtagacaatacagacagagcttttgttgagct

SEQ ID NO: 2523 - DNA, 447 bp, Homo sapiens
tgtgatttcatttgaaactgtgaaaccatgtgccataatagaattttgagaattttgcttttacctaaattcaagaaaatgaaattacacttttaagttagtggtgcttaagcataatttttcctatattaaccagtattaaaatctcaagtaagattttccagtgccagaacatgttaggtggaattttaaaagtgcctcggcatcctgtattacatgtcatagaattgtaaagtcaacatcaattactagtaatcattctgcactcactgggtgcatagcatggttagaggggctagagatggacagtcatcaactggcggatatagcggtacatatgatccttagccaccagggcacaagcttaccagtagacaatacagacagagcttttgttgagctgtaactgagctatggaatagcttctttgatgtacctctttgcctt

SEQ ID NO: 2524 - DNA, 294 bp, Homo sapiens
tgtgatttcatttgaaactgtgaaaccatgtgccataatagaattttgagaattttgcttttacctaaattcaagaaaatgaaattacacttttaagttagtggtgcttaagcataatttttcctatattaaccagtattaaaatctcaagtaagattttccagtgccagaacatgttaggtggaattttaaaagtgcctcggcatcctgtattacatgtcatagaattgtaaagtcaacatcaattactagtaatcattctgcactcactgggtgcatagcatggttagaggg

SEQ ID NO: 2525 - DNA, 562 bp, Homo sapiens
aggagcaggttggactggccatccgaagcaagattgcagatggcagtgtgaagagagaagacatattctacacttcaaagctttggagcaattcccatcgaccagagttggtccgaccagccttggaaaggtcactgaaaaatcttcaattggactatgttgacctctatcttattcattttccagtgtctgtaaagccaggtgaggaagtgatcccaaaagatgaaaatggaaaaatactatttgacacagtggatctctgtgccacatgggaggccatggagaagtgtaaagatgcaggattggccaagtccatcggggtgtccaacttcaaccacaggctgctggagatgatcctcaacaagccagggctcaagtacaagcctgtctgcaaccaggtggaatgtcatccttacttcaaccagagaaaactgctggatttctgcaagtcaaaagacattgttctggttgcctatagtgctctgggatcccatcgagaagaaccatgggtggacccgaactccccggtgctcttggaggacccagtcctttgtgccttggc

SEQ ID NO: 2526 - DNA, 721 bp, Homo sapiens
  misc_feature 626, 685, 696: n = A,T,C or G
ggcacgagatgaggagcaggttggactggccatccgaagcaagattgcagatggcagtgtgaagagagaagacatattctacacttcaaagctttggagcaattcccatcgaccagagttggtcccgaccagccttggaaaggtcactgaaaaatcttcaattggactatgttgacctctatcttattcattttccagtgtctgtaaagccaggtgaggaagtgatcccaaaagatgaaaatggaaaaatactatttgacacagtggatctctgtgccacatgggaggccatggagaagtgtaaagatgcaggattggccaagtccatcggggtgtccaacttcaaccacaggctgctggagatgatcctcaacaagccagggctcaagtacaagcctgtctgcaaccaggtggaatgtcatccttacttcaaccagagaaaactgctggatttctgcaagtcaaaagacattgttctggttgcctatagtgctctgggatcccatcgagaagaaccatgggtggacccgaactccccggtgctcttggaggacccagtcctttgtgccttggcaaaaaagcacaagcgaaccccaccctgattgccctgcgctaccagcttgcancgtggggttgtggtcctggccaagagcttcaatgagcacgcatcagacagaacgtgcangtgtttgaatncagttgacttcagaaggagatgaaa

SEQ ID NO: 2527 - DNA, 496 bp, Homo sapiens
agatgataaccagaagtctgcatttgaagttcacaaaagtaatcaagctcaaacagttagtgagaggcagaagaacagacctaaatcttgtaaaaaaggaaaaaatattagggaagatgatcctgtaagaatgttgcaaactgttgcaaagaaattcgacttcagtaatttgagtagtaggttagatggagtcagatttgaaaatgaaaaaaattaatgttattgccaagaacactggtaataaactgaagctaagtcagaaaaaatggttgtttgctagatcccaatggagaaaagtgtgtaactgctcctcgtcaggtctctgctcttcaccataaagacattgctctgtctttggttgctgcaagtgatggagctacagtctgtgttaccacaaggggagatatttacttacttgcagactatcagtgcaagaagatggcttctaaacagttgaacttgaaaaaagttcttgtgtctgggggtcatatggaat

SEQ ID NO: 2528 - DNA, 549 bp, Homo sapiens
ctgcatttgaagttcacaaaagtaatcaagctcaaacagttagtgagaggcagaagagcagacctaaatcttgtaaaaaaggaaaaaatattagggaagatgatcctgtaagaatgttgcaaactgttgcaaagaaattcgacttcagtaatttgagtagtaggttagatggagtcagatttgaaaatgaaaaaaattaatgttattgccaagaacactggtaataaactgaagctaagtcagaaaaaatggttgtttgctagatcccaatggagaaaagtgtgtaactgctcctcgtcaggtctctgctcttcaccataaagacattgctctgtctttggttgctgcaagtgatggagctacagtctgtgttaccacaaggggagatatttacttacttgcagactatcagtgcaagaagatggcttctaaacagttgaacttgaaaaaagttcttgtgtctgggggtcatatggaatacaaggttgatcctgaacatttgaaagaaaatgggggtcaaaaaatttgcattcttgcaatggatggagc

SEQ ID NO: 2529 - DNA, 55 bp, Homo sapiens
gtgtctgccttcacaaatgtcattgtctactcctagaagaaccaaatacctcaat

SEQ ID NO: 2530 - DNA, 498 bp, Homo sapiens; identical to SEQ ID NO: 1313

SEQ ID NO: 2531 - DNA, 325 bp, Homo sapiens
gtcgctgcctctgggggcgctgtacaccgcggccgtcgcggctttagtgctgtacaagtgtgtgggggggggagatgaaactgcggttctccaccaggaggcaagcaagcagcagccactgcagtcagagcaacagctggcccagttgacacaacagctggcccagacagagcagcacctgaacaacctgatggcccagctggaccccctttttgagccgtgtgactactctggctggagcccagcaggagcttctgaacatgaagctatggaccatccacgagctgctgcaagatagcaagccggacaaggatatggaggcttc

SEQ ID NO: 2532 - DNA, 166 bp, Homo sapiens
gaatccagcatcttaaagttgcatatgtgtagcactaatgtttctttttaaatagttgggggaaaatgacctagaaaaccaaattgcagtttggtagccaaaattaactcttggtttatttgtcctttgtgtgtgaaaagtcctactattccgtgcgtcagacttc

SEQ ID NO: 2533 - DNA, 501 bp, Homo sapiens
tttttttttttttttttttttttttcgcagctgaattacatttactgtacaaagaacggttcggagagaaccaggaatggcggagtgtctaacagcagcgcgggtagtgttgatgccgtgaatgcaggaccatccaggtcctcaaagtctgcgaggtttgttcataatcccaaacaagggccctgctggcagcaacaggacaggtggggccaggacagggaagctggagcaggaggccagtgtctttgggggctgtggcagggccgcctgcctggggttcccttactcatctggtagttcatgcaggccacggccctcatctcccaggaacgggccatggggcgagtccactggtgcccagtaacaccctccgtgggaccaccttgggaagcatgtgccgcggagtccaccacggggggtcctgggtcccgggagggctccttctgcgtgctggccatgtcgtgccgcacggcctgaggacaggaggtagaggtgagcacc

SEQ ID NO: 2534 - DNA, 149 bp, Homo sapiens
cgtcccggaggtgcggtgtggggcaccgggcggggccgcgggaaccggcgccccacggagctgctgctgtcagaccaaccccgggcccccatcatcactgcgccgcgctttcaggcgccgagaactaccgttcccggcatgccatgaaa

SEQ ID NO: 2535 - DNA, 475 bp, Homo sapiens
agcagtaaacagggctgctatgcctgctctgtagtggtggacggcgaagtaaagcattgtgtcataaacaaaacagcaactggctatggctttgccgagccctataacttgtacagctctctgaaagaactggtgctacattaccaacacacctcccttgtgcagcacaacgactccctcaatgtcacactagcctacccagtatatgcacagcagaggcgatgaagcgcttactctttgatccttctcctgaagttcagccaccctgaggcctctggaaagcaaagggctcctctccagtctgatctgtgaattgagctgcagaaacgaagccatctttctttggatgggactagagctttctttcacaaaaaagaagtaggggaagacatgcagcctaaggctgtatgatgaccacacgttcctaagctggagtgcttatcccttctttttctttttttctttggtttaattt

SEQ ID NO: 2536 - DNA, 570 bp, Homo sapiens; identical to SEQ ID NO: 1576

SEQ ID NO: 2537 - DNA, 645 bp, Homo sapiens
tccgagcgtcgggagcctgtggaagagaagagcgcgcgggcgacagttaaacaggcccgaggcagagaaaccgccctagcagctctcgcgcgcccggtgcaggcggcggttgctgcggaggtccgtgcacagactgctttgcctgttgttgctcttcggaggcggcgatccccgaaggcgagctgaaatacggctgcaggctacaatttgcagccgacgattaaggaagacgacgagcgggagaggtggcccaccctcatggagcgcttgtgctcggatggcttcgcatttccccattactacattaaaccgtatcatctgaagaggatccacagagctgtcttacgtggtaatctggagaaactgaagtaccttctgctcacgtattatgacgccaataagagagacaggaaggaaaggactgccctacatttggcctgtgccactggccaaccggaaatggtacatctcctggtgtccagaagatgtgagcttaacctctgcgaccgtgaagacaggacacctctgatcaaggctgtacaactgaggcaggaggcttgtgcaactcttctgctgcaaatggcgccgatccaaatattacggatgtctttggaaggactgctctgcactacgctgtgtataatg

SEQ ID NO: 2538 - DNA, 572 bp, Homo sapiens
ctaactgagtaacattcatgaaatgaggctttctgtggcggcgtagtgtttggaattagaaggtaattcagtagagtgtaacttagagaatattgcaagtgacacattgaatcctgcccgtcagggcaccttttcctcagagcaatccggccacacgaatagaaggctgtcgtgaatcacatcagatgtaaaatcattccttctgtttactcttttaattttcatcctttgcaggtagtgcaaattcaacttcaaatatggtgtaggttttgctagattccatatttttttcttggatttttgctaattatttttagcaaaaaatttttgctcagtggcaccctccctagtgtccatgggttagggccatgctggggaaaacgggccggtatttacacacgcgcaaaacacccagagacggcacaaggaggttgaactcatgtttcagttcgcgaacattgactccttacgaaagtcacttcattctaactagatgcgcccacttctggtcattatttcgtttgcatgatgtattgcttcttcacgttttgtttttattgagcacggagtag

SEQ ID NO: 2539 - DNA, 701 bp, Homo sapiens
  misc_feature 34, 41, 43, 52, 58, 72, 180, 204, 205, 211, 214, 228, 243,253, 269, 271, 295, 315, 343, 429, 439, 457, 483, 517, 529,546, 554, 555, 557, 560, 561, 565, 627, 632, 637, 644, 655,659, 662, 672, 680, 689, 690, 698: n = A,T,C or G
ggcacgaggctaactgtgtaacatttatgaaatntgctctntntggcggcgnaggggncggaatgagaaggnaattcagtagagtgtaacttagagaatattgcaagggacacattgaatcctgcccgtcagggcaccttttcctcagagcaatccggccacacgaatagaaggctgcgngaatcacatcagatgtaaaatcannccttcnggngactcttttaattntcatcctttgcaggnagggcaaatncaacttcaaatatggngnaggttttgctagattccatatttntttcttggatttttgctaantatttttagcaaaaaatttttgctcagnggcaccctccctagtgtccatgggttagggccatgctggggaaaacgggccggtatttacacacgcgcaaaacacccagagacggnacaaggaggntgaactcatgtttcagtncgcgaacattgactccttacgaaagncacttcattctaactagatgcgcccacttctggncattattacgantgcatgaaggattgctncttcacgnntnggnnttantgagcacgggagtagaaattccagggctggcttgacatcttccctgcatgctccctcccagnggacngtccntcccttncacatgagganctgncgnccatggtggntttctccnttgggcctnntgggactngga

SEQ ID NO: 2540 - DNA, 300 bp, Homo sapiens
gctaactgagtaacattcatgaaatgaggctttctgtggcggcgtagtgtttggaattagaaggtaattcagtagagtgtaacttagagaatattgcaagtgacacattgaatcctgcccgtcagggcaccttttcctcagagcaatccggccacacgaatagaaggctgtcgtgaatcacatcagatgtaaaatcattccttctgtttactcttttaattttcatcctttgcaggtagtgcaaattcaacttcaaatatggtgtaggttttgctagattccatatttttttcttggatt

SEQ ID NO: 2541 - DNA, 374 bp, Homo sapiens; identical to SEQ ID NO: 803

SEQ ID NO: 2542 - DNA, 290 bp, Homo sapiens
gaggggtcctggagaaatgggttaccccagttgtcttatttaaatggttacccatcagattttaattttatcttctctttgagagcttggtaataagaagcacttaaatcactccaaagaagactttaaaaagggagcagtgaaaaggtcttaataatttattgattgaattaagaaatactagctaattaagaatctgagtctaaacagcacagattttttctttctgcttttaaattgtgttttaaaaaaagagacagggggctgggcgtggtggctcacgcctgtaa

SEQ ID NO: 2543 - DNA, 405 bp, Homo sapiens
gccctttcgagcggccgcccgggcaggtacctgggattacaggcacccaccaccacgcctggctaatttttttttgtatctttagtagggttttgccatgttggccaggctggtctttaactcctacctcgtgatccacccgcctcggccccccaaagtgctaggaccacaggcgtgagccaccacgcccagccccctgtctctttttttaaaacacaatttaaaagcagaaagaaaaaatctgtgctgtttagactcagattcttaattagctagtatttcttaattcaatcaataaattattaagaccttttcactgctccctttttaaagtcttctttggagtgatttaagtgcttcttattaccaagctctcaaagagaagataaaattaaaatctgatgg

SEQ ID NO: 2544 - DNA, 736 bp, Homo sapiens
  misc_feature 2, 3, 4, 5, 6, 7, 8, 9, 14, 15, 16, 17, 18, 19, 20, 21, 22,23, 24, 25, 26, 27, 28, 29, 30, 31, 32, 33, 34, 35, 36,37, 38, 39, 40, 41, 42, 43, 44, 45, 46, 47, 48, 49, 50,51, 52, 53, 54, 55, 56, 57, 58, 59, 60, 61, 62, 63, 64,65: n = A,T,C or G
  misc_feature 66, 67, 68, 69, 70, 71, 72, 73, 74, 75, 76, 77, 78, 79, 80,81, 82, 83, 84, 85, 86, 87, 88, 89, 90, 91, 92, 93, 94,95, 96, 97, 98, 99, 100, 101, 102, 103, 104, 105, 106, 107,108, 109, 110, 111, 112, 113, 114, 115, 116, 117, 118: n = A,T,C or G
  misc_feature 119, 626, 627, 628, 629, 630, 631, 632, 633, 634, 635, 636,637, 638, 639, 640, 641, 642, 643, 644, 645, 646, 647, 648,649, 650, 651, 652, 653, 654, 655, 656, 657, 658, 659, 660,661, 662, 663, 664, 665, 666, 667, 668, 669, 670, 671: n = A,T,C or G
  misc_feature 672, 673, 674, 675, 676, 677, 678, 679, 680, 681, 682, 683,684, 685, 686, 687, 688, 689, 690, 691, 692, 693, 694, 695,696, 697, 698, 699, 700, 701, 702, 703, 704, 705, 706, 707,708, 709, 710, 711, 712, 713, 714, 729, 736: n = A,T,C or G
gnnnnnnnnagacnnnnnnnnnnnnnnnnnnnnnnnnnnnnnnnnnnnnnnnnnnnnnnnnnnnnnnnnnnnnnnnnnnnnnnnnnnnnnnnnnnnnnnnnnnnnnnnnnnnnnnnnnnacctgggattacaggcacccaccaccacgcctggctaatttttttttgtatctttagtagggttttgccatgttggccaggctggtctttaactcctacctcgtgatccacccgcctcggccccccaaagtgctaggaccacaggcgtgagccaccacgcccagccccctgtctctttttttaaaacacaatttaaaagcagaaagaaaaaatctgtgctgtttagactcagattcttaattagctagtatttcttaattcaatcaataaattattaagaccttttcactgctccctttttaaagtcttctttggagtgatttaagtgcttcttattaccaagctctcaaagagaagataaaattaaaatctgatgggtaaccatttaaataagacaactggggtaacccatttctccaggacccctctctgcaacagagagctattctctttctttggcctagtaaacctctgctcttaacctttaaaaaaaaaaaaaaagtaccnnnnnnnnnnnnnnnnnnnnnnnnnnnnnnnnnnnnnnnnnnnnnnnnnnnnnnnnnnnnnnnnnnnnnnnnnnnnnnnnnnnnnnnnncatagtggttcctgngtgaaan

SEQ ID NO: 2545 - DNA, 725 bp, Homo sapiens
  misc_feature 2, 3, 4, 5, 6, 7, 8, 9, 10, 12, 13, 15, 16, 17, 18, 19, 20,21, 22, 23, 24, 25, 26, 27, 28, 29, 30, 31, 32, 33, 34,35, 36, 37, 38, 39, 40, 41, 42, 43, 44, 45, 46, 47, 48,49, 50, 51, 52, 53, 54, 55, 56, 57, 58, 59, 60, 61, 62,63: n = A,T,C or G
  misc_feature 64, 65, 66, 67, 68, 69, 70, 71, 72, 73, 74, 75, 76, 77, 78,79, 80, 81, 82, 83, 84, 85, 86, 87, 88, 89, 90, 91, 92,93, 94, 95, 96, 97, 98, 605, 606, 607, 608, 609, 610, 611,612, 613, 614, 615, 616, 617, 618, 619, 620, 621, 622, 623: n = A,T,C or G
  misc_feature 624, 625, 626, 627, 628, 629, 630, 631, 632, 633, 634, 635,636, 637, 638, 639, 640, 641, 642, 643, 644, 645, 646, 647,648, 649, 650, 651, 652, 653, 654, 655, 656, 657, 658, 659,660, 661, 662, 663, 664, 665, 666, 667, 668, 669, 670: n = A,T,C or G
  misc_feature 671, 672, 673, 674, 675, 676, 677, 678, 679, 680, 681, 682,683, 684, 685, 686, 687, 688, 689, 690, 691, 692, 693, 694,695, 696, 697, 698, 699, 700, 701, 702, 703, 704, 705, 706,707, 708, 709, 710, 711, 712, 713, 714, 715, 716, 717: n = A,T,C or G
gnnnnnnnnnanngnnnnnnnnnnnnnnnnnnnnnnnnnnnnnnnnnnnnnnnnnnnnnnnnnnnnnnnnnnnnnnnnnnnnnnnnnnnnnnnnnnnnacctgggattacaggcacccaccaccacgcctggctaatttttttttgtatctttagtagggttttgccatgttggccaggctggtctttaactcctacctcgtgatccacccgcctcggccccccaaagtgctaggaccacaggcgtgagccaccacgcccagccccctgtctctttttttaaaacacaatttaaaagcagaaagaaaaaatctgtgctgtttagactcagattcttaattagctagtatttcttaattcaatcaataaattattaagaccttttcactgctccctttttaaagtcttctttggagtgatttaagtgcttcttattaccaagctctcaaagagaagataaaattaaaatctgatgggtaaccatttaaataagacaactggggtaacccatttctccaggacccctctctgcaacagagagctattctctttctttggcctagtaaacctctgctcttaacctttaaaaaaaaaaaaaaagtaccnnnnnnnnnnnnnnnnnnnnnnnnnnnnnnnnnnnnnnnnnnnnnnnnnnnnnnnnnnnnnnnnnnnnnnnnnnnnnnnnnnnnnnnnnnnnnnnnnnnnnnnnnnnnnnnnnggtatccg

SEQ ID NO: 2546 - DNA, 474 bp, Homo sapiens
  misc_feature 243, 267: n = A,T,C or G
ccggaaaaaaagaaccatttggatacataggtatggtctgagctatgatatcaattggcttcctagggtttatcgtgtgagcacaccatatatttacagtaggaatagacgtagacacacgagcatatttcacctccgctaccataatcatcgctatccccaccggcgtcaaagtatttagctgactcgccacactccacggaagcaatatgaaatgatctgctgcagtgctctgagccctangattcatctttcttttcaccgtangtggcctgactggcattgtattagcaaactcatcactagacatcgtactacacgacacgtactacgttgtagcccacttccactatgtcctatcaataggagctgtatttgccatcataggaggcttcattcactgatttcccctattctcaggctacaccctagaccaaacctacgccaaaatccatttcactatcatattcatcg

SEQ ID NO: 2547 - DNA, 540 bp, Homo sapiens
cataggtatggtctgagctatgatatcaattggcttcctagggtttatcgtgtgagcacaccatatatttacagtaggaatagacgtagacacacgagcatatttcacctccgctaccataatcatcgctatccccaccggcgtcaaagtatttagctgactcgccacactccacggaagcaatatgaaatgatctgctgcagtgctctgagccctaggattcatctttcttttcaccgtaggtggcctgactggcattgtattagcaaactcatcactagacatcgtactacacgacacgtactacgttgtagcccacttccactatgtcctatcaataggagctgtatttgccatcataggaggcttcattcactgatttcccctattctcaggctacaccctagaccaaacctacgccaaaatccatttcactatcatattcatcggcgtaaatctaactttcttcccacaacactttctcggcctatccggaatgccccgacgttactcggactaccccgatgcatacaccacatg

SEQ ID NO: 2548 - DNA, 587 bp, Homo sapiens
gaccatgagtcatttagaatagtgataaatagaatacacagaatagtgatgaaattcaatttaaaaaatcacgttagcctccaaaccatttaattcaaatgaacccatcaactggatgccaactctggcgaatgtaggacctctgagtggctgtataattgttaattcaaatgaaattcatttaaacagttgacaaactgtcattcaacaattagctccagtaaataacagttatttcatcataaaacagtcccttcaaacacacaattgttctgctgaagagttgtcatcaacaatccaatgctcacctattcagttgctctgtggtcagtgtggctgcatagcagtggattccatgaaaggagtcattttagtgatgagctgccagtccattcccaggccaggctgtcgctggccatccattcagtcgattcagtcataggcgaatctgttctgcccgaggcttgtggtcaagcaaaaattcagccctgaaatcaggcacatctgttcgttggactaaacccacaggttagttcagtcaaagcaggcaacccccttgtgggcactgaccctgccactggggtcat

SEQ ID NO: 2549 - DNA, 622 bp, Homo sapiens
  misc_feature 491, 541, 556, 561, 568, 578, 585: n = A,T,C or G
accatgagtcatttagaatagtgataaatagaatacacagaatagtgatgaaattcaatttaaaaaatcacgttagcctccaaaccatttaattcaaatgaacccatcaactggatgccaactctggcgaatgtaggacctctgagtggctgtataattgttaattcaaatgaaattcatttaaacagttgacaaactgtcattcaacaattagctccagtaaataacagttatttcatcataaaacagtcccttcaaacacacaattgttctgctgaagagttgtcatcaacaatccaatgctcacctattcagttgctctgtggtcagtgtggctgcatagcgtgggattccatgaaaggagtcattttagtggtggagctgccagtccttcccgggccgggtgtcgctgggccatccttcagtcgtttcgtcataggcgatctgttctgcccgagggttgtggtcaggcaaaattcagccctgaattngggcactctgttcgttgggctaaacccccggttagttcagtcaaggcggnaacccccttgtgggnactgncctggcnttggggtctnggcggtntggccgttggggaggtttggccccacggcctctgtgg

SEQ ID NO: 2550 - DNA, 340 bp, Homo sapiens
aaggcaggaatgtcaggcctctgagcccaagccaagccatcgcatcccctgtgacttgcacgtatacacccagatggcctgaagtaactgaagaatcacaaaagaagtgaaaaggccctgccccgcctcaactgatgacattccaccatggtgatttgttcctgccccaccttaactgagtgattaaccctgtgaatttccttctcctggctcagaagctcccccactgagcaccttgtgacccccgcccctgcccaccagagaacaaccccctttgactgtaatttcccatcaccttcccaaatcctataaaacggccccacccctatctccctttgct

SEQ ID NO: 2551 - DNA, 394 bp, Homo sapiens
aaggcaggaatgtcaggcctctgagcccaagccaagccatcgcatcccctgtgacttgcacgtatacacccagatggcctgaagtaactgaagaatcacaaaagaagtgaaaaggccctgccccgcctcaactgatgacattccaccatggtgatttgttcctgccccaccttaactgagtgattaaccctgtgaatttccttctcctggctcagaagctcccccactgagcaccttgtgacccccgcccctgcccaccagagaacaaccccctttgactgtaatttcccatcaccttcccaaatcctataaaacggccccacccctatctccctttgctgactctctttttggactcagcccgcctgcacccaggtgaaataaacagccatgt

SEQ ID NO: 2552 - DNA, 246 bp, Homo sapiens
tagccctgataggcgctattttcctcctggttttgtatttgaaccgcaaggggataaaaaagtggatgcataacatcagagatgcctgcagggatcacatggaagggtatcattacagatatgaaatcaatgcggacccggggattaacaaacctcagttctaactcggatgtctgagaaatattagaggacagaccaaggacaactctgcatgagatgtagacttaagctttatccctactaggc

SEQ ID NO: 2553 - DNA, 336 bp, Homo sapiens
acatatttccttttcctccattggccacaatgggctccaaacaaccacatgcagattttacaaaaagaaagttccaaaactgctcaatcaaaagaaagattcaactctgtgagatgaatacacacatcacaacgaagtttctcagaatgcttctgtgttgtttttatgtgaagatatttccttttccatcataggcctctaagtgcatcaactatccacttgcagattctacaaaaagagtgtttcaaaactgctcaatcaaaagaaagtatcaactctgtgaggaaatgcacacatcacaaagaagtttctcagaatgattctgtgtagttttta

SEQ ID NO: 2554 - DNA, 518 bp, Homo sapiens
cagaagggtctgcaagatgctgttcttggccactttctttcccacctgggaaggcggcatctatgacttcattggggagttcatgaaggccagcgtggatgtgccagacctgataggtctaaaccttgtcatgtcccggaatgccggcaagggagagtacaagatcatggttgctgccctgggctgggccactgctgagcttattatgtcccgctgcattcccctatgggtcggagcccggggcattgagtttgactggaagtacatccagatgagcatagactccaacatcagtctggtccattacatcgtcgcgtctgctcaggtctggatgataacacgctatgatctgtaccacaccttccggccagctgtcctcctgctgatgttcctcagtgtctacaaggcctttgttatggagaccttcgtccacctctgctcgctgggcagttgggcagctctactggcccgagcagtggtaacggggctgctggccctcaacactttggccctgtatg

SEQ ID NO: 2555 - DNA, 326 bp, Homo sapiens
tctgcaagatgctgttcttggccactttctttcccacctgggaaggcggcatctatgacttcattggggagttcatgaaggccagcgtggatgtgccagacctgataggtctaaaccttgtcatgtcccggaatgccggcaagggagagtacaagatcatggttgctgccctgggctgggccactgctgagcttattatgtcccgctgcattcccctatgggtcggagcccggggcattgagtttgactggaagtacatccagatgagcatagactccaacatcagtctggtccattacatcgtcgcgtctgctcaggtctggatg

SEQ ID NO: 2556 - DNA, 331 bp, Homo sapiens
acattgaaaaaagtctagacaaactgaaaggcaataaatcctatgtgaacatggacctctctccggtggtagagtgcatggaccacgctctaacaagtctcttccctaagactcattatgccgctggaaaagatgccaaaattttctggatacctctgtctcacatgccagcagctttgcaagactttttattgttgaaacagaaagcagagctggctaatcccaaggcagtgtgactcagctaaccacaaatgtctcctccaggctatgaaattggccgatttcaagaacacatctccttttcaaccccattccttatctgctccaaccg

SEQ ID NO: 2557 - DNA, 253 bp, Homo sapiens
acagaagggatcgaagacaaattgaagggagagatgatcgatctccaacatggcagccttttccttagaacaccaaagattgtctctggcaaagactctaatgtaactgcaaactccaagctggtcattatcacggctggggcacgtcagcaagagggagaaagccgtcttaatttggtccagcgtaacgtgaacatatttaaattcatcattcctaatgttgtaaaatacagcccgaactgcaagttgctta

SEQ ID NO: 2558 - DNA, 356 bp, Homo sapiens
atcgaagacaaattgaagggagagatgatggatctccaacatggcagccttttccttacaacaccaaagattgtctctggcaaagactataatgtaactgcaaactccaagctggtcattatcacggctggggcacgtcagcaagagggagaaagccgtcttaatttggtccagcgtaacgtgaacatatttaaattcatcattcctaaagttgtaaaatacagcccgaactgcaagttgcttattgtttcaaatccagtggatatcttgacctacgtggcttggaagataagtggttttcccaaaaaccgtgttattggaagaggttgcaatctggattcaacccgattccgcta

SEQ ID NO: 2559 - DNA, 570 bp, Homo sapiens
ccgctgccgccgattccggatctcattgccacgcgcccccgacgaccgcccgacgtgcattcccgattccttttggttccaagtccaatatggcaactctaaaggatcagctgatttataatcttctaaaggaagaacagaccccccagaataagattacagttgttggggttggtgctgttggcatggcctgtgccatcagtatcttaatgaaggacttggcagatgaacttgctcttgttgatgtcatcgaagacaaattgaagggagagatgatggatctccaacatggcagccttttccttagaacaccaaagattgtctctggcaaagactataatgtaactgcaaactccaagctggtcattatcacggctggggcacgtcagcaagagggagaaagccgtcttaatttggtccagcgtaacgtgaacatatttaaattcatcattcctaatgttgtaaaatacagcccgaactgcaagttgcttattgtttcaaatccagtggatatcttgacctacgtggcttggaagataagtggttttcccaaaaaccgtgttattggaa

SEQ ID NO: 2560 - DNA, 223 bp, Homo sapiens
gccgctgccgccgattccggatctcattgccacgcgcccccgacgaccgcccgacgtgcattcccgattccttttggttccaagtccaatatggcaactctaaaggatcagctgatttataatcttctaaaggaagaacagaccccccagaataagattacagttgttggggttggtgctgttggcatggcctgtgccatcagtatcttaatgaaggacttgg

SEQ ID NO: 2561 - DNA, 337 bp, Homo sapiens
gatgcccataagatatgggaagctatgttatcaagccatattagatatcaagcattaatatggaaataaaccagcctgtttggtgggctcttcacatggacgcgcatgaaatttggtgccgtgactaggatcgggggacctcccttgggagatcaatcccctgtcctcctgctctttgctccgtgagaaacatgcacctatggcctcatgttctcaaaccgaccaaaccaagaaacatctcaccaattttaaatccgcctggcttgtgaggccttttgaccccaattcaagtcttttgataccctgtgaattgcacccatactgcccagatggctag

SEQ ID NO: 2562 - DNA, 473 bp, Homo sapiens
aaagatcaaagtgctgggctccggtgcgttcggcacggtgtataagggactctggatcccagaaggtgagaaagttaaaattcccgtcgctatcaaggaattaagagaagcaacatctccgaaagccaacaaggaaatcctcgatgaagcctacgtgatggccagcgtggacaacccccacgtgtgccgcctgctgggcatctgcctcacctccaccgtgcaactcatcacgcagctcatgcccttcggctgcctcctggactatgtccgggaacacaaagacaatattggctcccagtacctgctcaactggtgtgtgcagatcgcaaagggcatgaactacttggaggaccgtcgcttggtgcaccgcgacctggcagccaggaacgtactggtgaaaacaccgcagcatgtcaagatcacagattttgggctggccaaactgctgggtgcggaagagaaagaataccatg

SEQ ID NO: 2563 - DNA, 487 bp, Homo sapiens
  misc_feature 7: n = A,T,C or G
actatcncccaggacatgggaccatgctcagctggttgctatcaagaccttgaaagactataacaacccccagcaatggatggaatttcaacaagaagcctccctaatggcagaactgcaccaccccaatattgtctgccttctaggtgccgtcactcaggaacaacctgtgtgcatgctttttgagtatattaatcagggggatctccatgagttcctcatcatgagatccccacactctgatgttggctgcagcagtgatgaagatgggactgtgaaatccagcctggaccacggagattttctgcacattgcaattcagattgcagctggcatggaatacctgtctagtcacttctttgtccacaaggaccttggcagctcgcaatattttaatcggagaggcaactttcatgttaaaggttttcaggacttgggggctttccagaggaaattttactccgctgatttactacagggtacccaa

SEQ ID NO: 2564 - DNA, 532 bp, Homo sapiens
atagaagtctgggaaaaaaataaaaacagaatttgagaaccttggaccactcctgtccctgtagctcagtcatcaaagcagaagtctggctttgctctattaagattggaaatgtacactaccaaacactcagtccactgttgagccccagtgctggaagggaggaaggcctttcttctgtgttaattgcgtaaaggctacaggggttagcctggactaaaggcatccttgtcttttgagctattcacctcagtagaaaaggatctaagggaagatcactgtagtttagttctgttgacctgtgcacctaccccttggaaatgtctgctggtatttctaattccacaggtcatcagatgcctgcttgataatatataaacaataaaaacaaccttcacttcttcctattgtaatcgtgtgccatggatctgatctgtaccatgaccctacataaggctggatggcaccccaggctgagggccccaatgtatgtgtggctgtgggtgtgggtgggagtgtgtctgctgagtaa

SEQ ID NO: 2565 - DNA, 608 bp, Homo sapiens; identical to SEQ ID NO: 1340

SEQ ID NO: 2566 - DNA, 480 bp, Homo sapiens
tagatgacactgatgattctcaccagtcttatgagtctcaccattctgatgaatctgatgaactggtcactgattttcccacggacctgccagcaaccgaagttttcactccagttgtccccacagtagacacatatgatggccgaggtgatagtgtggtttatggactgaggtcaaaatctaagaagtttcgcagacctgacatccagtaccctgatgctacagacgaggacatcacctcacacatggaaagcgaggagttgaatggtgcatacaaggccatccccgttgcccaggacctgaacgcgccttctgattgggacagccgtgggaaggacagttatgaaacgagtcagctggatgaccagagtgctgaaacccacagccacaagcagtccagattatataagcggaaagccaatgatgagagcaatgagcattccgatgtgattgatagtcaggaactttccaaagtcagcc

SEQ ID NO: 2567 - DNA, 440 bp, Homo sapiens
aggagatccggcagatgggcactgagtgccattacttcatctgtgatgtgggcaaccgggaggaggtgtaccagacggccaaggccgtccgggagaaggtgggtgacatcaccatcctggtgaacaatgccgccgtggtccatgggaagggcctaatggacagtgatgatgatgccctcctcaagtcccaacacatcaacaccctgggccagttctggaccaccaaggccttcctgccgcgtatgctggagctgcagaatggccacatcgtgtgcctcaactccgtgctggcactgtctgccatccccggtgccatcgactaccgcacatccaaagcgtcagccttcgccttcatggagagcctgaccctggggctgctggactgtccgggagtcagcgccaccacagtgctgcccttccacaccagcaccgagatgttc

SEQ ID NO: 2568 - DNA, 589 bp, Homo sapiens
ggcactgagtgccattacttcatctgtgatgtgggcaaccgggaggaggtgtaccagacggccaaggccgtccgggagaaggtgggtgacatcaccatcctggtgaacaatgccgccgtggtccatgggaagggcctaatggacagtgatgatgatgccctcctcaagtcccaacacatcaacaccctgggccagttctggaccaccaaggccttcctgccgcgtatgctggagctgcagaatggccacatcgtgtgcctcaactccgtgctggcactgtctgccatccccggtgccatcgactaccgcacatccaaagcgtcagccttcgccttcatggagagcctgaccctggggctgctggactgtccgggagtcagcgccaccacagtgctgcccttccacaccagcaccgagatgttccagggcatgagagtcaggtttcccaacctctttcccccactgaagccggagacggtggcccggaggacagtggaagctgtgcagctcaaccaggccctcctcctcctcccatggacaatgcatgccctcgttatcttgaaaagcatacttccacaggctgcactcg

SEQ ID NO: 2569 - DNA, 313 bp, Homo sapiens
gcatattgtgctcggggaagggttcttgtcattgtgggaagtgcatttgttctgctgaagagtggtatatttctggggagttctgtgactgtgatgacagagactgcgacaaacatgatggtctcatttgtacagggaatggaatatgtagctgtggaaactgtgaatgctgggatggatggaatggaaatgcatgtgaaatctggcttggctcagaatatccttaacaattacatgagagaggtctggattcttattttttctgggccattagaacatataaatgcgaaggaaaccatgtatattcaccact

SEQ ID NO: 2570 - DNA, 223 bp, Homo sapiens
tgtgaatcagcagatggcatattgtgctcggggaagggttcttgtcattgtgggaagtgcatttgttctgctgaagagtggtatatttctggggagttctgtgactgtgatgacagagactgcgacaaacatgatggtctcatttgtacagggaatggaatatgtagctgtggaaactgtgaatgctgggatggatggaatggaaatgcatgtgaaatctggc

SEQ ID NO: 2571 - DNA, 424 bp, Homo sapiens
ggtacagatttagagcctgtaatcccagctacttgggagtctaaggcaagagaatcccttgaacctgggaggtggagattgcagtgagctgagatcacaccattgccctacagcctgggtgacagtgagactgccccaagaaaaaacaaaagagacagccctagtgatcttgtaagttgcctttggtgggtcagtctttccttttcttaaagaatagtacacattgacagccaggtagctctatgatcctgttctatagaattcaaaaagtcgacaaccttcctttgttcctttctgttttctctgcctacgttagtttaaattggcagtgtctctgctggaataatcccatctctcttcctggcttctgctgagatggctgattaaatccttgggtcacacccattatctctttatcaaatgg

SEQ ID NO: 2572 - DNA, 487 bp, Homo sapiens
ctgtaatcccagctacttgggagtctaaggcaagagaatcccttgaacctgggaggtggagattgcagtgagctgagatcacaccattgccctacagcctgggtgacagtgagactgccccaagaaaaaacaaaagagacagccctagtgatcttgtaagttgcctttggtgggtcagtctttccttttcttaaagaatagtacacattgacagccaggtagctctatgatcctgttctatagaattcaaaaagtcgacaaccttcctttgttcctttctgttttctctgcctacgttagtttaaattggcagtgtctctgctggaataatcccatctctcttcctggcttctgctgagatggctgattaaatccttgggtcacacccattatctctttatcaaatggttgttcaggctaggctcagtgtttcacgcctgtaatcccaacactttgggagactgaggagggcagatcacttgagctc

SEQ ID NO: 2573 - DNA, 492 bp, Homo sapiens
agtcgcgcaccgacgctcaaacgcgcgctccaacccgcagcctcctcctgcctcaccgcccgaagatggcggctctcaaactcctctcctccgggcttcggctctgcgcctctgcccgcggatctggggcaacctggtacaagggatgtgtttgttccttttccaccagtgctcatcgccataccaagttttatacagatccagtagaagctgtaaaagacatccctgatggtgccacggttttggttggtggttttgggctatgtggaattccagagaatcttatagatgctttactgaaaactggagtaaaaggactaactgcagtcagcaacaatgcaggggttgacaattttggtttggggcttttgcttcggtccaagcagataaaacgcatggtctcttcatatgtgggagaaaatgcagaatttgaacgacagtacttatctggtgaattagaagtggagctgacaccacagggcacacttgctg

SEQ ID NO: 2574 - DNA, 494 bp, Homo sapiens
tttttttttttttttttttctccctttataaggcgatgtacataaatctgaggaatatggatgtcttctggagcaaatgctccaatatccacaatttcttcaacctctaccactgtggtttctgcagctttgcacattggcaagttgaaattccttgcacttttcctgaaaatcacgtttcctgctcggtccgccttccaggctttcaccaaagcaaaatcccctgtaattgcttcctccaaaataaagtgctgaccattgaactccctcacctctcttggcttattggcaatggcaacactgccatctttgttgtatttgatgggcgatcctccttcttgtaccagggtcccataccctgttggggtgtaaaatgcaggaactccagccccgcctgcacggatcctctcagcaagtgtgccctgtggtgtcagctccacttctaattcaccagataagtactgtcgttcaaattctgcattttctcccacata

SEQ ID NO: 2575 - DNA, 462 bp, Homo sapiens
catgatgtattacaaggaggccttctggaagaagaaggattactgtggctgcatgatcattgaagatgaagatgctccaatttcaataaccttggatgacaccaagccagatgggtcactgcctgccatcatgggctttattcttgcccggaaagctggtcgacttgctaagctacataaggaaataaggaagaagaaaatctgtgagctctatgccaaagtgctgggatcccaagaagctttacatccagtgcattatgaagagaagaactggtgtgaggagcagtactctgggggctgctacacggcctacttccctcctgggatcatgactcaatatggaagggtgattcgtcaacccgtgggcaggattttctttgcgggcacagagactgccacaaagtggagcggctacatggaaggggcagttgaggctggagaacgagcagctagggaggtctt

SEQ ID NO: 2576 - DNA, 626 bp, Homo sapiens
catgatgtattacaaggaggccttctggaagaagaaggattactgtggctgctgatcattgaaaatgaagatgctcaatttcaataaccttggatgacaccaagccagatgggtcactgcctgccatcatgggcttcattcttgcccggaaagctggtcgacttgctaagctacataaggaaataaggaagaagaaaatctgtgagctctatgccaaagtgctgggatcccaagaagctttacatccagtgcattatgaagagaagaactggtgtgaggagcagtactctgggggctgctacacggcctacttccctcctgggatcatgactcaatatggaagggtgattcgtcaacccgtgggcaggattttctttgcgggcacagagactgccacaaagtggagcggctacatggaaggggcagttgaggctggagaacgagcagctagggaggtcttaaatggtctcgggaaggtgaccgagaaagacatctgggtacaagaacctgaatcaaaggacgttccagcggtagaaatcacccacaccttctgggaaaggaacctgccctctgtttctggcctgctgaagatcattggatttccacatcagtaactgccctggggc

SEQ ID NO: 2577 - DNA, 348 bp, Homo sapiens
tggtgaactggtcatccatgaaaaagggttttactacatctattcccaaacatactttcgatttcaggaggaaataaaagaaaacacaaagaacgacaaacaaatggtccaatatatttacaaatacacaagttatcctgaccctatattgttgatgaaaagtgctagaaatagttgttggtctaaagatgcagaatatggactctattccatctatcaagggggaatatttgagcttaaggaaaatgacagaatttttgtttctgtaacaaatgagcacttgatagacatggaccatgaagccagttttttcggggcctttttagttggctaactgacctggaaaga

SEQ ID NO: 2578 - DNA, 207 bp, Homo sapiens
  misc_feature 122, 123: n = A,T,C or G
tcaactcagtggaacacggttctcccaaacagattttgtaattccgaaaaccacgcatgcgcaaacatacgcatacactcccatgttcctggacagtttatagctaccataacctggcattnnccaaaacataccatggtagactcttggatacacaaggtaattttagagccacattaggatgaaccttctgaaaaagttatgcat

SEQ ID NO: 2579 - DNA, 497 bp, Homo sapiens; identical to SEQ ID NO: 631

SEQ ID NO: 2580 - DNA, 275 bp, Homo sapiens
  misc_feature 96: n = A,T,C or G
tgagcttaaggaaaatgacagaatttttgtttctgtaacaaatgagcacttgatagacatggaccatgaagccagttttttcggggcctttttagntggctaactgaccctggaaagaaaaagcaataacctcaaagtgactattcagttttcaggatgatacactatgaagatgtttcaaaaaatctgaccaaaacaaacaaacagaaaacagaaaacaaaaaaacctctatgcaatctgagtagagcagccacaaccaaaaaattctacaaca

SEQ ID NO: 2581 - DNA, 530 bp, Homo sapiens; identical to SEQ ID NO: 1042

SEQ ID NO: 2582 - DNA, 341 bp, Homo sapiens
gcctctccgccccgcgtccagctcgcccagctcgcccagcgtccgccgcgcctcggccaaggcttcaacggaccacaccaaaatgccatctcaaatggaacacgccatggaaaccatgatgtttacatttcacaaattcgctggggataaaggctacttaacaaaggaggacctgagagtactcatggaaaaggagttccctggatttttggaaaatcaaaaagaccctctggctgtggacaaaataatgaaggacctggaccagtgtagagatggcaaagtgggcttccagagcttcttttccctaattgcgggcctcaccattgcatgtaatgactatt

SEQ ID NO: 2583 - DNA, 350 bp, Homo sapiens; identical to SEQ ID NO: 998

SEQ ID NO: 2584 - DNA, 171 bp, Homo sapiens
acagaagggacaaagagatctggacagaatcgccggacaggtggcagctgccaacaagaagcattagaacaaaccatgctgggttaataaattgcctcattcgtaaacaaaaaaaaaaaaaaaaaaaaaaagttttttttttttccccccattttttattttttttccccc

SEQ ID NO: 2585 - DNA, 389 bp, Homo sapiens
tggcgctgtgttctatggaggaaaacaaagcaggagaggggagagtgactgctgggtaaggtcttcctccacctcctttgcatctttgctcacatgccagcttctcctgggcttcacagaccaccaatttataatttccatttaaaacttccattttatttttttaatttttatttatttatttatttattacgagatggggtttcgctcttgttgcccaagattgcaccactgcactgcagcctgggtgacagagcgagactttgtcaaaaagaaagaaagaaagaaggaaaggaaggaaggaaggaaggaaggaaggaaaagaaaagaaagggaaagaaaaaagaaaaagaaagaaagaaagaaaaaaaaaaaaaaggggggccccc

SEQ ID NO: 2586 - DNA, 430 bp, Homo sapiens
tgcagatacagtggtggagtggaagtttgcgttggtagagaatgggggagttacccgctgggaagaatgcagcaatagattcctagaaactggccatgaggataaagtggttcacgcatggtgggggattcactgattcagtttgcatagtaatggagaagctgtagaacaatgtggaagaagctgaggttgtggaacacactgaataaaataaaggcagtgtgactccaaattcagccatctgaattgtttaaatttgctagtggattttgtctactgtgcagaaatatatatgtctaatgtgcagaaatatatatgtgtgtatgtgtgtatatatatgcacacacacacagataatgcttccagtgaatgtgaacttcttttccctgtggcactgattgacagacttgtgctgatccattattacttt

SEQ ID NO: 2587 - DNA, 556 bp, Homo sapiens
ttttttttttttttttttttttttttttaagatattaaaattcaggttttattatttgttcagttataataatttaagttaatatttgctgtattctcagagcaaagatgtatttctgtaccactgtcctgtataaatttgttacccaagatagtgactggtatgaaaggagagggaagagggtgacagatggaaacgattgctgtaggacagtccatctggccagatgcggtgggggaggggagaagaagtgggagagagatggtcctacagatgctcccatgggtaaatgatgggtgcatccctccctgcagtcgggctgtgcctgaacttcacagtcctctaagaggtgtcattcaggccacctcactcagcctatgcccaaccccactcactttccctttccttatgggctgcccccgcaactgacttccatggtgattggttctcattaggccctttgtttctacaccagccttagatcattaagacaaagacgtacttgctaccctcatagcacataacaacgcctggcagatgaaaatcaaacaaaaag

SEQ ID NO: 2588 - DNA, 543 bp, Homo sapiens
tgcagtggacatgtcgggcgggacggtcacagtccttgaaaagtccctgtatcaaaaggccaactgaagcaatacttctacgagaccaagtgcaatcccatgggttacacaaaagaaggctgcaggggcatagacaaaaggcattggaactcccagtgccgaactacccagtcgtacgtgcgggcccttaccatggatagcaaaaagagaattggctggcgattcataaggatagacacttcttgtgtatgtacattgaccattaaaaggggaagatagtggatttatgttgtatagattagattatattgagacaaaaattatctatttgtatatatacataacagggtaaattattcagttaagaaaaaaataattttatgaactgcatgtataaatgaagtttatacagtacagtggttctacaatctatttattggacatgtccatgaccagaagggaaacagtcatttgcgcacaacttaaaaagtctgcattacattccttgataatgttgtggtttgttgccgttgccaagaactg

SEQ ID NO: 2589 - DNA, 242 bp, Homo sapiens
cggcggcagacaaaaagactgcagtggacatgtcgggcgggacggtcacagtccttgaaaaggtccctgtatcaaaaggccaactgaagcaatacttctacgagaccaagtgcaatcccatgggttacacaaaagaaggctgcaggggcatagacaaaaggcattggaactcccagtgccgaactacccagtcgtacgtgcgggcccttaccatggatagcaaaaagagaattggctggcga

SEQ ID NO: 2590 - DNA, 350 bp, Homo sapiens
tttttttttttttttttttttctttttttttttttttttttttattattaattatcttctttattaatactcacatgtaacctttgctttttacacaaaagtctgctttagaagaatgcctcctcggcttatcatgcccaatggggctttttgtttctggaccacttcccctttctccacccccacccccacatccaaattactcttaacatgttcacagataccacgaatattttgtaaacaagatttgggttactggaacttgatttcattaacatcccacttcaaaatggaaggcaggtggaggacagggtaagaaataggagaaagaggacaagagaaggcaaaga

SEQ ID NO: 2591 - DNA, 448 bp, Homo sapiens
acagtttaagaagtggtgacattttgcatgatgaatgacctgacttttagccaccaggtactctttaaacagttttccttatcagaggccctcctgtgctggtgacccagcatctgagttaggttccagcatgtaaagagctgggagggcggagaattcttagcatacattcagacgttttttctgcacaataataagtccatctgtcacttgcattccactttttgttacatagaaagagtctgaccctttaatccaaaaggtctttttacattgtgaatgctgtgggaaggcaatttctctgcacacaagaggctacgttttggaagtgatgtatgttatttgatgactgaaaatgaactgtaaatgctcctagagtatattcctctgctgaacaaaattaaacttcaaaaaaatctaacagtaacacacccctgcttgggaccct

SEQ ID NO: 2592 - DNA, 586 bp, Homo sapiens
aatttacagaacagtttaagaagtggtgacattttgcatgatgaatgacctgacttttagccaccaggtactctttaaacagttttccttatcagaggccctcctgtgctggtgacccagcatctgagttaggttccagcatgtaaagagctgggagggcggagaattcttagcatacattcagacgttttttctgcacaataataagtccatctgtcacttgcattccactttttgttacatagaaagagtctgaccctttaatccaaaaggtctttttacattgtgaatgctgtgggaaggcaatttctctgcacacaagaggctacgttttggaagtgatgtatgttatttgatgactgaaaatgaactgtaaatgctcctagagtatattcctctgctgaacaaaattaaacttcaaaaaaatctaacagtaacacacccctgcttgggaccctagctatatgcattttatgtgaccttgccatgcttcagtgaacatactaattctatgtctagcacatgttgatttcctatgtattctgggtattctattaaaggaaactttgaactatgtcaaaaaaaa

SEQ ID NO: 2593 - DNA, 203 bp, Homo sapiens
aatgaatttacagaacagtttaagaagtggtgacattttgcatgatgaatgacctgacttttagccaccaggtactctttaaacagttttccttatcagaggccctcctgtgctggtgacccagcatctgagttaggttccagcatgtaaagagctgggagggcggagaattcttagcatacattcagacgttttttctgcac

SEQ ID NO: 2594 - DNA, 548 bp, Homo sapiens
tgctggaaggcattcgcatctgccggcgagggcttccgcaaccggatcgtcttccaggagttccgccaacgctacgagatcctggcggcgaatgccatccccaaaggcttcatggacgggaagcaggcctgcattctcatgatcaaagccctggaacttgaccccaacttatacaggatagggcagagcaaaatcttcttccgaactggcgtcctggcccacctagaggaggagcgagatttgaagatcaccgatgtcatcatggccttccaggcgatgtgtcgtggctacttggccagaaaggcttttgccaagaggcagcagcagctgaccgccatgaaggtgattcagaggaactgcgctgcctacctcaagctgcggaactggcagtggtggaggcttttcaccaaagtgaagccactgctgcaggtgacacggcaggaggaggagatgcaagccaaggaggatgaactgcagaagaccaaggagcggcagcagaaggcagagaatgagcttaaggagctggaacagaagcactcgcagctgac

SEQ ID NO: 2595 - DNA, 595 bp, Homo sapiens; identical to SEQ ID NO: 1208

SEQ ID NO: 2596 - DNA, 498 bp, Homo sapiens
tgacagagcaagacttggtttcaaaaaagagaaacacagttggccctccatatctgagtttcacagacgaaaaatattcagaagaaaaaaaaatcaatggctgtatttgtactaaacatgcccaggctttttttcttattgttatcccctaaacaatacaacaactatttttatagcatttacattgtattagatgttataactactctaaagaggatttaaagtatatggaatgatgtgcataggttatatgcaaatactatactatttatatcagggacttgagcatccttggattttggtatgtgtgggaggtcctgaaaccaatgtcctgtggatactgaaggataactgtactaatttggagatttctctctactatgatcaagattttcaaacattacattgctgattacattacatcgttacattgtgattctttccaagacttgagataaagtttgggaagaagtaccacttgtttcagtttatgaaata

SEQ ID NO: 2597 - DNA, 510 bp, Homo sapiens; identical to SEQ ID NO: 1264

SEQ ID NO: 2598 - DNA, 299 bp, Homo sapiens
tggatcccccgggctgcaggaattcggcacgagcagaagtgcctgagacgcggagacatggctggtgttaaatggagctattcaatagcagtgacgcgctctcctcagccaccaaatgtccctgacaccctccccagcccccacagataacatcagctgaggtttttttcagtatgaacctgtcctaaatcaattcctcaaagtgtgcacaaaactaaagaatataaataaacaaaagaaaggtgaaaaaaaaaaaaaaaaaaaaaactcgggggggggcccgggccccaattccccct

SEQ ID NO: 2599 - DNA, 234 bp, Homo sapiens
  misc_feature 163, 189, 219, 222, 225, 226, 228, 233: n = A,T,C or G
cagaagtgcctgagacgcggagacatggctggtgttaaatggagctattcaatagcagtgacgcgctctcctcagccaccaaatgtccctgacaccctccccagcccccacagataacatcagctgaggtttttttcagtatgaacctgtcctaaatcaattnctcaaagtgtgcacaaaactaaagantataaataaacaaaagaaaggtgaaaaaanaanaannanaaaana

SEQ ID NO: 2600 - DNA, 534 bp, Homo sapiens
tgaagcagaagtacctggactatgccagagtccccaatagcaatccccctgaatatgagttcttctggggcctgcgctcttactatgagaccagcaagatgaaagtcctcaagtttgcctgcaaggtacaaaagaaggatcccaaggaatgggcagctcagtaccgagaggcgatggaagcagatttgagggctgcagctgaggctgcagctgaagccaaggctagggccgagattagagctcgaatgggcattgggctcggctcggagaatgctgccgggccctgcaactgggacgaagctgatatcggaccctgggccaaagcccggatccaggcgggagcagaagctaaagccaaagcccaagagagtggcagtgccagcactggtgccagtaccagtaccaataacagtgccagtgccagtgccagcaccagtggtggcttcagtgctggtgccagcctgaccgccactctcacatttgggctcttcgctggccttggtggagctggtgccagcaccagtggcagctctg

SEQ ID NO: 2601 - DNA, 351 bp, Homo sapiens
tttttttttttttttttttttttctgaaatggcaaatagatttaatgcagagtgtcaacttcaattgattgatagtggctgcctagagtgctgtgttgagtaggtttctgaggatgcaccctggcttgaagagaaagactggcaggattaacaatatctaaaatctcacttgtaggagaaaccacaggcaccagagctgccactggtgctggcaccagctccaccaaggccagcgaagagcccaaatgtgagagtggcggtcaggctggcaccagcactgaagccaccactggtgctggcactggcactggcactgttattggtactggtactggcaccagtgctggcact

SEQ ID NO: 2602 - DNA, 610 bp, Homo sapiens
tttatgaatgataaagatgtttccggaaagatgaacaggtcacaatttgaagaactctgtgctgaacttctgcaaaagatagaagtacccctttattcactgttggaacaaactcatctcaaagtagaagatgtgagtgcagttgagattgttggaggcactacacgaattccagctgtgaaggaaagaattgccaaattctttggaaaagatattagcacaacactcaatgcagatgaagcagtagccagaggatgtgcattacagtgtgcaatactttccccggcatttaaagttagagaattttccgtcacagatgcagttccttttccaatatctctgatctggaaccatgattcagaagatactgaaggtgttcatgaagtctttagtcgaaaccatgctgctcctttctccaaagttctcacctttctgagaagggggccttttgagctagaagctttctattctgatccccaaggagttccatatccagaagcaaaaataggccgctttgtagttcagaatgtttctgcacagaaagatggagaaaaatctagagtaaaagtcaaagtgcgagtcaacacccatggcattttcaccatctcta

SEQ ID NO: 2603 - DNA, 551 bp, Homo sapiens
tttttttttttttttttttttagcattatcatcttaccctctgtctcaatatacatgttaagaaggtctttccctaactgccagaccaagttggcttcaataggcagctcaacattcaccacctttattttgggctttttagcttctggaggctggtcaacttttttttcatttgctttgtcagcatctgggattttgttttcttctgaggtaagttcaggtgaagggggagactgtgaggtttgttgagcatcagtttgtacctggggctgtgttccagcttcactgttgtcttgctggacatttttatcagtgtctgggttttctggtggtctctgattcagacactccatgtcagcttcagaagacatttcattctcctcagttgggactttctccaccatagatgccgtagagatggtgaaaatgccatgggtgttgactcgcactttgacttttactctagatttttctccatctttctgtgcagaaacattctgaactacaaagcggcctatttttgcttctggatatggaactccttggggatc

SEQ ID NO: 2604 - DNA, 550 bp, Homo sapiens; identical to SEQ ID NO: 424

SEQ ID NO: 2605 - DNA, 300 bp, Homo sapiens
ctaagctttaagatttaaaaaatgttcaatgttgaaatttctgtggggctctatttttgctttggctttctggtgagagagtgaggaagcattctttccttcactaagtttgtctttcttgtcttctggatagattgattttaagagactaagggaatttacaaactaaagattttagtcatctggtggaaaaggagactttaagattgtttagggctgggcggggtgactcacatctgtaatcccagcactttgggaggccaaggcaggcagaacacttgaaggagttcaagaccagcg

SEQ ID NO: 2606 - DNA, 583 bp, Homo sapiens; identical to SEQ ID NO: 1532

SEQ ID NO: 2607 - DNA, 517 bp, Homo sapiens
cccggaaggcgacgggaaggagccgagcttgggtcatggcggcgccgggcgcgctgctggtgatgggcgtgagcggctcggggaaatccaccgtgggcgccctgctggcatctgagctgggatggaaattctatgatgctgatgattatcacccggaggaaaatcgaaggaagatgggaaaaggcataccgctcaatgaccaggaccggattccatggctctgtaacttgcatgacattttactaagagatgtagcctcgggacagcgtgtggttctagcctgttcagccctgaagaaaacgtacagagacatattaacacaaggaaaagatggtgtagctctgaagtgtgaggagtcgggaaaggaagcaaagcaggctgagatgcagctcctggtggtccatctgagcgggtcgtttgaggtcatctctggacgcttactcaaaagagagggacattttatgccccctgaattattgcagtcccagtttgagactctggagcccccagcagctcc

SEQ ID NO: 2608 - DNA, 590 bp, Homo sapiens
ttttttttttttttttttttttttttactagcgaagtttcatttatttgtgcaaatacaggcatgagcaagaatgttctaaacaatgtaacgatttccagcattgattacagaatttcctctgatcatttgatttggttatagatgaatttaaacttcaatttaagcttgacttttaaaactccccctctgcttcctgatgaaccagcataattcctaaaattacacctaaacaagtctgtcttgacacattggggtttgcctttagaaacatttagaatctattatgggcaaggcggctggaacgaggtttgggatggcacaatgatttatgcttagttctgtttggaccactgatacaaaatcattgtcatttcatttttagggtttccataattgtagcaattatctctgaaacatttttgtccacacttatttggataaagttttctggagctgctgggggctccagagtctcaaactgggactgcaataattcagggggcataaaatgtccctctcttttgagtaagcgtccagagatgacctcaaacgacccgctcagatggaccaccaggagctgcatctcag

SEQ ID NO: 2609 - DNA, 116 bp, Homo sapiens
gacacttacaaattgctgcttgtccaaatcaggatccactgcaaggaacaacaggccttattccactgctggggattggtgtgtgggagcacgcttactaccttcagtataaaaat

SEQ ID NO: 2610 - DNA, 574 bp, Homo sapiens
ttcttttttttttttttttttttgcacaaagcatttactattttcaatcacttgcccaataacaaaatgtttagtaagaaattattcagaacattaagttgtttatgaaataagtgactaagcaacatcaagaaatgctacaatagagcagcttactgtattctgcagtactctataccactacaaaaacagtcataaagagcttaacatactcagcataacgatcgtggtctactttttgcaagccatgtatctttcagttacattctcccagttgattacattccaaatagcttttagataatcaggcctgacatttttatactgaaggtagtaagcgtgctcccacacaccaatccccagcagtggaataaggcctgttgttccttgcagtggatcctgatttggacaagcagcaatttgtaagtgtccccgttccttattgaaaccaagccaaccccaacctgagccttggacaccaacagatgcagccgtcagcttctccttaaacttgtcaaaggaaccaaagtcacgtttgatggcttccagcaactcccctttgggttctccacca

SEQ ID NO: 2611 - DNA, 474 bp, Homo sapiens
ttttttttttttttttttttttgggggggtgacagattcttttattaacagtcaaaaacttcacacaattggaaaataaatgtttcttcaatgaataatcaaacaaaaattatccaggaccttatagggttttcagtatgtaccaggcttgatgcacatcttagaagacaggacattatcttgctgggatcattagggtatgatcagcataacgatcgtggtttactttttgcaagccatgtatctttcagttacattctcccagttgattacattccaaatagcttttagataatcaggcctgacatttttatactgaaggtagtaagcgtgctcccacacatcaatccccagcagtggaataaggcctgttgttccttgcagtggatcctgatttggacaagcagcaatttgtaagtgtccccgttccttattgaaaccaagccaaccccaacctgagccttggacaccaac

SEQ ID NO: 2612 - DNA, 526 bp, Homo sapiens
gggaacccggggcgcggcgcactgcgcaggcggccggactccgctcagtttccggtgcggcgaacaccaaagtccgggaacttaagcattttcggtttctagggttgttacgaagctgcaggagcgagatggaggtggacgcaccgggtgttgatggtcgagatggtctccgggagcggcgaggctttagcgagggagggaggcagaacttcgatgtgaggcctcagtctggggcaaatgggcttcccaaacactcctactggttggacctctggcttttcatccttttcgatgtggtggtgtttctctttgtgtattttttgccatgacttgttcgctgatatctaaattaagaagttggttcttgagtgaattctgaaaatggctacaaacttcttgaataaagaagacaggactctcaatagaagaatttcacatctccaagggacccttcctttcattttacactttgttactaatttgcagaactctattaattgggtaggatttcacccattcctagcta

SEQ ID NO: 2613 - DNA, 344 bp, Homo sapiens
gaacccggggcgcggcgcactgcgcatgcggccggactccgctcagtttccggtgcggcgaacaccaaagtccgggaacttaagcattttcggtttctagggttgttacgaagctgcaggagcgagatggaggtggacgcaccgggtgttgatggtcgagatggtctccgggagcggcgaggctttagcgagggagggaggcagaacttcgatgtgaggcctcagtctggggcaaatgggcttcccaaacactcctactggttggacctctggcttttcatccttttcgatgggggggagcttctctctgtgtatttctcgccatgacctgttcagtgacaccc

SEQ ID NO: 2614 - DNA, 332 bp, Homo sapiens
gaacccggggcgcggcgcactgcgcaggcggccggactccgctcagtttccggtgcggcgaacaccaaagtccgggaacttaagcattttcggtttctagggttgttacgaagctgcaggagcgagatggaggtggacgcaccgggtgttgatggtcgagatggtctccgggagcggcgaggctttagcgagggagggaggcagaacttcgatgtgaggcctcagtctggggcaaatgggcttcccaaacactcctactggttggacctctggcttttcatccttttcgatgtggaggagattctctttgtgtattttttgccatgacttgt

SEQ ID NO: 2615 - DNA, 545 bp, Homo sapiens
cggctgcgagaagacgacagaaggggagtttccggtgcggcgaacaccaaagtccgggaacttaagcattttcggtttctagggttgttacgaagctgcaggagcgagatggaggtggacgcaccgggtgttgatggtcgagatggtctccgggagcggcgaggctttagcgagggagggaggcagaacttcgatgtgaggcctcagtctggggcaaatgggcttcccaaacactcctactggttggacctctggcttttcatccttttcgatgtggtggtgtttctctttgtgtattttttgccatgacttgttcgctgatatctaaattaagaagttggttcttgagtgaattctgaaaatggctacaaacttcttgaataaagaagacaggactctcaatagaagaatttcacatctccaagggacccttcctttcattttacactttgttactaatttgcagaactctattaattgggtaggatttcacccattcctagctaagttcttaaaattaaaccctttggttcgtgtttaaaaac

SEQ ID NO: 2616 - DNA, 329 bp, Homo sapiens
gagtttccggtgcggcgaacaccaaagtccgggaacttaagcattttcggtttctagggttgttacgaagctgcaggagcgagatggaggtggacgcaccgggtgttgatggtcgagatggtctccgggagcggcgaggctttagcgagggagggaggcagaacttcgatgtgaggcctcagtctggggcaaatgggcttcccaaacactcctactggttggacctctggcttttcatccttttcgatgaggaggtgtttctctttgtgtattttttgccatgacttgttcgctgatatctaaatttacaagttggatcttgagtgaaa

SEQ ID NO: 2617 - DNA, 284 bp, Homo sapiens
gcgcggcgcctcgcctcggccggcgcctatcagccgacttagaactggtgcggaccaggggaatccgactgtttaattaaaacaaagcatcgcgaaggcccgcggcgggtgttgacgcgatgtgatttctgcccagtgctctgaatgccatattaaaaataaactttaaaatttaaaagggggccgtttttctctgattcccaccccgttaaaaacccttttggggggggggccccccccccctcatggggcggggaaaaaaggccttttttgggaaatttggg

SEQ ID NO: 2618 - DNA, 522 bp, Homo sapiens; identical to SEQ ID NO: 1160

SEQ ID NO: 2619 - DNA, 510 bp, Homo sapiens
gttgcaggtcactgtagcgggacttcttttggttttctttctctttggggcacctctggactcactccccagcatgaaggcgctgagcccggtgcgcggctgctacgaggcggtgtgctgcctgtcggaacgcagtctggccatcgcccggggccgagggaagggcccggcagctgaggagccgctgagcttgctggacgacatgaaccactgctactcccgcctgcgggaactggtacccggagtcccgagaggcactcagcttagccaggtggaaatcctacagcgcgtcatcgactacattctcgacctgcaggtagtcctggccgagccagcccctggaccccctgatggcccccaccttcccatccagacagccgagcccgctccggaacttgtcatctccaacgacaaaaggagcttttgccactgactcggccgtgtcctgacacctccagaacgcaggtgctggcgcccgttctgcctgggaccccgggaacctctcctgcc

SEQ ID NO: 2620 - DNA, 385 bp, Homo sapiens
aatagtctgtgtccaagaaaataagaatcacgtcatctagctgtggacactgagcaaaaaggagcagcatgctattaagatggttgagacacacgagtgaacaaagatgggacaaactgtgcttcgttcaagaagtttcatcaagacccctaccgccccccgtccttcagctctgtacagtaactttagctttacatagagctgagataaaaataaagctttcttacaaattacatttttttccagtgaattacttttgcagtaaaaatagctgctacataaatccctcctgatctctgaaaaggagttgcatatttccaaaaataatattcttattttaatcacacagaagaacgtggagcacaggaaggaaatggctggctgg

SEQ ID NO: 2621 - DNA, 645 bp, Homo sapiens; identical to SEQ ID NO: 1510

SEQ ID NO: 2622 - DNA, 500 bp, Homo sapiens
atgtcgagggaatgcagaaagagttaaggaaggcaggttgtccttctattcaggccactcttcgttttccatgtactgcatgctgtttgtggcactttatcttcaagccaggatgaagggagactgggcaagactcttacgccccacactgcaatttggtcttgttgccgtatccatttatgtgggcctttctcgagtttctgattataaacaccactggagcgatgtgttgactggactcattcagggagctctggttgcaatattagttgctgtatatgtatcggatttcttcaaagaaagaacttcttttaaagaaagaaaagaggaggactctcatacaactctgcatgaaacaccaacaactgggaatcactatccgagcaatcaccagccttgaaaggcagcagggtgcccaggtgaggctggcctgttttctaaaggaagatgattgccacaaggcaagaagatgcatctttcttcctggtgtacaagccttt

SEQ ID NO: 2623 - DNA, 592 bp, Homo sapiens
taaggaaggcaggttgtccttctattcaggccactcttcgttttccatgtactgcatgctgtttgtggcactttatcttcaagccaggatgaagggagactgggcaagactcttacgccccacactgcaatttggtcttgttgccgtatccatttatgtgggcctttctcgagtttctgattataaacaccactggagcgatgtgttgactggactcattcagggagctctggttgcaatattagttgctgtatatgtatcggatttcttcaaagaaagaacttcttttaaagaaagaaaagaggaggactctcatacaactctgcatgaaacaccaacaactgggaatcactatccgagcaatcaccagccttgaaaggcagcagggtgcccaggtgaggctggcctgttttctaaaggaagatgattgccacaaggcaagaggatgcatctttcttcctggtgtacaagcctttaaagacttctgctgctgctatgcctcttggatgcacactttgtgtgtacatagttacctttaactcagtggttatctaatagctctaaactcattaaaaaaactccaagccttcca

SEQ ID NO: 2624 - DNA, 197 bp, Homo sapiens
ggccgcccttttttttttttttttttttttttttttttggggaaaagggggtcttttttgggtcccccccccccttttaaaaaacccccctaaaaaatgcccccaaaaaaaaaaatttttttttttggggggggggaaaaaaagggggaaaaaaccccccccccccggggggggaaaaaaacccccccaaaaccccc

SEQ ID NO: 2625 - DNA, 493 bp, Homo sapiens
ttttttttttttaatggtaaaaactttatttactatttataaatacattgcaagacaaacttctcaaaaatacttttccccccaaaaagttaaaaaaataaagaaaagctaataggtaggcagaatgtcttgagacccctctgttttcaaggagagctctatgcagcgtgtgtccacaccgaggtctgcagcagggcagagtctccctgagcctgactttgccagaccttcttgggtttggcctccgggagagcagcccagtctctgggtcgacgtcctttcctcagtcatggccacagttgtatcatatagcatctctaacatttcatctaggattatctagtatagatcttactatatttggggctatgttgtatacaatgttaacaagaacatatcttctctgcatatatgtgtgaattataaagaaaagcatgagaatgactctaagttcaacaaacatgggtgaatctctatgtgctcccagtgtcct

SEQ ID NO: 2626 - DNA, 265 bp, Homo sapiens
tggtacgcctgcagtaccggtccggaattcccgggtcgacccacgcgtccgcttcctgttttctgttgtcaaatgatgataatgtgccatgatgttttatatatatcattcagaaaaagttttattttttaataacattctattaacattattttgcttgccgctggcatgcctgaggaatgtatttggctttgattacacactaagtttttgtaataaatttgactcattaaaaacctttttttttaaaaaaaaaaaaaaaaaa

SEQ ID NO: 2627 - DNA, 186 bp, Homo sapiens
tttctgttttctgttgtcaaatgatgataatgtgccatgatgttttatatatatcattcagaaaaagttttattttttaataacattctattaacattattttgcttgccgctggcatgcctgaggaatgtatttggctttgattacacactaagtttttgtaataaatttgactcattaaaaacc

SEQ ID NO: 2628 - DNA, 475 bp, Homo sapiens
cagcccgtccgcggcctctccagccccgggttcgcgctctcgactcccccgacccagtccgcggtgccccggcgggtgatgccaaatacagccatgaagaaaaaggtgctgctgatggggaagagcgggtcggggaagaccagcatgaggtcgataatcttcgccaattacattgctcgcgacacccggcgcctgggggccaccattgacgtggaacactcccacgtccgattcctagggaacctggtgctgaacctgtgggactgtggcggtcaggacaccttcatggaaaattacttcaccagccagcgagacaatatcttccgtaacgtggaagttttgatttacgtgtttgacgtggagagccgcgaactggaaaaggacatgcattattaccagtcgtgtctggaggccatcctccagaactctcctgacgccaaaatcttctgcctggtgcacaaaatggatctggttc

SEQ ID NO: 2629 - DNA, 122 bp, Homo sapiens
agaagggttgctggagcctaggacgtcgaggctgcagtgagatatgatcacaccactgcactccagcatgactgagtgagaccctgtctcaaaaaaaaaaaaaaaaaagttttttttttttc

SEQ ID NO: 2630 - DNA, 147 bp, Homo sapiens
ggaggggaaggttggtaggtaagctgtaacagattgctccagttgccttaaactacgcacatagctaagtgaccaaacttcttgttttgatttgaaaaagtgcattgttttcttgtccctccctttgatgaaacgttaccctttgac

SEQ ID NO: 2631 - DNA, 607 bp, Homo sapiens
cagtgaagacttgcatgttgttttcactactgtacacttgacctgcacatgcgagaaaaaggtggaatgtttaaaacaccataatcagctcagggtatttgccaatctgaaataaaagtgggatgggagagtgtgtccttcagatcaagggtactaaagtccctttcgctgcagtgagtgagaggtatgttgtgtgtgaatgtacggatgtgtgtttgcgtgcatgtttgtgcatgtgtgactgtgcatgttatgtttctccatgtgggcaaagatttgaaatgtaagcttttatttattattttagaatgtgacataatgagcagccacactcgggggaggggaaggttggtaggtaagctgtaacagattgctccagttgccttaaactacgcacatagctaagtgaccaaacttcttgttttgatttgaaaaaagtgcattgttttcttgtccctccctttgatgaaacgttaccctttgacgggccttttgatgtgaacagatgttttctaggacaaactataaggactaattttaaacttcaaacattccacttttgtaatttgttttaaattgttttatgtatagtaagcacaactgtaat

SEQ ID NO: 2632 - DNA, 463 bp, Homo sapiens
attccaattagccaggaatggaaggatgagaagcgggatttgctgactgaaggacaaagttttagcagccttgatgaagaagccctgggatcccgacacaggccagacctggtccctagcactccatcactgtttgaagctgcttccttggcaaccacaatttcatcttcttccttatacgtcaatgagcactatccacacgacaggcctacactctattcaaacagcaaagggttaccttccagttcaacatttaccttggaagaggggaccatctacttgaccgctgagcccaacactctggaagtgcaggatgacaatgcttctgtgcttgacgtctatttataagtgaaaatggtgatcacctaagcacatggatgagacgtgagcacagttatggcagagaagtttctccgcaccagaattatccacagcaacttggctgagccccactacacacaga

SEQ ID NO: 2633 - DNA, 592 bp, Homo sapiens
ccaattagccaggaatggaaggatgagaagcgggatttgctgactgaaggacaaagttttagcagccttgatgaagaagccctgggatcccgacacaggccagacctggtccctagcactccatcactgtttgaagctgcttccttggcaaccacaatttcatcttcttccttatacgtcaatgagcactatccacacgacaggcctacactctattcaaacagcaaagggttaccttccagttcaacatttaccttggaagaggggaccatctacttgaccgctgagcccaacactctggaagtgcaggatgacaatgcttctgtgcttgacgtctatttataagtgaaaatggtgatcacctaagcacatggatgagacgtgagcacagttatggcagagaagtttctccgcaccagaattatccacagcaacttggctgagccccactacacacagagaaatcatcaacctgacttaagagttttcaagatgtcaacttcaggctgatcagcagatgggatgtgaaaaatactaccctattctatcatttgctgttgcttgctgaactgtgaagaactgcatgaactat

SEQ ID NO: 2634 - DNA, 251 bp, Homo sapiens
caattagccaggaatggaaggatgagaagcgggatttgctgactgaaggacaaagttttagcagccttgatgaagaagccctgggatcccgacacaggccagacctggtccctagcactccatcactgtttgaagctgcttccttggcaaccacaatttcatcttcttccttatacgtcaatgagcactatccacacgacaggcctacactctattcaaacagcaaagggttaccttccagttcaacattt

SEQ ID NO: 2635 - DNA, 229 bp, Homo sapiens
gtagcagaagcctcattccagaacccatctggccagagaagcagcagcatcctgggggatggccgtgcatggggtgtacactcgctataggcataggcccggcatggctgtcgctggacgccagctgtgcacacccagccacacctgctgcacgccgcgttagtgtgcggctccgggcctgagcattcgcaaagctcgcttctccagggagcctcctcttggctttgga

SEQ ID NO: 2636 - DNA, 316 bp, Homo sapiens
cgccataacctggtcagaagtgtgcctgtcggcggggagagaggcaatatcaaggttttaaatctcggagaaatggctttcgtttgcttggctatcggatgcttatatacctttctgataagcacaacatttggctgtacttcatcttcagacaccgagataaaagttaaccctcctcaggattttgagatagtggatcccggatacttaggttatctctatttgcaatggcaacccccactgtctctggatcattttaaggaatgcacagtggaatatgaactaaaataccgaaacattggtagtgaaacatgga

SEQ ID NO: 2637 - DNA, 270 bp, Homo sapiens
  misc_feature 37: n = A,T,C or G
agtcgccataacctggtcagaagtgtgcctgtcggcngggagagaggcaatatcaaggttttaaatctcggagaaatggctttcgtttgcttggctatcggatgcttatatacctttctgataagcacaacatttggctgtacttcatcttcagacaccgagataaaagttaaccctcctcaggattttgagatagtggatcccggatacttaggttatctctatttgcaatggcaacccccactgtctctggatcattttaaggaatgc

SEQ ID NO: 2638 - DNA, 341 bp, Homo sapiens
ttacatacgtttttattactcgggggggacctgtacgtcaccaatgcccagcttcacgggggcatgtagtgtgactcacggctgaacacaaaatcactgtgaagcctgtgctacagaaggatgtccagtcgctgaggccaggagagaggtgggcaggcctgggtctggcagtggagacggtcctccagggagccgttgggcaggaagccgtacaccaggcagtagaagccgttctgagcacagtagccagcaaagtccacaatgtttgggtgacgaaacctggacagctgctccacctcggtcaggaagctctgcttcactgcagtccactccaggtcagc

SEQ ID NO: 2639 - DNA, 466 bp, Homo sapiens; identical to SEQ ID NO: 1346

SEQ ID NO: 2640 - DNA, 70 bp, Homo sapiens
agttttcctttttttaataattatttttaatttaaaaaagcaaatggaaaatgtatattttgatgagctt

SEQ ID NO: 2641 - DNA, 442 bp, Homo sapiens
tttttttttttttttttcggctcagtataaagcttccttttcttagggaccatgcaaagattctttgattctagaagtgccatttcattatttctgtgactcctgtctgaatcatctgccaggtaactatcttgattttgtcttagcaatcgacttagcagaccattcttggagaaagaaaaatcctgaggtgaaacaggctccgatttaaagtcttcggacactggtaaggcaggtgcgcttctctgcacagcaggagccatacccaagaatggggcactcttagcatcatggctcaagtgcacatttgtgttaggaatttgtaagtcatcacaaggctcagattttattttcaccatcagtatttgttcacttaaagctctctctgagtgttcctgagtactttcatctcttaagggagttttctcttttttttcactct

SEQ ID NO: 2642 - DNA, 275 bp, Homo sapiens
  misc_feature 244: n = A,T,C or G
agaaaaatacaaaaaatctgcattaaaaatattaatcctgcatgctggacatgtatggtaataatttctattttgtaccattttctgtttaactttagcatgttgttgatcatggatcatactcccctgtttcttgggtgagaagggatcgccagtttggaaactccggcggctgcgtgcggggtttcagtcccactgtaggcttgtaaataccgccccgccaaaccgcatagagacgtggcancactgagggctttgttgggttatatacgtat

SEQ ID NO: 2643 - DNA, 353 bp, Homo sapiens
taagctcggaattcgggtcgaggaaaaatacaaaaaatctgcattaaaaatattaatcctgcatgctggacatgtatggtaataatttctattttgtaccattttcttgtttaactttagcatgttgttgatcatggatcatactccccttgtttctttgggtgagaagggatcgcagtttggaaactccggcggctgcgtgcggggtttcagtcccagctgtaggcttgtaaatacccgccccgccaaaccgcatagagaacgtggcagcaagctgagggtctttgtttgggtttattattacggtatttttgtttgtaagttaaaaaaaaaaaaaaaagggggggccccca

SEQ ID NO: 2644 - DNA, 559 bp, Homo sapiens
gaatttggccctcgaggccaagaattcggcactagggcgcagaaggaccagcagaaagatgccgaggcggaagggctgagcggcacgaccctgctgccgaagctgattccctccggtgcaggccgggagtggctggagcggcgccgcgcgaccatccggccctggagcaccttcgtggaccagcagcgcttctcacggccccgcaacctgggagagctgtgccagcgcctcgtacgcaacgtggagtactaccagagcaactatgtgttcgtgttcctgggcctcatcctgtactgtgtggtgacgtcccctatgttgctggtggctctggctgtctttttcggcgcctgttacattctctatctgcgcaccttggagtccaagcttgtgctctttggccgagaggtgagcccagcgcatcagtatgctctggctggaggcatctccttccccttcttctggctggctggtgcgggctcggccgtcttctgggtgctgggagccaccctggtggtcatcggctcccacgctgccttccaccagattgaggctgtggacg

SEQ ID NO: 2645 - DNA, 711 bp, Homo sapiens
  misc_feature 444: n = A,T,C or G
tttttttttttttttttttgacacccataacagctttattttcaaaggcgggatccctccccgggcttgtgatgggacggcgctgtgggcccgagcagcaaagccgtgcaggacaggcatgggcaggggtggggcagctggcccgggaggccggcaggtcccaaaagacacctcacacgggttccatctgcagctcctccccgtccacagcctcaatctggtggaaggcagcgtgggagccgatgaccaccagggtggctcccagcacccagaagacggccgagcccgcaccagccagccagaagaaggggaaggagatgcctccagccagagcatactgatgcgctgggctcacctctcggccaaagagcacaagcttggactccaaggtgcgcagatagagaatgtaacaggcgccgaaaaagaccagccagagccaccagncacataggggacgtcaccacacagtacaggatgaggcccaggaacacgaacacatagttgctctggtagtactccacgttgcgtacgaggcgctggcacagctctcccaggttgcggggccgtgagaagcgctgctggtccacgaaggtgctccaggggccggatggtcgcgcggcgccgctccagccactcccggcctgcacccggaggaatcagcttcggcagcaaggtcgtgccggtcagcccttccgcctcggcattctttct

SEQ ID NO: 2646 - DNA, 468 bp, Homo sapiens
actcgcagtccttcttctctggcctctttggaggctcatccaaaatagaggaagcatgcgaaatctacgccagagcagcaaacatgttcaaaatggccaaaaactggagtgctgctggaaacgcgttctgccaggctgcacagctgcacctgcagctccagagcaagcacgacgcagccacctgctttgtggacgctggcaacgcattcaagaaagccgacccccaagaggccattaactgtttgatgcgagcaatcgagatctacacagacatgggccgattcacgattgcggccaagcaccacatctccattgctgagatctatgagacagagttggtggacatcgagaaggccattgcccactacgagcagtctgcagactactacaaaggcgaggagtccaacagctcagccaacaagtgtctgctgaaggtggctggttacgctgcgctgctggagcagtatc

SEQ ID NO: 2647 - DNA, 203 bp, Homo sapiens
cgcaaagtgaagaactcgcagtccttcttctctggcctctttggaggctcatccaaaatagaggaagcatgcgaaatctacgccagagcagcaaacatgttcaaaatggccaaaaactggagtgctgctggaaacgcgttctgccaggctgcacagctgcacctgcagctccagagcaagcacgacgcagccacctgctttgt

SEQ ID NO: 2648 - DNA, 212 bp, Homo sapiens; identical to SEQ ID NO: 668

SEQ ID NO: 2649 - DNA, 226 bp, Homo sapiens
  misc_feature 109, 128, 153, 161, 167, 174, 175, 178, 196, 202, 206, 211,213: n = A,T,C or G
gaagcacctcattgtgaccccctcgggctgcggggaacagaacatgatcggcatgacgcccacggtcatcgctgtgcattacctggatgaaacggagcagtgggagaanttcggcctagagaagcggnagggggccttggagctcatcaaganggggtacncccagnagctggnnttnagacaacccagctctgcntttgcnggcnttcgnanaaagggcccccac

SEQ ID NO: 2650 - DNA, 97 bp, Homo sapiens
ctgggctgcggctgatgcgcatccgttttcctgccctgggcatgtgtctctgaaaccgtatggcgggcggtgggcaacgggcactgctaagggaggc

SEQ ID NO: 2651 - DNA, 120 bp, Homo sapiens
ggcacgagctcatctgtttgcggatcagaacccgagctgtgcttgtggctgcggctgctaactggctgcgcacagggagctgtcaccatgcctcactcgtacccagccctttctgctgag

SEQ ID NO: 2652 - DNA, 273 bp, Homo sapiens
ggccgcccttttttttttttttttttttccccccttttttttggtgggggggtttttccaaggggttgaatgggggttttttttccccccttttaccccagaaaaagggggaggaaaaaaggaacccccggggaaaattttcctttttttggaaaatttgggggacccgaaaaagggggggggaacccccccccttttttttttcttttaaaaaatttttttgcccccaaaaaaaggggggccccctttcccccccttcttgggccccggggg

SEQ ID NO: 2653 - DNA, 90 bp, Homo sapiens
cacttcatgcaaggcacatgtgctgtcctgcaggtctgcagggaaccgacccagagagcccagcggcaggccctggaacacccgcctctg

SEQ ID NO: 2654 - DNA, 463 bp, Homo sapiens
gacttgtccgggaatccggtgcttcggatctactacacctcgaggcctgctctgttcaccttgtgtgctgggaatgagctcttctactgcctcctctacctgttccatttctctgagggacctttagttggctctgtgggactgttccggatgggcctctgggtcactgcccccatcgccttgctgaagtcgctcatcagcgtcatccacctgatcacggccgcccgcaacatggctgccctggacgcagcagaccgcgccaagaagaagtgacgctggagccccgggtcctggctgcccacctgccctgggagtcttgctgtgccacacagctccccaccccctgctaggaggtcccagtctcacgccttcctcatgtgttgttctacctgctgggatgggggtcagcctctctttggtgacgtcacgttctctgggatcctgaggacccgggcctcaaatc

SEQ ID NO: 2655 - DNA, 693 bp, Homo sapiens
  misc_feature 285, 455, 597, 606, 636, 667, 686: n = A,T,C or G
ggcacgaggagagagagagtcacaagatgatcgacttgttcgggaatccggtgcttcggatctactacacctcgaggcctgctctgttcaccttgtgtgctgggaatgagctcttctactgcctcctctacctgttccatttctctgagggacctttagttggctctgtgggactgttccggatgggcctctgggtcactgcccccatcgccttgctgaagtcgctcatcagcgtcatccacctgatcacggccgcccgcaacatggctgccctggacgcagcanaccgcgccaagaagaagtgacgctggagccccgggtcctggctgccacctgccctgggagtcttgctgtgccacacagctccccaccccctgctaggaggtcccagtctcacgccttcctcatgtgttgttctacctgctgggatgggggtcagcctctctttggtgacntcacgttcttctgggatcctgaggaccgggcctcaaatcagggaggatacccgggagggccccttcatccaagcggtgcttctggggtgccgggaccgggcagtgtcacaccctgcctgctagtcctggggtccagatctanggaccttantgaaggagtggtgtgaggcagttctgaagnggataactcgcccacaacaagttgggacatncagaggaaactcaactctnacgtctt

SEQ ID NO: 2656 - DNA, 300 bp, Homo sapiens
gagagagagagtcacaagatgatcgacttgtccgggaatccggtgcttcggatctactacacctcgaggcctgctctgttcaccttgtgtgctgggaatgagctcttctactgcctcctctacctgttccatttctctgagggacctttagttggctctgtgggactgttccggatgggcctctgggtcactgcccccatcgccttgctgaagtcgctcatcagcgtcatccacctgatcacggccgcccgcaacatggctgccctggacgcagcagaccgcgccaagaagaagtgacgc

SEQ ID NO: 2657 - DNA, 300 bp, Homo sapiens
  misc_feature 37, 41: n = A,T,C or G
gacttgtccgggaatccggtgcttcggatctactacncctngaggcctgctctgttcaccttgtgtgctgggaatgagctcttctactgcctcctctacctgttccatttctctgagggacctttagttggctctgtgggactgttccggatgggcctctgggtcactgcccccatcgccttgctgaagtcgctcatcagcgtcatccacctgatcacggccgcccgcaacatggctgccctggacgcagcagaccgcgccaagaagaagtgacgctggagccccgggtcctggctgccc

SEQ ID NO: 2658 - DNA, 239 bp, Homo sapiens; identical to SEQ ID NO: 11
  misc_feature 168, 190, 203, 229: n = A,T,C or G

SEQ ID NO: 2659 - DNA, 113 bp, Homo sapiens
gacacatttgttacttcgtgagcaagcccggaggctcggagccccctgccgtgttcacaggtgacaccttgtttgtggctggctgcgggaagttctatgaagggactgcggat

SEQ ID NO: 2660 - DNA, 294 bp, Homo sapiens
ttttttttttttttttttttttttggcgggaataaatacttgttaaacttctcttataaatatgcattaaaacgtccgataacacaagccaagggctgtaaaattaaggttaaatcaagactgaatttcccgcacggaccagcaggaaagccagttacctaaaagagcctaatccccaaatccgctgaaggtgcagggcggcctcagtcccggggcatcttgaactggtccttctccctgcgcacggcccgcatggtggtcaccgggtccgtctcacctgcgtgctgctgcacc

SEQ ID NO: 2661 - DNA, 419 bp, Homo sapiens
tagccatggcaggacagctcctggaccaggtctcataatgcatgtggcacttaggtccaagctctccagagggtgaaagctggagtctgtcaatgtcctactgagacagcacagccaacctagctagcaacatttgttttagtctgaacaatatatacttatagaattcagtcaaagatacacaatctgaaacagcttcatggggtggactctaacagtagttgcaatgttttagaatgagacttacttctctgctatctagatctgaactccttggcttctttacttagttcaagccccagcctaggaaagccagttacataaaagttggctcaggagtcttagagctttacctaaatagagcccagaaaacggaggatgggggtggggcgccttcctggaggtgacacttgatgggg

SEQ ID NO: 2662 - DNA, 357 bp, Homo sapiens
cgtattgctgtcaagccgtgagctagccatggcaggacagctcctggaccaggtctcataatgcatgtggcacttaggtccaagctctccagagggtgaaagctggagtctgtcaatgtcctactgagacagcacagccaacctagctagcaacatttgttttagtctgaacaatatatacttatagaattcagtcaaagatacacaatctgaaacagcttcatggggtggactctaacagtagttgcaatgttttagaatgagacttacttctctgctatctagatctgaactccttggcttctttacttagttcaagccccagcctaggaaagccagttacataaaagttggctc

SEQ ID NO: 2663 - DNA, 408 bp, Homo sapiens
actttgtatcactgcagcgcttcacaccttcatcctgaagatatctggaacattcgtagtatctgcagcaccaccaatatccaatgcaagaacggcaagatgaactgccatgagggtgtagtgaaggtcacagattgcagggacacaggaagttccagggcacccaactgcagatatcgggccatagcgagcactagacgtgttgtcattgcctgtgagggtaacccacaggtgcctgtgcactttgacggttagatgccaccatgtagggattatcgcgagtggttgaccttacacttactccttaaatagcagtgagtaatgcatttgagctgccccaggctctgtctcctcagctcatttcttactctttttctctatataactcattctattaaatacattgca

SEQ ID NO: 2664 - DNA, 550 bp, Homo sapiens
acaaggacgccaaccccacctagatgcaaagcaggattcaaaagaacatctttgcgttttctaccggctccccatcatcgtactagggaggaagaagcgggtgagaaacaaaacttctttccattgtcctgcccttttctgcggacttgttctgaggccgaggcacctctaagatactgatggctctgcagaggacccattcattgcttctgcttttgctgctgaccctgctggggctggggctggtccagccctcctatggccaggatggcatgtaccagcgattcctgcggcaacacgtgcaccctgaggagacaggtggcagtgatcgctactgcaacttgatgatgcaaagacggaagatgactttgtatcactgcaagcgcttcaacaccttcatccatgaagatatctggaacattcgtagtatctgcagcaccaccaatatccaatgcaagaacggcaagatgaactgccatgagggtgtagtgaaggtcacagattgcagggacacaggaagttccagggcacccaactgcagatatcgggc

SEQ ID NO: 2665 - DNA, 554 bp, Homo sapiens; identical to SEQ ID NO: 1255

SEQ ID NO: 2666 - DNA, 313 bp, Homo sapiens; identical to SEQ ID NO: 1495

SEQ ID NO: 2667 - DNA, 519 bp, Homo sapiens
cggccgcccttttttttttttttggccccccggggcccccttattttaaaaaccccccccccccctggggggggggccccgaccttttaagttttttttttttcccccgggggaaaaaaaggggggaaaaaaaaaaaaaattcccccccctttttcccccccccaaaaaagggggggaccccccgggggggggggggtttccccgggggggaaaaaaaaaacccccgggggcccccccccaattttttcccccccccccttggggggggggggggggggggggggggggggggggcccccccccccccccccccccccattttggggggttgggttgggggaaatttttttttaaaaaaaaaaaaaaaaaatttgggggtccccccccccctttttttccccccccttttttccaaaaggggaccccccccccccccccccaaaaaaaccccccccccccccccaaaaaaaacccccccccggggggggaaaaaaaagggggggggggggggccccccc

SEQ ID NO: 2668 - DNA, 422 bp, Homo sapiens
aactaaaaactacagtggaagaaaggaagtcttcagaagcctcccccactgcgcaaagaagtaaagatcacagtaaggaatgcataaacgctgccccagattctccgtccaaacagcttccagaccagatttcattcttcagtggaaatccatcagttgaaatagttcatggtattatgcacctatataagacaaataagatgacctccttaaaagaagatgtgcggcgcagtgccatgctgtgtattctcacagtccctgctgcaatgaccagtcatgaccttatgaagtttgttgccccatttaacgaagtaattgaacaaatgaaaattatcagagactctactcccaaccaatatatggtgctgataaagtttcgtgcacaggctgatgcggatagtttttatatgacatgcaatggc

SEQ ID NO: 2669 - DNA, 626 bp, Homo sapiens
tacggccgggtgcgagctctgcgggaagcggttcctggatagtttgcggctgagaatgcacttactggctcattcagcgggtgccaaagcctttgtctgtgatcagtgcggtgcacagttttcgaaggaggatgccctggagacacacaggcagacccatactggcactgacatggccgtcttctgtctgctgtgtgggaagcgcatccaggcgcagagcgcactgcagcagcacatggaggtccacgcgggcgtgcgcagctacatctgcagtgagtgcaaccgcaccttccccagccacacggctctcaaacgccacctgcgctcacatacaggcgaccacccctacgagtgtgagttctgtggcagctgcttccgggatgagagcacactcaagagccacaaacgcatccacacgggtgagaaaccctacgagtgcaatggctgtggcaagaagttcagcctcaagcatcagctggagacgcactatagggtgcacacaggtgagaagccctttgagtgtaggctctgccaccagcgctcccgggactactcggccatgatcaagcacctgagaacgcacaacggcgcctcgccctaccagtgcaccatctgcacagagtact

SEQ ID NO: 2670 - DNA, 515 bp, Homo sapiens
gatagtttgcggctgagaatgcacttactggctcattcagcgggtgccaaagcctttgtctgtgatcagtgcggtgcacagttttcgaaggaggatgccctggagacacacaggcagacccatactggcactgacatggccgtcttctgtctgctgtgtgggaagcgcatccaggcgcagagcgcactgcagcagcacatggaggtccacgcgggcgtgcgcagctacatctgcagtgagtgcaaccgcaccttccccagccacacggctctcaaacgccacctgcgctcacatacaggcgaccacccctacgagtgtgagttctgtggcagctgcttccgggatgagagcacactcaagagccacaaacgcatccacacgggtgagaaaccctacgagtgcaatggctgtggcaagaagttcagcctcaagcatcagctggagacgcactatagggtgcacacaggtgagaagccctttgagtgtaggctctgccaccagcgctcccgggacta

SEQ ID NO: 2671 - DNA, 615 bp, Homo sapiens
actgttcaaggtttattgggggttttagttggtataacacttggatagttggttgcattgtttgtatgtagatctttttacattatatggtaatgtacactactgatatagttcacaaaataagatcctttggaagaattatgcacaagacatgatattggatttatacactggatcccaggatgtgactcactgggaaaaaatgttggactaggcatgttcagtgaaggagccaggaagttatataacacacggtaaacatccacctggctcaaggggcaaatgcagtacgtacagcattggcagtggtgcgtcagaggtggcagaactatttcacactaaccagttgaagactacacaagattaataccatccagcatcaggatatagctgtggattttacaaaccattcttatttctaacttcaggagttgatgtttttcccagtccatcttaaaatattactgctttaatcacagatcagataaaaaggacaacatgcacaacctccacctagaatcctgttgtagcctagacagtgaaatgatatgacatcagaagactttaaaattgcagctccttttggatcccccaaagtgtatctgcactcttctt

SEQ ID NO: 2672 - DNA, 99 bp, Homo sapiens
ttttttttttccactgttcaaggtttattgggggttttagttggtataacacttggatagtgggttgcattgtttgtatgtaaatctttttacattata

SEQ ID NO: 2673 - DNA, 612 bp, Homo sapiens; identical to SEQ ID NO: 1163

SEQ ID NO: 2674 - DNA, 410 bp, Homo sapiens
gaaaacaacacagttttcttgtaccctgggagagaagtttgaagaaaccacagctgatggcagaaaaactcagactgtctgcaactttacagatggtgcattggttcagcatcaggagtgggatgggaaggaaagcacaataacaagaaaattgaaagatgggaaattagtggtggagtgtgtcatgaacaatgtcacctgtactcggatctatgaaaaagtagaataaaaattccatcatcactttggacaggagttaattaagagaatgtccaagctcagttcaatgagcaaatctccatactgtttctttctttttttttcattactgtgttcaattatctttatcataaacattttacatgcagctatttcaaagtgtgctggattaattaggatcatccctttgg

SEQ ID NO: 2675 - DNA, 310 bp, Homo sapiens
gctcgggaattcgctcgagtgctgctccccacccatggacaggagatcctgggttgggcctccctctgatgaccccagccagatgagcgagtggggctcagcgtggcccatggtgcctgtcactcagcattcccatgcctgatgtttaccaagtgctgtgttggacactggctttctccaaacaggatttgcctcctccacgctccctacacacctgagatgtaaactggcagtcagtgttcactcaggacctaggattagaaaatggcagagttggtgctggatccaccttgcacttctatcaagccct

SEQ ID NO: 2676 - DNA, 257 bp, Homo sapiens
tgctgctccccagcccatggacaggagatcctgggttgggcctccctctgatgaccccagccagatgagcgagtggggctcagcgtggcccatggtgcctgtcactcagcattcccatgcctgatgtttaccaagtgctgtgttggacactgactttctccaaacaggatttgcctcctccacgctccctacacacctgagatgtaaactggcagtcagtgttcactcaggacctaggattagaaaatggcagagtt

SEQ ID NO: 2677 - DNA, 593 bp, Homo sapiens; identical to SEQ ID NO: 583

SEQ ID NO: 2678 - DNA, 304 bp, Homo sapiens
  misc_feature 106, 113, 125, 137: n = A,T,C or G
gggtcaaagttgagctgaagaacggtgccacttacgaagccaaaatcaaggatgtggatgagaaagcagacatcgcactcatcaaaattgaccaccagggcaagcngcctgtnctgctgcttggncgctcctcaganctgcggccgggagagttcgtggtcgccatcggaagcccgttttcccttcaaaacacagtcaccaccgggatcgtgagcaccacccagcgaggcggcaaagagctggggctccgcaactcagacatggactacatccagaccgacgccatcatcaactatggaaactc

SEQ ID NO: 2679 - DNA, 258 bp, Homo sapiens
ggtcagaagagttgtgcacgcagattagcaggccaaggtctgagccacagcagcatttttatttcagattttgataactgtttatatgtgttgaaaaccaaaatgacatctttttaaagcttatccataaaaaaaaatagatgtcttttatagtggaaaaacacatggggaaaaaaatcatctattttgatgcagcatttgataatgataaaacacctcacacctcactctttatagtgcacaaaatgaatgaggtct

SEQ ID NO: 2680 - DNA, 442 bp, Homo sapiens
aagtagccgctccgagtggaggcgactgggggctgaagagcgcgccgccctctcgtcccactttccaggtgtgtgatcctgtaaaattaaatcttccaagatgatctggtatatattaattataggaattctgcttccccagtctttggctcatccaggcttttttacttcaattggtcagatgactgatttgatccatactgagaaagatctggtgacttctctgaaagattatattaaggcagaagaggacaagttagaacaaataaaaaaatgggcagagaagttagatcggctaactagtacagcgacaaaagatccagaaggatttgttgggcatccagtaaatgcattcaaattaatgaaacgtctgaatactgagtggagtgagttggagaatctggtccttaagggtatgtcagatggctttatctctaaccta

SEQ ID NO: 2681 - DNA, 611 bp, Homo sapiens
gggctgaggtaggaagtagccgctccgagtggaggcgactgggggctgaagagcgcgccgccctctcgtcccactttccaggtgtgtgatcctgtaaaattaaatcttccaagatgatctggtatatattaattataggaattctgcttccccagtctttggctcatccaggcttttttacttcaattggtcagatgactgatttgatccatactgagaaagatctggtgacttctctgaaagattatattaaggcagaagaggacaagttagaacaaataaaaaaatgggcagagaagttagatcggctaactagtacagcgacaaaagatccagaaggatttgttgggcatccagtaaatgcattcaaattaatgaaacgtctgaatactgagtggagtgagttggagaatctggtccttaagggtatgtcagatggctttatctctaacctaaccattcagagacagtactttcctaatgatgaagatcaggttggggcagccaaagctctgttacgtctccaggatacctacaatttggatacagataccatctcaaagggtaatcttccaggagtgaaacacaaatcttttctacggctgaggact

SEQ ID NO: 2682 - DNA, 416 bp, Homo sapiens
ttacaaactcctgaaccataatattctcgtctccacagacacatactccataatttaaaaccaaatgcttgtgagaaagcttgctcatcatacttgctgcttcaaagaaagactctgaatagtttctgtgtgctttatccagaacttttaaaagaacttctgtttcatgcagttgaccgtagtctcctacttctcttcgtacgcctttaaaaatctttgtaaaagtgccttggccaaggctttcattaaatatcaaatcttcatttctgattttgtgaaacaccatttggttcatatgagtaggcctctgtaatgttggtgaggttggtacatcagaaacaccattcgttctgaagactagaaggtttgatttatcttttcggctttgggggacagcatttagtacacgggaaaat

SEQ ID NO: 2683 - DNA, 163 bp, Homo sapiens
gggctttttttttttgcaaagttccaaatttatgggtcgggaaataaatccaaatttctcattaaaaaactcctttggaaaaacttgggcccaaaagtttcccatccgaactcagccttttttgccccgatccccgacttttttactcaaggcccgggaaggc

SEQ ID NO: 2684 - DNA, 285 bp, Homo sapiens
aaagttacaaatttattggtctggaaataaatacaaatatctcattaagaaactcctctggaaagacttgtgcacaatagtttcccatccgtactcagcctctcttgccccgatccccgacttttctactcaaggccagggaaaggcctccaaggtgatgggcggcaggtaacgagtcattgcctctcacgccacctggaaggctggactacttcctcctcccaactgcggggtcccagaaatcctcgggtcccagtggctgacttacaatattcaattcactct

SEQ ID NO: 2685 - DNA, 458 bp, Homo sapiens
tcgagccgccgccgcccctgtacaacaacaacaacaactgcgaggaaaatgagcagtctctgcccccgccggccggcctcaacagttcctgggtggagctacccatgaacagcagcaatggcaatgataatggcaatgggaaaaatggggggctggaacacgtaccatcctcatcctccatccacaatggagacatggagaagattcctttggatgcacaacatgaatcaggacagagtagttccagaggcagttctcactgtgacagcccttcgccacaagaagatgggcagatcatgtttgatgtggaaatgcacaccagcagggaccatagctctcagtcagaagaagaagttgtagaaggagagaaggaagtcgaggctttgaagaaaagtgcggactgggtatcagactggtccagtagacccgaaaacattccacccaaggagttccacttc

SEQ ID NO: 2686 - DNA, 329 bp, Homo sapiens
tttttttttttttttttttttttctttttaataactatcaactcaaacttagggaaacttgcctttgtcttgggggaaaaaaacaactagacaataaagcttcttttacatcatttgctaacctgatctcgttttaagagagagatggtagttatgttgcaagagtaaaatttataccatgaatgatacaggtctagtctggtggcactaattagagataatagcattgctgacaaaattataatctgctggtggcatttgcggaaaagaggcccttgcaaatttctaaacaacagtaaactctgttaggaaattctaaaatgtcttca

SEQ ID NO: 2687 - DNA, 527 bp, Homo sapiens
atacatgtaacttcattattttaaaaatatttttagaactccaatactcaccctgttatgtcttgctagtttaaattttgctaattaactgaaacatgcttaccagattcacactgttccagtgtctataaaagaaacactttgaagtctataaaaaataaaataattataaatgtcattgtacatagcatgtttatatctgcaaaaaacctaatagctaattaatctggaatatgcaacattgtccttaattgatgcaaataacacaaatgctgcaaagaaatctactatatcccttaatgaaatacatcattcttcatatatttctccttcagtccattcccttaggcaatttttaatttttaaaaattattatcaggggagaaaaattggcaacgctattatatgtaagggaaatatatacaaaaagaaaattaatcatagtcacctgactaagaaattctgactgctagttgccataaataactcaatggaaatattcctatgggataatgtattttaagtga

SEQ ID NO: 2688 - DNA, 530 bp, Homo sapiens
atacatacatgtaacttcattattttaaaaatatttttagaactccaatactcaccctgttatgtcttgctaatttaaattttgctaattaactgaaacatgcttaccagattcacactgttccagtgtctataaaagaaacactttgaagtctataaaaaataaaataattataaatatcattgtacatagcatgtttatatctgcaaaaaacctaatagctaattaatctggaatatgcaacattgtccttaattgatgcaaataacacaaatgctcaaagaaatctactatatcccttaatgaaatacatcattcttcatatatttctccttcagtccattcccttaggcaatttttaatttttaaaaattattatcaggggagaaaaattggcaaaactattatatgtaagggaaatatatacaaaaagaaaattaatcatagtcacctgactaagaaattctgactgctagttgccataaataactcaatggaaatattcctatgggataatgtattttaagtga

SEQ ID NO: 2689 - DNA, 253 bp, Homo sapiens
  misc_feature 98, 141, 162, 213: n = A,T,C or G
tatacatacatgtaacttcattattttaaaaatatttttagaactccaatactcaccctgttatgtcttgctaatttaaattttgctaattaactganacatgcttaccagattcacactgttccagtgtctataaaaganacactttgaagtctataaaanataaaataattataaatatcattgtacatagcatgtttatatctgcaaaanacctaatagctaattaatctggaatatgcaacattgtcct

SEQ ID NO: 2690 - DNA, 421 bp, Homo sapiens
ccgttgctgtcgatcccagctccttgggaggctgaggcgggagaattgcgggaaggcggggacggaggttgcagtgagccgagatcgcactgctgtacccagcctgggccacagtgcaagactccatctcaaaaaaaaaagaaaagaaaaagcctgtttaatgcacaggtgtgagtggattgcttatggctatgagataggttgatctcgcccttaccccggggtctggtgtatgctgtgctttcctcagcagtatggctctgacatctcttaaatgtcccaacttcagctgttgggagatggtgatattttcaaccctacttcctaaacatctgtctggggttcctttagtcttgaatgtcttatgctcaattatttggtgttgagcctctcttccacaagagctcctccatgtttggat

SEQ ID NO: 2691 - DNA, 377 bp, Homo sapiens
cagctccttgggaggctgaggcgggagaattgcttgaacccggggacggaggttgcagtgagccgagatcgcactgctgtacccagcctgggccacagtgcaagactccatctcaaaaaaaaaagaaaagaaaaagcctgtttaatgcacaggtgtgagtggattgcttatggctatgagataggttgatctcgcccttaccccggggtctggtgtatgctgtgctttcctcagcagtatggctctgacatctcttagatgtcccaacttcagctgttgggagatggtgatattttcaaccctacttcctaaacatctgtctggggttcctttagtcttgaatgtcttatgctcaattatttggtgttgagcctctc

SEQ ID NO: 2692 - DNA, 243 bp, Homo sapiens
  misc_feature 228: n = A,T,C or G
gaggtattccacctcctaccggaatataattaaagggagaaatacactgtatgaagtatatgttgatactatgacatgttgccaacaccttgagaagcattatttgtttctaataaaagtaatggctttgtcaatatattggtgggtttaaaactttgctgcttttttacataaagcctgtgcctttcctagaaagttaagatgtaaatgtattctcacatgtaaatntgaaagttcaggggt

SEQ ID NO: 2693 - DNA, 544 bp, Homo sapiens
tattccacctcctaccggaatataattaaagggagaaatacactgtatgaagtatatgttgatactatgacatgttgccaacaccttgagaagcattatttgtttctaataaaagtaatggctttgtcaatatattggtgggtttaaaactttgctgcttttttacataaagcctgtgcctttcctagaaagttaagatgtaaatgtattctcacatgtaaatttgaaagttcaggggtctattatgaaatgatacacatttttaaatgaaccataatttttttcactaagctgtttgccttccaaagtgtttacaccttaagccttaacatgtatcttcattcagaaaacagttatattgtcataccatagtaggaagaaaaacctttatttggaatatacactactgtaagtttgtacagatcatatacctaccacctgtctttgcttaaagagccttgattacataaatatgtaggaaaaaacatattgagttcaaaatttatatctaacattgtttatgttatgatttttttttaattgc

SEQ ID NO: 2694 - DNA, 244 bp, Homo sapiens
  misc_feature 210: n = A,T,C or G
cacaaaaggtatgatcagcaacttgcttgggaaaggagccgtggaccagctgacacggctggtgctggtgaatgccctctacttcaacggccagtggaagactcccttccccgactccagcacccaccgccgcctcttccacaaatcagacggcagcactgtctctgtgcccatgatggctcagaccaacaagttcaactatactgagtncaccacgcccgatggccattatacgacatcctgg

SEQ ID NO: 2695 - DNA, 209 bp, Homo sapiens
  misc_feature 140: n = A,T,C or G
gaacactgttgctcttggtggacgggcccagaggaattcagagttaaaccttgagtgcctgcgtccgtgagaattcagcatggaatgtctctactatttcctgggatttctgctcctggctgcaagattgccacttgatnccgccaaacgatttcatgatgtgctgggcaatgaaagaccttctgcttacatgagggagcacaatcaat

SEQ ID NO: 2696 - DNA, 254 bp, Homo sapiens
  misc_feature 85, 100, 143, 155, 182, 203, 229, 245, 254: n = A,T,C or G
ctcccaaccaagctctcttgaggatcttgaaggaaactgaattcaaaaagatcaaagtcctgggctccggtgcgttcggcacggngtataagggactctngatcccagaaggtgagaaagttaaaattcccgtcgctatcaangaattaagagangcaacatctccgaaagccaacaagganatcctcgatgaagcctacgtnatggccagcgtggacaacccccacgngtgccgcctgctgggnatctgtctn

SEQ ID NO: 2697 - DNA, 484 bp, Homo sapiens
tttttttttttttttttttcaaatatacctctttgaaagataaatttctgctcaaagggacaatattcttgctggatgcgttcctgtaaatgcttcacagtttgaagacaaaggaatgcaacttcccaaaatgtgcccgaggtggaagtacttcctggctagtcggtgtaaacgttgcaaaaccagtctgtgggtctaagagctaatgcgggcatggctgttgggatggaggacctgctgtggcttggtcctgggtatcgaaagagtctggatttttagggctcatactatcctccgtggtcatactccaataaattcactgctttgtggcgcgacccttaggtattctgcattttcagctgtggagcccttaaagatgccatttggcttggcttccttgggaaagaagtcctgctggtagtcagggttgtccaggctaatttggtggctgcctttctgggcccagtgggcagggctgtcgaat

SEQ ID NO: 2698 - DNA, 660 bp, Homo sapiens
tttaatcatatccaggagtttgcaagaaacaggtgcttaacactaattcacctcctgaacaagaaaaatgggctgtgaccggaactgtgggctcatcgctggggctgtcattggtgctgtcctggctgtgtttggaggtattctaatgccagttggagacctgcttatccagaagacaattaaaaagcaagttgtcctcgaagaaggtacaattgcttttaaaaattgggttaaaacaggcacagaagtttacagacagttttggatctttgatgtgcaaaatccacaggaagtgatgatgaacagcagcaacattcaagttaagcaaagaggtccttatacgtacagagttcgttttctagccaaggaaaatgtaacccaggacgctgaggacaacacagtctctttcctgcagcccaatggtgccatcttcgaaccttcactatcagttggaacagaggctgacaacttcacagttctcaatctggctgtggcagctgcatcccatatctatcaaaatcaatttgttcaaatgatcctcaattcacttattaacaagtcaaaatcttctatgttccaagtcagaactttgagagaactgttatggggctatagggatccatttttgagtttggttccgtaccctgttactaccacagt

SEQ ID NO: 2699 - DNA, 277 bp, Homo sapiens
ctttaatcatatccaggagtttgcaagaaacaggtgcttaacactaattcacctcctgaacaagaaaaatgggctgtgaccggaactgtgggctcatcgctggggctgtcattggtgctgtcctggctgtgtttggaggtattctaatgccagttggagacctgcttatccagaagacaattaaaaagcaagttgtcctcgaagaaggtacaattgcttttaaaaattgggttaaaacaggcacagaagtttacagacagttttggatctttgatgt

SEQ ID NO: 2700 - DNA, 457 bp, Homo sapiens
gactgggtttgggtgcagacgttgttgcttgggcgcttctccgctgcgtgtaggtgaagggggcttcctgaccgagacatggatttaggtgctattacaaaatactcagcattacacgccaagcccaatggactgatccttcaatacgggactgctggatttcgaacgaaggcagaacatcttgatcatgtcatgtttcgcatgggattattagctgtcctgaggtcaaaacagacaaaatccactataggagtcatggtaacagcgtcccacaatcctgaggaagacaatggtgtaaaattggttgatcctttgggtgaaatgttggcaccatcctgggaggaacatgccacctgtttagcaaatgctgaggaacaagatatgcagagagtgcttattgacatcagcgagaaagaagctgtgaatctgcaacaagatgcctttgtagttattggta

SEQ ID NO: 2701 - DNA, 361 bp, Homo sapiens
tttttttttttttttttttttttgggcaggagaccatgttactttattcatttgtttaactttaaccatgttcaataaacttttcacctgtttggtgagttccacaaaagccttagagagtttctggtagtaaccttctatagttgcctttccatatcggccacccgtgtttcgacaatacaccatgtagtgcagctggggtgttgttaacaagccataatcatggaattgacctcctagaacagtcacaccatctattacagattgtgaaagtttctcactgctgggcctggtatctctaccaataactacaaaggcatcttgttgcagattcacagcttctttctcgctgatgtcaata

SEQ ID NO: 2702 - DNA, 551 bp, Homo sapiens
gagccgagctgatttgatcgaggagcgcggttaccggacgggctgggtctatggtcgctccgcgggccgctccgccggctggtgcttttttatcagggcaagctgtgttccatggcagggaacttttggcagatctcccactatttgcaatggattttggataaacaagatctgttgaaggagcgccaaaaggatttaaagtttctctcagaggaagaatattggaagttacaaatattttttacaaatgttatccaagcattaggtgaacatcttaaattaagacaacaagttattgccactgctacggtatatttcaagagattctatgccaggtattctctgaaaagtatagatcctgtattaatggctcctacatgtgtgtttttggcatccaaagtagaggaatttggagtagtttcaaatacaagattgattgctgctgctacttctgtattaaaaactagattttcatatgcctttccaaaggaatttccttataggatgaatcatatattagaatgtgaattctatctgttagaactaatgga

SEQ ID NO: 2703 - DNA, 637 bp, Homo sapiens
tacggccgggagtcgagccgagctgatttgatcgaggagcgcggttaccggacgggctgggtctatggtcgctccgcgggccgctccgccggctggtgcttttttatcagggcaagctgtgttccatggcagggaacttttggcagagctcccactatttgcaatggattttggataaacaagatctgttgaaggagcgccaaaaggatttaaagtttctctcagaggaagaatattggaagttacaaatattttttacaaatgttatccaagcattaggtgaacatcttaaattaagacaacaagttattgccactgctacggtatatttcaagagattctatgccaggtattctctgaaaagtatagatcctgtattaatggctcctacatgtgtgtttttggcatccaaagtagaggaatttggagtagtttcaaatacaagattgattgctgctgctacttctgtattaaaaactagattttcatatgcctttccaaaggaatttccttataggatgaatcatatattagaatgtgaattctatctgttagaactaatggattgttgcttgatagtgtatcatccttatagacctttgctccagtatgtgcaggacatgggccaagaagacat

SEQ ID NO: 2704 - DNA, 130 bp, Homo sapiens
tagaaagcctccacctggagtacaatgccctcaaggtccttcacaatggcaccctggctgagttgcaaggtctaccccacattagggttttcctggacaacaatccctgggtctgcgactgccacatggc

SEQ ID NO: 2705 - DNA, 372 bp, Homo sapiens
  misc_feature 29, 100, 297, 298, 353, 357: n = A,T,C or G
gtgctgtttgaccaatggtcatgtggccnagattggggacttcgggctggctagggacatcatgaatgactccaactacattgtcaagggcaatgccgcnctgcctgtgaagtggatggccccagagagcatctttgactgtgtctacacggttcagagcgacgtctggtcctatggcatcctcctctgggagatcttctcacttgggctgaatccctaccctggcatcctggtgaacagcaagttctataaactggtgaaggatggataccaaatggcccagcctgcatttgcccnnaagaatatatacagcatcatgcaggcctgctgggcttgggagcccacccacaganccancttccagcagatctg

SEQ ID NO: 2706 - DNA, 478 bp, Homo sapiens
  misc_feature 3, 10, 11, 78, 112, 130, 150, 231, 457: n = A,T,C or G
gancacctgnnacaaggaggatggacggcccctggagctccgggacctgcttcacttctccagccaagtagcccaggnatggccttcctcgcttccaagaattgcatccacngggacgtggcagcgcgtnacgtgctgttgaccaatggncatgtggccaagattggggacttcgggctggctagggacatcatgaatgactccaactacattgtcaagggcaatgccgcnctgcctgtgaagtggatggccccagagagcatctttgactgtgtctacacggttcagagcgacgtctggtcctatggcatcctcctctgggagatcttctcacttgggctgaatccctaccctggcatcctggtgaacagcaagttctataaactgggtgaaaggatggataccaaatggcccagcctgcattttgcccccaaagaatatatacaagcatccatgnaggcccttctgggccttggag

SEQ ID NO: 2707 - DNA, 218 bp, Homo sapiens
gcgagcaaggggatatcgcccagcccttgctgcagcccaacaactatcagttctgctgaggagttgacgacagggagtaccactctcccctcccacaaacttcaactcctccatggatggggcgacacggggagaacatacaaactctgccttcggtcatttcactcaacagctcggcccagctctgaaacttgggaaggtgagggattcaggggagg

SEQ ID NO: 2708 - DNA, 556 bp, Homo sapiens
taagctcggaattcggctcgaggcgagcaaggggatatcgcccagcccttgctgcagcccaacaactatcagttctgctgaggagttgacgacagggagtaccactctcccctcccacaaacttcaactcctccatggatggggcgacacggggagaacatacaaactctgccttcggtcatttcactcaacagctcggcccagctctgaaacttgggaaggtgagggattcaggggaggtcagaggatcccacttcctgagcatgggccatcactgccagtcaggggctgggggctgagccctcacccccccctcccctactgttctcatggtgttggcctcgtgtttgctatgccaactagtagaaccttctttcctaatccccttatcttcatggaaatggactgactttatgcctatgaagtccccaggagctacactgatactgagaaaaccaggctctttggggctagacagactggcagagagtgagatctccctctctgagaggagcagcagatgctcacagaccacactcagctcaggccccttgga

SEQ ID NO: 2709 - DNA, 319 bp, Homo sapiens; identical to SEQ ID NO: 439

SEQ ID NO: 2710 - DNA, 456 bp, Homo sapiens
attccgttgctgtcgagggtcactaccagtacaagagcatccctgtggaggacaaccacaaggcagacatcagctcctggttcaacgaggccattgacttcatagactccatcaagaatgctggaggaagggtgtttgtccactgccaggcaggcatttcccggtcagccaccatctgcctggcttaccttatgaggactaatcgagtcaagctggacgaggcctttgagtttgtgaagcagaggcgaagcatcatctctcccaacttcagcttcatgggccagctgctgcagtttgagtcccaggtgctggctccgcactgttcggcagaggctgggagccccgccatggctgtgctcgaccgaggcacctccaccaccaccgtgttcaacttccccgtctccatccctgtccactccacgaacagtgcgctgagctaccttcagagccccatta

SEQ ID NO: 2711 - DNA, 533 bp, Homo sapiens
agtttttaaataatgaatattatttaataccacaacagaattatccccaatttccaataagtcctatcattgaaaattcaaatataagtgaagaaaaaattagtagatcaacaatctaaacaaatccctcggttctaagatacaatggattccccatactggaaggactctgaggctttattcccccactatgcatatcttatcattttattattatacacacatccatcctaaactatactaaagcccttttcccatgcatggatggaaatggaagatttttttttaacttgttctaaaagtcttaatatgggctgttgccatgaaggcttgcagaattgagtccattttctagctgcctttattcacatagtggacggggtacctaaaagtactggggttgactcagagagtcgctgtcattctgtcattgctgctactctaacactgagcaacactctcccagtggcagatcccctgtatcattccaagaggagcattcatccctttgctctaatgatcaggaatgatgc

SEQ ID NO: 2712 - DNA, 246 bp, Homo sapiens
aatgcactaactcaataccaagatgagtttttaaataatgaatattatttaataccacaacagaattatccccaatttccaataagtcctatcattgaaaattcaaatataagtgaagaaaaaattagtagatcaacaatctaaacaaatccctcggttctaagatacaatggattccccatactggaaggactctgaggctttattcccccactatgcatatcttatcattttattattatacac

SEQ ID NO: 2713 - DNA, 407 bp, Homo sapiens
ggccgcccttttttttttttttttttttttttttttttgggcaaaaaggggcttttttttttttccccccccctttttttaacccttcccctaatatttcccccaaaaaaaaaaattttttttttttgggggggggaaaaaaaagggaaaaaaaacccccccccccggggggggaaaaaaaccccccaaaaaccccccttttgggggggtccccccccatgggggttccccccccaatttttttcccccccccaaaaaaatttttaacccccccccaagggggtggaaaaccttaaaaaaaaccccccggaaaaaccaaaaccccttttttaaaaaaaaaaaaaaaatttttggggggcaaaaccccccccccccaaaaaacccccccccccccccttaaaaaaaaa

SEQ ID NO: 2714 - DNA, 359 bp, Homo sapiens
  misc_feature 1, 53, 121, 123, 128, 133, 142, 150, 174, 179, 183, 186,196, 200, 201, 204, 207, 212, 215, 218, 224, 229, 230, 231,243, 244, 249, 260, 261, 267, 268, 270, 273, 279, 289, 291,295, 301, 303, 305, 312, 315, 337, 345, 357: n = A,T,C or G
ncggggactgcgcggcggtgcagagccgggcgtgggcgagaacgaacgggctncctgcggctgagagcgtcgagtgtcaccatgggtatcacgcttggagcttcctaaaggacttcctggncngggcntcgcnctgcccgtntccaagancccggtcggccccaatcgagaggncaaanctgntgntgaaggtgcnagannccnagnaacangtnaantcttangaagnnntacaaaggggtnnattanttttttggtannattccnnangancaaggntttcctttcntnttgnagggtnancntggcaangtnattccttaatttcccaaccaangttttaantttggctttaangg

SEQ ID NO: 2715 - DNA, 394 bp, Homo sapiens
ttttttttttgcattaagtggtctttattgatgtttcacattcagttattatcaattcttcagttaattgtacaagtatgataaattattttctatttgctgtgggaatttaaatgtaaaataaatacaaaatacatgtgtggtttaatgaacactcaatgaagcatctcttctgaggtattcctttcagtctggttttatcccaggatctttttacttcccctaggaatagtctattaaaccacacaatggatctgtgaacttgtagatcaagttcactgtaaatctgtgaacttgtgttttaattacattagacatattttttgatctcatcatacaacaccaatacaaaaggcaccgcccatgcctctcaggcacattgggaccgggcacc

SEQ ID NO: 2716 - DNA, 292 bp, Homo sapiens
gggagcccaccagcaagaatgagttggagcaatcttttcatgtgacctccttaacagatatttactgaaggaatctaggttgtattttcagtggacaatgggaataaagcatttctaaagcaccgactggagaggaaggcaacagagacaaggagagaagccgagagacatgtctgcgtgctgccacgcatttgagcgattgctctgtgaagagttgtacactgaacactttcaggggaggctgtttacccaggcaatgtcctcaaacaagcctgtgccggggtgtcctgga

SEQ ID NO: 2717 - DNA, 495 bp, Homo sapiens
aattccgttgctgtcgctgcgcccaggtaatttgagcaaaggccacagtgaactccggcgtggctgaggaaggaggaggcacccacaggctgctgggaggagagcataaggctcaaaatggaaaatcataaatccaataataaggaaaacataacaattgttgatatatccagaaaaattaaccagcttccagaagcagaaaggaatctacttgaaaatggatcggtttatgttggattaaatgctgctctttgtggcctcatagcaaacagtctttttcgacgcatcttgaatgtgacaaaggctcgcatagctgctggcttaccaatggcagggataccttttcttacaacagacttaacttacagatgttttgtaagttttcctttgaatacaggtgatttggattgtgaaacctgtaccataacacggagtggactgactggtcttgttattggtggtctataccctgttttcttggctatacctgtaaat

SEQ ID NO: 2718 - DNA, 358 bp, Homo sapiens
tgcgaccgcgatctcctgcagctggtgcaccacctcggcgatggacagccgctcctccgggttcacctgcagcatggcgaggatgaggctgtggaagaccgtgtactgcgtgtcgtgcggggggatcgagtacttcccattgactattcgaagtttcgctccatcctcaaaagggtgctgccggaagcacagcaggtacaagatgcagcccagggcccagatatcctgcttctcgccgatcgggaagttggaatacaagtctatgatttctggtgttctatacattggtgttgtattcctcgtgatctgaaaaaatacaaacatttcaaaggaaaagttgcatcccacaaacagtatt

SEQ ID NO: 2719 - DNA, 406 bp, Homo sapiens
tggtacgcctgcaggtaccggtccggaattcccgggtcgacccacgcgtccgaggacatctggaatgtcactggtgcccaggtgtacttgagctgtgaggtcatcggaatcccgacacctgtcctcatctggaacaaggtaaaaaggggtcactatggagttcaaaggacagaactcctgcctggtgaccgggacaacctggccattcagacccggggtggcccagaaaagcatgaagtaactggctgggtgctggtatctcctctaagtaaggaagatgctggagaatatgagtgccatgcatccaattcccaaggacaggcttcagcatcagcaaaaattacagtggttgatgccttacatgaaataccagtgaaaaaaggtgaaggtgccgagctataaacct

SEQ ID NO: 2720 - DNA, 300 bp, Homo sapiens
  misc_feature 66, 71, 259: n = A,T,C or G
aggacatctggaatgtcactggtgcccaggtgtacttgagctgtgaggtcatcggaatcccgacanctgtnctcatctggaacaaggtaaaaaggggtcactatggagttcaaaggacagaacttctgcctggtgaccgggacaacctggccattcagacccggggtggcccagaaaagcatgaagtaactggctgggtgctggtatctcctctaagtaaggaagatgctggagaatatgagtgccatgcatccaattnccaaggacaggcttcagcatcagcaaaaattacagtggttg

SEQ ID NO: 2721 - DNA, 232 bp, Homo sapiens
ttcaaaagcttagagagaataagcttcttggtggtgaaatacaactctcacgtgtgctccagttctaaaattaacctgtgcctggtctctgaagccctttcttgctctgtgcctttcagccacatccttaggtgctaacggccatgagctccgactctccaaagtgagctccactttgggtctgaggagcccctggcagagtccacgctgcctcaggtatcatgggcgtaat

SEQ ID NO: 2722 - DNA, 453 bp, Homo sapiens; identical to SEQ ID NO: 677

SEQ ID NO: 2723 - DNA, 520 bp, Homo sapiens
agatgtgtgagaagtgccccacctgcccggatgcatgcagcaccaagagagattgcgtcgagtgcctgctgctccactctgggaaacctgacaaccagacctgccacagcctatgcagggatgaggtgatcacatgggtggacaccatcgtgaaagatgaccaggaggctgtgctatgtttctacaaaaccgccaaggactgcgtcatgatgttcacctatgtggagctccccagtgggaagtccaacctgaccgtcctcagggagccagagtgtggaaacacccccaacgccatgaccatcctcctggctgtggtcggtagcctcctccttgttgggcttgcactcctggctatctggaagctgcttgtcaccatccacgaccggagggagtttgcaaagtttcagagcgagcgatccagggcccgctatgaaatggcttcaaatctattatacagaaagcctatctccacgcacactgtggacttcaccttcaacaagttcaacaaatcctacaatgg

SEQ ID NO: 2724 - DNA, 404 bp, Homo sapiens
agatgtgtgagaagtgccccacctgcccggatgcatgcagcaccaagagagattgcgtcgagtgcctgctgctccactctgggaaacctgacaaccagacctgccacagcctatgcagggatgaggtgatcacatgggtggacaccatcgtgaaagatgaccaggaggctgtgctatgtttctacaaaaccgccaaggactgcgtcatgatgttcacctatgtggagctccccagtgggaagtccaacctgaccgtcctcagggagccagagtgtggaaacacccccaacgccatgaccatcctcctggctgtggtcggtagcctcctccttgttgggcttgcactcctggctatctggaagctgcttgtcaccatccacgaccggagggagtttgcaaagttt

SEQ ID NO: 2725 - DNA, 80 bp, Homo sapiens
atggcttcaaatccattatacagaaagcctatctccacgcacactgtggacttcaccttcaacaagttcaacaaatccta

SEQ ID NO: 2726 - DNA, 607 bp, Homo sapiens
tgccccacctgcccggatgcatgcagcaccaagagagattgcgtcgagtgcctgctgctccactctgggaaacctgacaaccagacctgccacagcctatgcagggatgaggtgatcacatgggtggacaccatcgtgaaagatgaccaggaggctgtgctatgtttctacaaaaccgccaaggactgcgtcatgatgttcacctatgtggagctccccagtgggaagtccaacctgaccgtcctcagggagccagagtgtggaaacacccccaacgccatgaccatcctcctggctgtggtcggtagcatcctccttgttgggcttgcactcctggctatctggaagctgcttgtcaccatccacgaccggagggagtttgcaaagtttcagagcgagcgatccagggcccgctatgaaatggcttcaaatccattatacagaaagcctatctccacgcacactgtggacttcaccttcaacaagttcaacaaatcctacaatggcactgtggactgatgtttccttctccgaggggctggagcggggatctgatgaaaaggtcagactgaaacgccttgcacggctgctcggcttgatcacaact

SEQ ID NO: 2727 - DNA, 583 bp, Homo sapiens
ggtatgtgccatcacaagcagatgtggcagtatttgaagccgtgtccagcccaccgcctgccgacttgtgtcatgccctacgttggtataatcacatcaagtcttacgaaaaggaaaaggccagcctgccaggagtgaagaaagctttgggcaaatatggtcctgccgatgtggaagacactacaggaagtggagctacagatagtaaagatgatgatgacattgacctctttggatctgatgatgaggaggaaagtgaagaagcaaagaggctaagggaagaacgtcttgcacaatatgaatcaaagaaagccaaaaaacctgcacttgttgccaagtcttccatcttactagatgtgaaaccttgggatgatgagacagatatggcgaaattagaggagtgcgtcagaagcattcaagcagacggcttagtctggggctcatctaaactagttccagtgggatacggaattaagaaacttcaaatacagtgtgtagttgaagatgataaagttggaacagatatgctggaggagcagatcactgcttttgaggactatgtgcagtccatggatgtggctgc

SEQ ID NO: 2728 - DNA, 296 bp, Homo sapiens
tacatcgaggggtatgtgccatcacaagcagatgtggcagtatttgaagccgtgtccagcccaccgcctgccgacttgtgtcatgccctacgttggtataatcacatcaagtcttacgaaaaggaaaaggccagcctgccaggagtgaagaaagctttgggcaaatatggtcctgccgatgtggaagacactacaggaagtggagctacagatagtaaagatgatgatgacattgacctctttggatctgatgatgaggaggaaagtgaaaaagcaaagaggctaagggaagaacg

SEQ ID NO: 2729 - DNA, 208 bp, Homo sapiens; identical to SEQ ID NO: 813
  misc_feature 97: n = A,T,C or G

SEQ ID NO: 2730 - DNA, 274 bp, Homo sapiens
  misc_feature 133: n = A,T,C or G
gcagcggctggagcggcagatcagccaggatgtcaagctggagccagacatcctgcttcgggccaagcaagatttcctgaagacggacagtgactcggacctacagctctacaaggaacagggtgaggggcanggtgaccggagcctgcgggagcgtgatgtgctggaacgggagtttcagcgggtcaccatctctggggaggagaagtgtggggtgccgttcacagacctgctggatgcagccaagatgtggtgcgggcgtcttcatccggga

SEQ ID NO: 2731 - DNA, 330 bp, Homo sapiens
ggccgccctttttttttttttttttttttgggcccagggggggcccccttgggaaaaacacccgggaaacttcccaaaggggccttgggggaattttttttaaaaaaaaacctttttttaaaaaaaactttgggatttaaattttttttccggccccttttttgggccgggtaccccaatttaaaaaaggggggctttttaaaggttgggaaaaaaaaaaaattgggggggcccaaaaaattggggggcccccaaaaaaaaagcggggtttggaaaaattttgggggggtttggaaatttgggccccaaaacgggggacccctttccccc

SEQ ID NO: 2732 - DNA, 525 bp, Homo sapiens
gaatttggccctcgaggccaagaattcggcacgagggttcacatagcaatttaatcaagtaatggttaattagttaccccctatatataaatatatgtaatcaatttcttcaaatagcttgcttacatgataatcaattagccaaccatgagtcatttagaatagtgataaatagaatacacagaatagtgatgaaattcaatttaaaaaatcacgttagcctccaaaccatttaattcaaatgaacccatcaactggatgccaactctggcgaatgtaggacctctgagtggctgtataattgttaattcaaatgaaattcatttaaacagttgacaaactgtcattcaacaattagctccaggaaataacagttatttcatcataaaacagtcccttcaaacacacaattgttctgctgaagagttgtcatcaacaatccaatgctcacctattcagttgctctgtggtcagtgtggctgcataacagtggattccatgaaaggagtcattttagtgatgagc

SEQ ID NO: 2733 - DNA, 788 bp, Homo sapiens
  misc_feature 42, 44, 48, 49, 51, 52, 53, 54, 55, 57, 59, 61, 62, 63, 64,68, 69, 70, 71, 73, 74, 75, 76, 77, 79, 80, 83, 87, 89,92, 93, 94, 95, 97, 98, 107, 112, 113, 117, 122, 125, 127,130, 131, 133, 671, 677, 685, 706, 713, 718, 725, 757, 771: n = A,T,C or G
  misc_feature 783: n = A,T,C or G
gttcacatagcaatttaatcaagtaatcattaattagggggngngggnngnnnnngngntnnnngtgnnnngnnnnngnnggngtgngngtnnnngnngggaggtgnggaanngttnttttntgngngannantagaatacacagaatagtgatgaaattcaatttaaaaaatcacgttagcctccaaaccatttaattcaaatgaacccatcaactggatgccaactctggcgaatgtaggacctctgagtggctgtataattgttaattcaaatgaaattcatttaaacagttgacaaactgtcattcaacaattagctccaggaaataacagttatttcatcataaaacagtcccttcaaacacacaattgttctgctgaagagttgtcatcaacaatccaatgctcacctattcagttgctctgtggtcagtgtggctgcataacagtggattccatgaaaggagtcattttagtgatgagctgccagtccattcccaggccaggctgtcgctggccatccattcagtcgattcagtcataggcgaatctgttctgcccgaagcttgtggtcaagcaaaaattcagccctgaaaatcagcacatctgttcggtggactaaaccacagttagttcgtcaagcagcaacccctgtggcatgaccgccantgggtncatgcgtntgcactgggagttggccaaanctccggnggtcncggggtnttttttgtgggttttttttttttagtcttgtntttgggtaagtggnttttttttttcnttggg

SEQ ID NO: 2734 - DNA, 156 bp, Homo sapiens; identical to SEQ ID NO: 504

SEQ ID NO: 2735 - DNA, 538 bp, Homo sapiens
tacgactcctatagggaatttggccctcgaggccaagaattcggcacgagggtgactttggctttgctcgcatcatcggcgagaagtcgttccgccgctcagtggtgggcacgccggcctacctggcacccgaggtgctgctcaaccagggctacaaccgctcgctggacatgtggtcagtgggcgtgatcatgtacgtcagcctcagcggcaccttccctttcaacgaggatgaggacatcaatgaccagatccagaacgccgccttcatgtacccggccagcccctggagccacatctcagctggagccattgacctcatcaacaacctgctgcaggtgaagatgcgcaaacgctacagcgtggacaaatctctcagccacccctggttacaggagtaccagacgtggctggacctccgagagctggaggggaagatgggagagcgatacatcacgcatgagagtgacgacgcgcgctgggagcagtttgcagcagagcatccgctgcctgggtctgggctgcccacggacaggga

SEQ ID NO: 2736 - DNA, 232 bp, Homo sapiens
  misc_feature 18, 56, 94, 103, 117, 128, 145, 184, 204, 219: n = A,T,C or G
tggctttgctcgcatcancggcgagaagtcgtcccgccgctcagtggtgggcacgncggcctacctggcacccgaggtcttgctcaaccagggntacaaccgntcgctcgacatgtngtcagtgggcntgatcatgtacgtcagnctcagcggcaccttccctttcaacgaggatgaggacatnaatgaccagatccagaacgncgacttcatgtaccnggccagaccctgg

SEQ ID NO: 2737 - DNA, 420 bp, Homo sapiens
taccggtccggaattcccgggtcgacccacgcgtccggcgtctctgctccaccaaggtgccctggacatgctgaccaaggtgatggccctagagctcgggccccacaagatccgagtgaatgcagtaaaccccacagtggtgatgacgtccatgggccaggccacctggagtgacccccacaaggccaagactatgctgaaccgaatcccacttggcaagtttgctgaggtagagcacgtggtgaacgccatcctctttctgctgagtgaccgaagtggcatgaccacgggttccactttgccggtggaagggggcttctgggcctgctgagctccctccacacacctcaagccccatgccgtgctcatcctacccccaatccctccaataaacctgattctgctgcccaaaaaaaaaaa

SEQ ID NO: 2738 - DNA, 294 bp, Homo sapiens
  misc_feature 2, 170: n = A,T,C or G
gngtctactgctccaccaagggtgccctggacatgctgaccaaggtgatggccctagagctcgggccccacaagatccgagtgaatgcagtaaaccccacagtggtgatgacgtccatgggccaggccacctggagtgacccccacaaggccaagactatgctgaaccgnatcccacttggcaagtttgctgaggtagagcacgtggtgaacgccatcctctttctgctgagtgaccgaagtggcatgaccacgggttccactttgccggtggaagggggttctggggctgctg

SEQ ID NO: 2739 - DNA, 55 bp, Homo sapiens
  misc_feature 42: n = A,T,C or G
gtctcggtccatgactctggagatccgagaaggaagaggctntggcctgagaaag

SEQ ID NO: 2740 - DNA, 394 bp, Homo sapiens
  misc_feature 22, 335, 365, 377, 383, 391: n = A,T,C or G
ttttttgttcatttatattttntttaagagctgtgcccagttttatcatctcacaagaatgaagcaagggacaaaggtaagtgccacgctccctggccactgggttcctggcaagctcccagccactaggtgccaatctcccttcaatgtactccttcttccccagagtgcagaagcgtatgaagacagttatgacatggacacatgcatgagctattatacataattacaaaagctgattctgtcatcaccacatcttgtctcatcagtaggagcgaatggctggcgggacggtggcacagtcagccttgttcaaagttttgtcgatcacgggncctatattccagagtgacctttcccagtgnccaacgttccanataggncagggtcntgc

SEQ ID NO: 2741 - DNA, 468 bp, Homo sapiens
agctcgggattcggctcgaggacctggaaattccaggtggtgagctgcatcgaaggggagcctgggcccgtcaggagcgtcctcttcaacccagacggctgctgcctgtacagcggctgccaggactcactgcgtgtctacggctgggaacctgagcggtgctttgatgtggtcctcgtcaactggggcaaggtggccgacctggccatctgcaatgaccagttgataggtgtggccttctcccagagcaacgtctcctcctacgtggtggatctgacgcgtgtcaccaggactggcacggtggcccgggaccctgtgcaggaccaccggcccctggcacagccactgcccaaccccagcgcccccctccggcgcatctatgagcggcccagcacaacctgcagcaagcctcagagggtgaagcagaactcagagagcgagcgccgcacccccagcagcgaggatgac

SEQ ID NO: 2742 - DNA, 254 bp, Homo sapiens
  misc_feature 48, 85, 97: n = A,T,C or G
gacctggagaagttccaggtggtgagctgcatcgaaggggagcctggncccgtcaggagcgtcctcttcaacccagacggctgcngcctgtacagcngctgccaggactcactgcgtgtctacggctgggaacctgagcggtgctttgatgtggtcctcgtcaactggggcaaggtggccgacctggccatctgcaatgaccagttgataggtgtggccttctcccagagcaacgtctcctcctacgtggtgga

SEQ ID NO: 2743 - DNA, 419 bp, Homo sapiens
gacccacgcgtccgtcttcaacttctttagtcctcctgagattcctatgattgggaagctggaaccacgagaagatgctatcctggatgaggactttgaaattgggcagattttacatgataatgtcatcctgaaatcaatctattactatactggagaagtcaatggtacctactatcaatttggcaaacattatggaaacaagaaatacagaaaataagtcaatctgaaagatttttcaagaatcttaaaatctcaagaagtgaagcagattcatacagccttgaaaaaagtaaaaccctgacctgtaacctgaacactattattccttatagtcaagtttttgtggtttcttggtagtctatattttaaaaatagtcctaaaaagtgtctaagtgccagtttattctatctaggct

SEQ ID NO: 2744 - DNA, 228 bp, Homo sapiens
  misc_feature 190: n = A,T,C or G
gaaccccgcccgcggccacagcgtctgctccacctccagcttgtacctgcaggatctgagcgccgccgcctcagagtgcatcgacccctcggtggtcttcccctaccctctcaacgacagcagctcgcccaagtcctgcgcctcgcaagactccagcgccttctctccgtcctcggattctctgcactcntcgacggagtcctccccgcagggcagccccgagcccct

SEQ ID NO: 2745 - DNA, 525 bp, Homo sapiens
aaccccgcccgcggccacagcgtctgctccacctccagcttgtacctgcaggatctgagcgccgccgcctcagagtgcatcgacccctcggtggtcttcccctaccctctcaacgacagcagctcgcccaagtcctgcgcctcgcaagactccagcgccttctctccgtcctcggattctctgctctcctcgacggagtcctccccgcagggcagccccgagcccctggtgctccatgaggagacaccgcccaccaccagcagcgactctgaggaggaacaagaagatgaggaagaaatcgatgttgtttctgtggaaaagaggcaggctcctggcaaaaggtcagagtctggatcaccttctgctggaggccacagcaaacctcctcacagcccactggtcctcaagaggtgccacgtctccacacatcagcacaactacgcagcgcctccctccactcggaaggactatcctgctgccaagagggtcaagttggacagtgtcagagtcctgagacagatcagc

SEQ ID NO: 2746 - DNA, 552 bp, Homo sapiens
tggaaggaactggtctgctcacacttgctggcttgcgcatcaggactggctttatctcctgactcacggtgcaaaggtgcactctgcgaacgttaagtccgtcccagcgcttggaatcctacggcccccacagccggatcccctcagccttccaggtcctcaactcccgcggacgctgaacaatggcctccatggggctacaggtaatgggcatcgcgctggccgtcctgggctggctggccgtcatgctgtgctgcgcgctgcccatgtggcgcgtgacggccttcatcggcagcaacattgtcacctcgcagaccatctgggagggcctatggatgaactgcgtggtgcagagcaccggccagatgcagtgcaaggtgtacgacttgctgctggcactgccgcaggacctgcaggcggcccgcgccctcgtcatcatcagcatcatcgtggctgctctgggcgtgctgctgtccgtggtggggggcaagtgtaccaactgcctggaggatgaaagcgccaaggccaagaccatgatcgtggcgggcgtgg

SEQ ID NO: 2747 - DNA, 519 bp, Homo sapiens
tggaaggaactggtctgctcacacttgctggcttgcgcatcaggactggctttatctcctgactcacggtgcaaaggtgcactctgcgaacgttaagtccgtcccagcgcttggaatcctacggcccccacagccggatcccctcagccttccaggtcctcaactcccgcggacgctgaacaatggcctccatggggctacaggtaatgggcatcgcgctggccgtcctgggctggctggccgtcatgctgtgctgcgcgctgcccatgtggcgcgtgacggccttcatcggcagcaacattgtcacctcgcagaccatctgggagggcctatggatgaactgcgtggtgcagagcaccggccagatgcagtgcaaggtgtacgacttgctgctggcactgccgcaggacctgcaggcggcccgcgccctcgtcatcatcagcatcatcgtggctgctctgggcgtgctgctgtccgtggtggggggcaagtgtaccaactgcctggaggatgaaagcg

SEQ ID NO: 2748 - DNA, 296 bp, Homo sapiens; identical to SEQ ID NO: 1614
  misc_feature 64, 187, 195: n = A,T,C or G

SEQ ID NO: 2749 - DNA, 273 bp, Homo sapiens
cttgcccatggcgaattgtggatgactgtggtggggcctttacgatgggtaccattggtggtggtatctttcaagcaatcaaaggttttcgcaattctccagtgggagtaaaccacagactacgagggagtttgacagctattaaaaccagggctccacagttaggaggtagctttgcagtttggggagggctgttttccatgattgactgtagtatggttcaagtcagaggaaaggaagatccctggaactccatcacaagtggtgccttaa

SEQ ID NO: 2750 - DNA, 386 bp, Homo sapiens; identical to SEQ ID NO: 399

SEQ ID NO: 2751 - DNA, 239 bp, Homo sapiens
ttttttttttcaaaaaagtcatggaggccatggggttggcttgaaaccagctttggggggttcgattccttccttttttgcctaaattttatgtatacgggttcttcaaatgtgtggtagggtggggggcatccatatagtcactccaggtttatggagggttcttctactattaggacttttcgcttcaaagcgaaggcttctcaaatcatgaaaattattaatattactgctgttaa

SEQ ID NO: 2752 - DNA, 623 bp, Homo sapiens
aaaaagtcatggaggccatggggttggcttgaaaccagctttggggggttcgattccttccttttttgtctagattttatgtatacgggttcttcgaatgtgtggtagggtggggggcatccatatagtcactccaggtttatggagggttcttctactattaggacttttcgcttcgaagcgaaggcttctcaaatcatgaaaattattaatattactgctgttagagaaatgaatgagcctacagatgataggatgtttcatgtggtgtatgcatcggggtagtccgagtaacgtcggggcattccggataggccgagaaagtgttgtgggaagaaagttagatttacgccgatgaatatgatagtgaaatggattttggcgtaggtttggtctagggtgtagcctgagaataggggaaatcagtgaatgaagcctcctatgatggcaaatacagctcctattgataggacatagtggaagtgagctacaacgtagtacgtgtcgtgtagtacgatgtctagtgatgagtttgctaatacaatgccagtcaggccacctacggtgaaaagaaagatgaatcctagggctcagagcactgcagcagatcatttcatattgct

SEQ ID NO: 2753 - DNA, 265 bp, Homo sapiens
ggcttagcggataacaatttcacacaggagttgcaccataatcatcgctatccccaccggcgtcaaagtatttagctgactcgccacactccacggaagcaatatgaaatgatctgctgcagtgctctgagccctaggattcatctttcttttcaccgtaggtggcctgactggcattgtattagcaaactcatcactagacatcgtactacacgacacgtactacgttgtagctcacttccactatgtcctatcaataggagct

SEQ ID NO: 2754 - DNA, 625 bp, Homo sapiens
aatcatcgctatccccaccggcgtcaaagtatttagctgactcgccacactccacggaagcaatatgaaatgatctgctgcagtgctctgagccctaggattcatctttcttttcaccgtaggtggcctgactggcattgtattagcaaactcatcactagacatcgtactacacgacacgtactacgttgtagctcacttccactatgtcctatcaataggagctgtatttgccatcataggaggcttcattcactgatttcccctattctcaggctacaccctagaccaaacctacgccaaaatccatttcactatcatattcatcggcgtaaatctaactttcttcccacaacactttctcggcctatccggaatgccccgacgttactcggactaccccgatgcatacaccacatgaaacatcctatcatctgtaggctcattcatttctctaacagcagtaatattaataattttcatgatttgagaagccttcgcttcgaagcgaaaagtcctaatagtagaagaaccctccataaacctggagtgactatatggatgccccccaccctaccacacattcgaagaacccgtatacataaaatctagacaaaaaaggaag

SEQ ID NO: 2755 - DNA, 253 bp, Homo sapiens
ggcttgtaatacgactcactatagggctttttttttttcaaaaaagtcatggaggccatggggttggcttgaaaccagctttggggggttcgattccttccttttttgtctaaattttatgtatacgggttcttcaaatgtgtggtagggtggggggcatccatatagtcactccaggtttatggagggttcttctactattaggacttttcgcttcaaagcgaaggcttctcaaatcatgaaaattattaat

SEQ ID NO: 2756 - DNA, 290 bp, Homo sapiens
caaactcatcactagacatcgtactacacgacacgtactacgttgtagctcacttccactatgtcctatcaataggagctgtatttgccatcataggaggcgtcattcactgatttcccctattctcaggctacaccctagaccaaacctacgccaaaatccatttcactatcatattcatcggcgtaaatctaactttcttcccacaacactttctcggcctatccggaatgccccgacgttattcggactaccccgatgcatacaccacatgaaacatcctatcatct

SEQ ID NO: 2757 - DNA, 638 bp, Homo sapiens
  misc_feature 522, 634, 636: n = A,T,C or G
atatttacagtaggaatagacgtagacacacgagcatatttcacctccgctaccataatcatcgctatccccaccggcgtcaaagtatttagctgactcgccacactccacggaagcaatatgaaatgatctgctgcagtgctctgagccctaggattcatctttcttttcaccgtaggtggcctgactggcattgtattagcaaactcatcactagacatcgtactacacgacacgtactacgttgtagctcacttccactatgtcctatcaataggagctgtatttgccatcataggaggcttcattcactgatttcccctattctcaggctacaccctagaccaaacctacgccaaaatccatttcactatcatattcatcggcgtaaatctaactttcttcccacaacactttctcggcctatccggaatgccccgacgttattcggactaccccgatgcatacaccacatgaaacatcctatcatctgtaggctcattcatttctctaacagcagtnatattaataattttcatgatttgagaagccttcgcttcgaagcgaaaagtcctaatagtagaagaacccttcataaacctggagtgactatatggatgccccccaccctacnanca

SEQ ID NO: 2758 - DNA, 531 bp, Homo sapiens
ggcttagcggataacaatttcacacaggagttgcaccatatatttacagtaggaatagacgtagacacacgagcatatttcacctccgctaccataatcatcgctatccccaccggcgtcaaagtatttagctgactcgccacactccacggaagcaatatgaaatgatctgctgcagtgctctgagccctaggattcatctttcttttcaccgtaggtggcctgactggcattgtattagcaaactcatcactagacatcgtactacacgacacgtactacgttgtagctcacttccactatgtcctatcaataggagctgtatttgccatcataggaggcttcattcactgatttcccctattctcaggctacaccctagaccaaacctacgccaaaatccatttcactatcatattcatcggcgtaaatctaactttcttcccacaacactttctcggcctatccggaatgccccgacgttactcggactaccccgatgcatacaccacatgaaacatcctatcatct

SEQ ID NO: 2759 - DNA, 625 bp, Homo sapiens
atatttacagtaggaatagacgtagacacacgagcatatttcacctccgctaccataatcatcgctatccccaccggcgtcaaagtatttagctgactcgccacactccacggaagcaatatgaaatgatctgctgcagtgctctgagccctaggattcatctttcttttcaccgtaggtggcctgactggcattgtattagcaaactcatcactagacatcgtactacacgacacgtactacgttgtagctcacttccactatgtcctatcaataggagctgtatttgccatcataggaggcttcattcactgatttcccctattctcaggctacaccctagaccaaacctacgccaaaatccatttcactatcatattcatcggcgtaaatctaactttcttcccacaacactttctcggcctatccggaatgccccgacgttactcggactaccccgatgcatacaccacatgaaacatcctatcatctgtaggctcattcatttctctaacagcagtaatattaataattttcatgatttgagaagtcttcgcttcgaagcgaaaagtcctaatagtagaagaacccttcataaacctggagtgactatatggatgccccc

SEQ ID NO: 2760 - DNA, 217 bp, Homo sapiens
tttttttttttaaaaagtcatggaggccatggggttggcttgaaaccacctttggggggttcaatcccttccttctttgtctaaattttatgtatacgggttcttcaaatgtgtggtaggggggggggcatccatatagcccctccaggtttatggagggttcttctactattagaacttttcccttcaaagcaaaggcttctcaaatcatgaaaat

SEQ ID NO: 2761 - DNA, 636 bp, Homo sapiens
  misc_feature 496, 562, 564, 605, 635: n = A,T,C or G
aaagtcatggaggccatggggttggcttgaaaccagctttggggggttcgattccttccttctttgtctagattttatgtatacgggttcttcgaatgtgtggtagggtggggggcatccatatagtcactccaggtttatggagggttcttctactattaggacttttcgcttcgaagcgaaggcttctcaaatcatgaaaattattaatattactgctgttagagaaatgaatgagcctacagatgataggatgtttcatgtggtgtatgcatcggggtagtccgagtaacgtcggggcattccggataggccgagaaagtgttgtgggaagaaagttagatttacgccgatgaatatgatagtgaaatggattttggcgtaggtttggtctagggtgtagcctgagaataggggaaatcagtgaatgaagcctcctatgatggcaaatacagctcctattgataggacatagtggaagtgagctacaacgtantacgtgtcgtgtagtacgatgtctagtgatgagtttgctaatacaatgccagtcaggccacctacngngaaaaagaaagatgaatcctagggctcaaaacacctgcacnagatcatttcatattggcttccgtggagtnc

SEQ ID NO: 2762 - DNA, 279 bp, Homo sapiens
ggcttagcggataacaatttcacacaggagttgcaccataatcatcgctatccccaccggcgtcaaagtatttagctgactcgccacactccacggaagcaatatgaaatgatctgctgcagtgctctgagccctaggattcatctttcttttcaccgtaggtggcctgactggcattgtattagcaaactcatcactagacatcgtactacacgacacgtactacgttgtagctcacttccactatgtcctatcaataggagctgtatttgccatcat

SEQ ID NO: 2763 - DNA, 623 bp, Homo sapiens
  misc_feature 537: n = A,T,C or G
aatcatcgctatccccaccggcgtcaaagtatttagctgactcgccacactccacggaagcaatatgaaatgatctgctgcagtgctctgagccctaggattcatctttcttttcaccgtaggtggcctgactggcattgtattagcaaactcatcactagacatcgtactacacgacacgtactacgttgtagctcacttccactatgtcctatcaataggagctgtatttgccatcataggaggcttcattcactgatttcccctattctcaggctacaccctagaccaaacctacgccaaaatccatttcactatcatattcatcggcgtaaatctaactttcttcccacaacactttctcggcctatccggaatgccccgacgttactcggactaccccgatgcatacaccacatgaaacatcctatcatctgtaggctcattcatttctctaacagcagtaatattaataattttcatgatttgagaagccttcgcttcgaagcgaaaagtcctaatagtagaagaaccctncataaacctggagtgactatatggatgccccccaccctaccacacattcgaagaacccgtatacataaaatctagacaaaaaagga

SEQ ID NO: 2764 - DNA, 189 bp, Homo sapiens
  misc_feature 170, 173: n = A,T,C or G
tggcctttcccccttcatgggagacaacgataacgaaaccttggccaacgttacctcagccacctgggacttcgacgacgaggcattcgatgagatctccgacgatgccaaggatttcatcagcaatctgctgaagaaagatatgaaaaaccgcctggactgcacgcagnctntcagcatccatggcta

SEQ ID NO: 2765 - DNA, 507 bp, Homo sapiens; identical to SEQ ID NO: 645

SEQ ID NO: 2766 - DNA, 193 bp, Homo sapiens
ttttttttttttttttttttttttttggccgagactccaagactattatttttatttccggacaaaaacatctgcttcacacagtgcacggcatcaaatgaagaggaaagaacttgtatcccaaagcctggctttctgtatcatccacaaattaagacagcatctgctgagcccatgctgagcctgtcacagt

SEQ ID NO: 2767 - DNA, 235 bp, Homo sapiens
  misc_feature 183, 184, 185, 193: n = A,T,C or G
cccacttccccaggagcaggccacagacccccttgtggacagcctgggcagtggcattgtctactcagcccttacctgccacctgtgcggccacctgaaacagtgtcatggccaggaggatggtggccagacccctgtcatggccagtccttgctgtggctgctgctgtggagacaggtcctnnncccctacnacccccctgagggccccagacccctctccaggtggggttcca

SEQ ID NO: 2768 - DNA, 493 bp, Homo sapiens
agaatttcagcagttctctgatttttatattttattcctcttcctatccaatccctgccttttgagtccaggtggtaagtacattttctttaacgtttttcctgcttttcttcccaaatgtgtctttttctttgggctactgtaccctgcttccagtgctgtccccggcataggtccatctctgcagaagccatttcaggagtacctggaggctcaacggcagaagcttcaccacaaaagcgaaatgggcacaccacagggagaaaactgcttgtcctggatgtttgaaaagtcggtcgatgtcatggtgtgttacttcatcctatctatcattaactccatggcacaaagttatgccaaacgaatccagcagcggttgaactcagaggagaaaactaaataagtagagaaagttttaaactgcagaaattggagtggatgggttctgccttatattgggaggactccaagccgggaaggaaaattccctttt

SEQ ID NO: 2769 - DNA, 345 bp, Homo sapiens
agaatttcagcagttctctgatttttatattttattcctcttcctatccaatccctgccttttgagtccaggtggtaagtacattttctttaacgtttttcctgcttttcttcccaaatgtgtctttttctttgggctactgtaccctgcttccagtgctgtccccggcataggtccatctctgcagaagccatttcaggagtacctggaggctcaacggcagaagcttcaccacaaaagcgaaatgggcacaccacagggagaaaactggttgtcctggatgtttgaaaagtcggtcgttgtcatggtgtgttacttcatcctatctatcattaactccatggt

SEQ ID NO: 2770 - DNA, 374 bp, Homo sapiens
tagaagagctaacctcacactcatcccactctaaactatgtgattcaacactgattttacatccaacaaagtgaaatcttgatagttgggtgtaaaaaggagagtaatggagatttcagagtagttggggttgcttacttttcatttttaattctttaggttttgtaagttacacacttcaagcattatagatgatcctctttttactactgaactaatgaagcctttttcattgcattgttctgcatttatttctacagggagaaaactggttgtcctggatgtttgaaaagttggtcgttgtcatggtgtgttacttcatcctatctatcattaactccatggcacaaagttatgccaaacgaatccagcag

SEQ ID NO: 2771 - DNA, 360 bp, Homo sapiens
tttttttttttttttttttgtgcggtgggaattctctaattgtatcatgtgggccttttgaaagtaacaaacagaaggccagtctgctgcaagtttgctgctgaacatcacattccaccctaagaaaacacaaggtggattgcatcgagggtggataccttaccttagcacggaaggaaaaagtatgtcagtgcaaagtatggactaaactgctttcaggaaaaaagttgtaaaaattgatacaggttggaaaagggaattttccttcccggcttggagtcctcccaatttaaggcagaacccatccactccaatttctgcagtttaaaactttctctacttatttagttttctcctctg

SEQ ID NO: 2772 - DNA, 247 bp, Homo sapiens
ctggaattgtcatctttggaacagtgattgcaacagcacttatgggattgacagagaaactgattttttccctgagagatcctgcatacagtacattcccgccagaaggtgttttcgtaaatacgcttggccttctgatcctggtgttcggggccctcattttttggatagtcaccagaccgcaatggaaacgtcctaaggagccaaattctaccattcttcatccaaatggaggcatgaacaggga

SEQ ID NO: 2773 - DNA, 350 bp, Homo sapiens
taatggatttgtttggagatggcatgttggtagacgactgaatatggaaaggatatcaagttatctattttgttaattttatttttgttttttatcatctagatttttatcatggattagtctgaaatttaaagttctggccagtcggttttctttcatcttgtagtttttacagtatttccactgtgcatatgcaaaatgggtattacataactgtatcatatttggtattgataatttttttttttttttggaaacgggtttttgttttggcccagcccaaaaacatcccttggttaccccttccggggaaaaaaaaccaaacccctttttcggggaaaaaaaaaggg

SEQ ID NO: 2774 - DNA, 455 bp, Homo sapiens; identical to SEQ ID NO: 530
  misc_feature 81, 195, 231, 247, 298, 307, 317, 395, 427, 446, 451: n = A,T,C or G

SEQ ID NO: 2775 - DNA, 444 bp, Homo sapiens
  misc_feature 17, 20, 391, 430: n = A,T,C or G
ttttctgacgtctgttnctnaggctggaagaaatgagcagaaaacaagggatgagtactttttagagtatgtgcatgttacgtaatacctgtttctgggcaatgctgcttcttctgactcaacaaatggggagagcaaattgaaaatgcgtaaattggaaggcaagttctgaaattaaacgttgtactttggcctgatgttctgacctttaaggaagcaagagtttgtaaacttccaaatatttactattctgaactgccgtgtaaacctgacgtattcccaagtcaacataccagtataccaataggatgtgaataatgtttgtgttgagtttaaaaccatagcagttttgctctggcaagtaatggaaagcgttctcgcttcctgagtntgagctccagcagactgcagagtggccagtgccacagtngtagcctgactttc

SEQ ID NO: 2776 - DNA, 502 bp, Homo sapiens
ggttctgcgctggtcggcggagtagcaagtggccatggggagcctcagcggtctgcgcctggcagcaggaagctgttttaggttatgtgaaagagatgtttcctcatctctaaggcttaccagaagctctgatttgaagagaataaatggattttgcacaaaaccacaggaaagtcccggagctccatcccgcacttacaacagagtgcctttacacaaacctacggattggcagaaaaagatcctcatatggtcaggtcgcttcaaaaaggaaggtgaaatcccagagactgtctcgttggagatgcttgatgctgcaaagaacaagatgcgagtgaagatcagctatctaatgattgccctgacggtggtaggatgcatcttcatggttattgagggcaagaaggctgcccaaagacacgagactttaacaagcttgaacttagaaaagaaagctcgtctgaaagaggaagcagctatgaaggccaaaacagagtagcag

SEQ ID NO: 2777 - DNA, 377 bp, Homo sapiens
ggttctgcgctggtcggcggagtagcaagtggccatggggagcctcagcggtctgcgcctggcagcaggaagctgttttaggttatgtgaaagagatgtttcctcatctctaaggcttaccagaagctctgatttgaagagaataaatggattttgcacaaaaccacaggaaagtcccggagctccatcccgcacttacaacagagtgcctttacacaaacctacggattggcagaaaaagatcctcatatggtcaggtcgcttcaaaaaggaaggtgaaatcccagagactgtctcgttggagatgcttgatgctgcaaagaacaagatgcgagtgaagatcagctatctaatgattgccctgacggtggtaggaa

SEQ ID NO: 2778 - DNA, 552 bp, Homo sapiens; identical to SEQ ID NO: 753

SEQ ID NO: 2779 - DNA, 186 bp, Homo sapiens
ctgctcagcctggtgaacacacagcccgatttacccagtccccactccaggtgcagctgcggcttatctctcagcccagcgagatgccagccttcctgtcccgggccagcgctctgacatgcagaaggtgaccctgggcctgcttgtgttcctggcaggctttcctgtcctggacgccaatgacct

SEQ ID NO: 2780 - DNA, 121 bp, Homo sapiens
tctgctcagcctggtgaaccacacaggcccgagtttcacccagtccccactccacggtgcagctgcggcttatctctcagcccagcgagatgccagccttcctgtcccgggccagcgctct

SEQ ID NO: 2781 - DNA, 336 bp, Homo sapiens
  misc_feature 336: n = A,T,C or G
agggacccgcagctcagctacagcacagatcagcaccatgaagcttctcacgggcctggttttctgctccttggtcctgagtgtcagcagccgaagcttcttttcgttccttggcgaggcttttgatggggctcgggacatgtggagagcctactctgacatgagagaagccaattacatcggctcagacaaatacttccatgctcgggggaactatgatgctgccaaaaggggacctgggggtgcctgggccgcagaagtgatcagcaatgccagagagaatatccagagactcacaggccatggtgcggaggactcgctggccgatcaggctgn

SEQ ID NO: 2782 - DNA, 460 bp, Homo sapiens
tgcagacggaggtcaggtcttcctctttcctgagactggatctgttcaaacagcaaacgcccacagatggcccagaggtggtggtagtcagggtgtgtgggtgtttttagggttctttagtgttgtttctttcacccaggggtggtggtcccagccagtttggtgctgacggtgagaggaaattagaatctgtttgcaaattgtccaacccaccccctcaacatgaggggcttccattttctgtgttttgtaagggaactgtttccttcatgccgccatgttcctgatattagttctgatttctttttaacaaatgttatcatgattaagaaaatttccagcactttaatggccaattaactgagaatgtaagaaaattgatgctgtacaaggcaaataaagctgtttattaaccttgaaaaaaaaaaaaaaaaaaaaaaaaaaaaaaaattttttgggg

SEQ ID NO: 2783 - DNA, 432 bp, Homo sapiens
  misc_feature 46, 151, 350, 362, 383, 403, 417: n = A,T,C or G
ggggttgcagacggaggtcaggtcttcctctttcctgagactgganctgttcaaacagcaaacgcccacagatggcccagaggtggtggtagtcagggtgtgtgggtgtttttagggttctttagtgttgtttctttcacccaggggtggntggtcccagccagtttggtgctgacggtgagaggaaattagaatctgtttgcaaattgtccaacccaccccctcaacatgaggggcttccattttctgtgttttgtaagggaactgtttccttcatgccgccatgttcctgatattagttctgatttctttttaacaaatgttatcatgattaagaaaatttccagcanttaatgggccanttaactgagaatgtaagaaantgatgctgttacaaggcaantaaagccgttttanttaaccctgaaaaaa

SEQ ID NO: 2784 - DNA, 467 bp, Homo sapiens
acgtgacgcggggccaggcggccgtacagcagctgcaggcggagggcctgagcccgcgcttccaccagctggacatcgacgatctgcagagcatccgcgccctgcgcgacttcctgcgcaaggagtacgggggcctggacgtgctggtcaacaacacgggcatcgccttcaaggttgctgatcccacaccctttcatattcaagctgaagtgacgatgaaaacaaatttctctggtacccgagatgtgtgcacagaattactccctctaataaaaccccaagggagagtggtgaacgtacctagcatcatgagcgtcagagcccttaaaagctgcagcccagagctgcagcagaagttccgcagtgagaccatcactgaggaggagctggtggggctcatgaacaagtttgtggaggatacaaagaagggagtgcaccagaaggagggctggcccagcagcgcatac

SEQ ID NO: 2785 - DNA, 626 bp, Homo sapiens
tacggccgggacgtgacgcggggccaggcggccgtacagcagctgcaggcggagggcctgagcccgcgcttccaccagctggacatcgacgatctgcagagcatccgcgccctgcgcgacttcctgcgcaaggagtacgggggcctggacgtgctggtcaacaacacgggcatcgccttcaaggttgctgatcccacaccctttcatattcaagctgaagtgacgatgaaaacaaatttctctggtacccgagatgtgtgcacagaattactccctctaataaaaccccaagggagagtggtgaacgtacctagcatcatgagcgtcagagcccttaaaagctgcagcccagagctgcagcagaagttccgcagtgagaccatcactgaggaggagctggtggggctcatgaacaagtttgtggaggatacaaagaagggagtgcaccagaaggagggctggcccagcagcgcatacggggtgacgaagattggcgtcaccgttctgtccaggatccacgccaggaaactgagtgagcagaggaaaggggacaagatcctcctgaatgcctgctgcccagggtgggtgagaactgacatggcgggacccaaggccaccaagagccc

SEQ ID NO: 2786 - DNA, 487 bp, Homo sapiens
tggcctgttcctcagcgagggcctgaagctagtggataagtttttggaggatgttaaaaagttgtaccactcagaagccttcactgtcaacttcggggacaccgaagaggccaagaaacagatcaacgattacgtggagaagggtactcaagggaaaattgtggatttggtcaaggagcttgacagagacacagtttttgccctggtgaattacatcttctttaaaggcaaatgggagagaccctttgaagtcaaggacaccgaggaagaggacttccacgtggaccaggcgaccaccgtgaaggtgcctatgatgaagcgtttaggcatgtttaacatccagcactgtaagaagctgtccagctgggtgctgctgatgaaatacctgggcaatgccaccgccatcttcttcctgcctgatgaggggaaactacagcacctggaaaatgaactcacccacgatatcatcaccaagttcctggaaaat

SEQ ID NO: 2787 - DNA, 345 bp, Homo sapiens
tggcctgttcctcagcgagggcctgaagctagtggataagtttttggaggatgttaaaaagttgtaccactcagaagccttcactgtcaacttcggggacaccgaagaggccaagaaacagatcaacgattacgtggagaagggtactcaagggaaaattgtggatttggtcaaggagcttgacagagacacagtttttgccctggtgaattacatcttctttaaaggcaaatgggagagaccctttgaagtcaaggacaccgaggaagaggacttccacgtggaccaggcgaccaccgtgaaggtgcctatgatgaagcgtttaggcatgtttaacatccagca

SEQ ID NO: 2788 - DNA, 495 bp, Homo sapiens
cggccgcccttttttttttttttttttttttttttttttttttttttttttttttttttttttttttttcaaaaaaaaatttttttgggtttttttttttaaaactttttttttttttttttttggggggggccaaattcccccccaaaaaaaaaaaaaaaggggggggtttcccccccccccctttttttttttgggggggtttttttttttggggggggccccccccccctttttttttttttggaaaaaaatcccccccttggggggggtttctttttcccaaagggagttttttttcccccccccccgggggggggggggggtttttttttttttaaaaaaaaaacccccggaaaaaaaaaaacccccccccccccccccccccccaaaaaaaaaaaaggggggaaaaatgggggccccccctttttttttttttttttttttggggggggggaaaaaaaaccccccccccctttttgggggggttttttt

SEQ ID NO: 2789 - DNA, 503 bp, Homo sapiens
attccgttgctgtcgagcatgaccaagcagctgggtgacttctggacacggatggaggagctccgccaccaagcccggcagcagggggcagaggcagtccaggcccagcagcttgcggaaggtgccagcgagcaggcattgagtgcccaagagggatttgagagaataaaacaaaagtatgctgagttgaaggaccggttgggtcagagttccatgctgggtgagcagggtgcccggatccagagtgtgaagacagaggcagaggagctgtttggggagaccatggagatgatggacaggatgaaagacatggagttggagctgctgcggggcagccaggccatcatgctgcgctcagcggacctgacaggactggagaagcgtgtggagcagatccgtgaccacatcaatgggcgcgtgctctactatgccacctgcaagtgatgctacagcttccagcccgttgccccactcatctgccgcctttgcttttggttgggggc

SEQ ID NO: 2790 - DNA, 581 bp, Homo sapiens
agtggcactgcaggaagctcaggacaccatgcaaggcaccagccgctcccttcggcttatccaggacagggttgctgaggttcagcaggtactgcggccagcagaaaagctggtgacaagcatgaccaagcagctgggtgacttctggacacggatggaggagctccgccaccaagcccggcagcagggggcagaggcagtccaggcccagcagcttgcggaaggtgccagcgagcaggcattgagtgcccaagagggatttgagagaataaaacaaaagtatgctgagttgaaggaccggttgggtcagagttccatgctgggtgagcagggtgcccggatccagagtgtgaagacagaggcagaggagctgtttggggagaccatggagatgatggacaggatgaaagacatggagttggagctgctgcggggcagccaggccatcatgctgcgctcagcggacctgacaggactggagaagcgtgtggagcagatccgtgaccacatcaatgggcgcgtgctctactatgccacctgcaagtgatgctacagcttccagcccgttgccccactcatct

SEQ ID NO: 2791 - DNA, 598 bp, Homo sapiens; identical to SEQ ID NO: 1213

SEQ ID NO: 2792 - DNA, 316 bp, Homo sapiens
ctgcccttcacctcgcagtggacctgcaaaatcctgacctggtgtcactcctgttgaagtgtggggctgatgtcaacagagttacctaccagggctattctccctaccagctcacctggggccgcccaagcacccggatacagcagcagctgggccagctgacactagaaaaccttcagatgctgccagagagtgaggatgaggagagctatgacacagagtcagagttcacggagttcacagaggacgagctgccctatgatgactgtgtgtttggaggccagcgtctgacgttatgagcgcaaaggggctgaaa

SEQ ID NO: 2793 - DNA, 275 bp, Homo sapiens
atgattaggagaagtggtggccacagtcgaaaaatcccaaggcccaaacctgcaccactgactgctgaaatacagcaaaagattttgcatttgccaacatcttgggactggagaaatgttcatggtatcaattttgtcagtcctgttcgaaaccaagcatcctgtggcagctgctactcatttgcttctatgggtatgctagaagcgagaatccgtatactaaccaacaattctcagaccccaatcctaagccctcaggaggttgtgtcttgtag

SEQ ID NO: 2794 - DNA, 522 bp, Homo sapiens
cagaagggaacaccagagctttgctaataattagtgtggtcaagagccgtctgagcctaatgagtcccagctgcattaggttaagagactcttccagagccatcgccaggtcgggaatggcacctctccctaggatacacagcctgcaggtccccaggacctggatgacacccgcctcactgtggcagtgtattgcctgttaattgctgctaattctaattctgatgatgactcctactccattgtttaccccaaagcatcagctaggctggagtgatttgttacaaatgagcaaaagatgagtccttgcttccctcagaaataaaaggagctcagctgcagcgttgcattgggcttcttggcctcccaactcttcccactcccagaatccagaagtaagctctgcatgttccccttcctgggaggaaaccagttgtcagaaggatgtatgatgaccccctcccctcccatccttcacctcctaagcagtcctggcttttcctcatcactcccctctacagt

SEQ ID NO: 2795 - DNA, 331 bp, Homo sapiens
aacaccagagctttgctaataattagtgtggtcaagagccgtctgagcctaatgagtcccagctgcattaggttaagagactcttccagagccatcgccaggtcttgaatggcacctctccctaggatacacagcctgcaggtccccaggacctggatgacacccgcctcactgtggcagtgtattgcctgttaattgctgctaattctaattctgatgatgactcctactccattgtttaccccaaagcatcagctaggctggagtgatttgttacaaatgagcaaaagatgagtccttgcttccctcagaaataaaaggagctcagctg

SEQ ID NO: 2796 - DNA, 228 bp, Homo sapiens
gagatgcaaagcaggattcaaaagaacatctttgcgttttctaccggctccccatcatcgtactagggaggaagaagcgggtgagaaacaaaacttctttccattgtcctgcccgtttctgcggacttgttctgaggccgaggcacctctaagatactgatggctctgcagaggacccattcattgcttctgcttttgctgctgaccctgctggggctggggctggtc

SEQ ID NO: 2797 - DNA, 342 bp, Homo sapiens; identical to SEQ ID NO: 1001

SEQ ID NO: 2798 - DNA, 311 bp, Homo sapiens
ggagctgtcctgcaccgtggtggagctgaagtacacaggcaatgccagcgcactcttcatcctccctgatcaagacaagatggaggaagtggaagccatgctgctcccagagaccctgaagcggtggagagactctctggagttcacagagataggtgagctctacctgccaaagttttccatctcgagggactataacctgaacgacatacttctccagctgggcattgaggaagccttcaccagcaaggctgacctgtcagggatcacaggggccaggaacctagcagtctcccaggtggtccataagg

SEQ ID NO: 2799 - DNA, 402 bp, Homo sapiens; identical to SEQ ID NO: 996

SEQ ID NO: 2800 - DNA, 232 bp, Homo sapiens
ttccatctcgagggactataacctgaacgacgacttctccagctgggcattgaggaagccttcaccagcaaggctgacctgtcagggatcacaggggccaggaacctagcagtctcccaggtggtccataaggctgtgcttgatgtatttgaggagggcacagaagcatctgctgccacagcagtcaaaatcaccctcctttctgcattagtggagacaaggaccattgtgc

SEQ ID NO: 2801 - DNA, 435 bp, Homo sapiens
tgactctgacttctgaggaagaggcccgtttgaagaagagtgcacatcactttgggggatccaaaaggagctgcaattttaaagtcttctgatgtcatatcatttcactgtctaggctacaacaggattctaggtggaggttgtgcatgttgtcctttttatctgatctgcgattaaagcagtaatattttaagatggactgggaaaaacatcaactcctgaagttagaaataagaatggtttgtaaaatccacagctatatcctgatgctggatggtattaatcttgtgtagtcttcaactggttagtgtgaaatagttctgccacctctgacgcaccactgccaatgctgtacgtactgcatttgccccttgagccaggtggatgtttaccgtgtgttatataacttactggctccttcactgaacatgccta

SEQ ID NO: 2802 - DNA, 309 bp, Homo sapiens
atcatttcactgtctaggctacaacaggattctaaggggacgttgtgcatgttggcctttgtatctgatctgtgattaaagcagtaatattttaagatggactgggaaaaacatcaactcctgaagttagaaataagaatggtttgtaaaatccacagctgtatgctgaagctggatggtattaatcttgcgtagtcttcaactggttaggtgaaatagttctgccacctctgacgcaccactgccaatgctgtacgtactggatttggcccttgagccaggtggatgttcaccgggcgtgatataact

SEQ ID NO: 2803 - DNA, 342 bp, Homo sapiens
  misc_feature 342: n = A,T,C or G
atcatttgactgtctaggctacaacaggattctaggtggaggttgtgcatgttgtcctttttatctgatctgtgattaaagcagtaatattttaacatggactgggaaaaacatcaactcctgaagttagaaataagaatggtttgtaaaatccacagctatatcctgatgctggatggtattaatcttgtgtagtcttcaactggttagttgaaatagttctgccacctctgacgcaccactgccaatgctgtacgtactgcatttgccccttgagccaggtggatgtttaccgtgtgttatataacttcctggctccttcactgaacatgcctagtccan

SEQ ID NO: 2804 - DNA, 266 bp, Homo sapiens
gggacagaatggctatctcggaccttgtgaaggtgactctgacttctgaggaagacgcccgcttgaagaagagagcccatacactttgggggatccaaaacgagctgcgattttcaagtcttctgatgtcatatcattccactgtctaggctacaacaggattctagggggacgttgtgcatgttggcctttttatctgatctgtgactaaagcactaatattttaagatggactgggaaaaacatcaactcctgaagttagaaat

SEQ ID NO: 2805 - DNA, 383 bp, Homo sapiens
ggacagaatggaatctcagaccttgtgaaggtgactctgacttctgaggaagaggcccgtttgaagaagagtgcagatacactttgggggatccaaaaggagctgcaattttaaagtcttctgatgtcatatcatttcactgtctaggctacaacaggattctaggtggaggttgtgcatgttgacctttttatctgatctgtgattaaagcagtaatattttaagatggactgggaaaaacatcaactcctgaagttagaaataagaatggtttgtaaaatccacagctatatcctgatgctggatggtattaatcttgtgtagtcttcaactggttagtgtgaaatagttctgccacctctgacgcaccactgccaatgct

SEQ ID NO: 2806 - DNA, 453 bp, Homo sapiens
aaccgcttctccgttgaacaacatactagatggggacagaatggaatctcagaccttgtgaaggtgactctgacttctgaggaagaggcccgtttgaagaagagtgcagatacactttgggggatccaaaaggagctgcaattttaaagtcttctgatgtcatatcatttcactgtctaggctacaacaggattctaggtggaggttgtgcatgttgtcctttttatctgatctgtgattaaagcagtaatattttaagatggactgggaaaaacatcaactcctgaagttagaaataagaatggtttgtaaaatccacagctatatcctgatgctggatggtattaatcttgtgtagtcttcaactggttagtgtgaaatagttctgccacctctgacgcaccactgccaatgctgtacgtactgcatttgccccttgagccaggtggatgt

SEQ ID NO: 2807 - DNA, 383 bp, Homo sapiens; identical to SEQ ID NO: 2805

SEQ ID NO: 2808 - DNA, 97 bp, Homo sapiens
gttgccttggagatgatcaaagtaactggtggctatccatttgaagcttacaaaaattgttttcttaacttagccattccaattgtagtatttacag

SEQ ID NO: 2809 - DNA, 442 bp, Homo sapiens
gccctagttattataccatattacatcattactctatgtaattatctatgaagctatgtagttatttacccctgtattaagtgattttagactgttgttattttttgagttacagcatgtgctttcaaaatagggagactgtatggttgaattaatatttttttaaataactgttaacatgtatagagtaggttgaaagtttgaaagtataaaatatactaaaagtatacagacctgtaataagaaatttatattactatagtcccatagctgcttttactatccacagagaaatgcttgaaaacgtgaaagttgaatagatgcaattaaaatcacggatagttttaggctgtttatattatcagatcaccttcttttatctaggttgccttggagatgatcaaagtaactggtggctatccatttgaagcttacaaaaatt

SEQ ID NO: 2810 - DNA, 380 bp, Homo sapiens
gagacgttcgcacacctgggtgccagcgccccagaggtcccgggacagcccgaggcgccgcgcccgccgccccgagctccccaagccttcgagagcggcgcacactcccggtctccactcgctcttccaacacccgctcgttttggcggcagctcgtgtcccagagaccgagttgccccagagaccgagacgccgccgctgcgaaggaccaatgagagccccgctgctaccgccggcgccggtggtgctgtcgctcttgatactcggctcaggccattatgctgctggattggacctcaatgacacctactctgggaagcgtgaaccattttctggggaccacagggctgatggatttgaggttacctccagaagggagg

SEQ ID NO: 2811 - DNA, 133 bp, Homo sapiens
ccagtactgcctcctgtgctcgtgccaagacacagtgaatataacccccagctcagcctcctggccaagttccgcagcgcctccctgcacagtgagccactcatgccacacaacgccacctatcctgactctt

SEQ ID NO: 2812 - DNA, 428 bp, Homo sapiens
tccagtactgcctcctgtgctcgtgccaagacacagtgaatataacccccagctcagcctcctggccaagttccgcagcgcctccctgcacagtgagccactcatgccacacaacgccacctatcctgactctttccagcagcctccgtgctctgcactccctccctcacccagccacgcgttctcccagtccccgtgcacggccagctaccctcactccccaggaagtccttctgagccagagagtccctatcaacactcagactttcgaccagtttgttacgaggagcccccactggtgctcggtcgcctactatgaactgaacaaccgagttggggagacattccaggcttcctcccgaagtgtgctcatagatgggttcaccgacccttcaaataacaggaacagattctgtcttggacttctt

SEQ ID NO: 2813 - DNA, 497 bp, Homo sapiens
cggctgcgagaagacgacagaaggggggaatgtgtctggcccttcagcagtttctcttggcagcatcagctgggctgctttctttgtgtgtggccccaggtgtcaaaatgacaccagctgtctgtactagacaaggttaccaagtgcggaattggttaatactaacagagagatttgctccattctctttggaataacaggacatgctgtatagatacaggcagtaggtttgctctgtacccatgtgtacagcctacccatgcagggactgggattcgaggacttccaggcgcatagggtagaaccaaatgatagggtaggagcatgtgttctttagggccttgtaaggctgtttccttttgcatctggaactgactatataattgtcttcaatgaagactaattcaattttgcatatagaggagccaaagagagatttcagctctgtatttgtggtatcagtttggaaaaaaaaaatctgatactccatttgatta

SEQ ID NO: 2814 - DNA, 356 bp, Homo sapiens
gggaatgtgtctggcccttcagcagtttctcttggcagcatcagctgggctgctttctttgtgtgtggccccaggtgtcaaaatgacaccagctgtctgtactagacaaggttaccaagtgcggaattggttaatactaacagagagatttgctccattctctttggaataacaggacatgctgtatagatacaggcagtaggtttgctctgtacccatgtgtacagcctacccatgcagggactgggattcgaggacttccaggcgcatagggtagaaccaaatgatagggtaggagcatgtgttctttaaggccttgtaaggctgtttccttttgcatctggaactgactatat

SEQ ID NO: 2815 - DNA, 348 bp, Homo sapiens
gggaatgtgtctggcccttcagcagtttctcttggcagcatcagctgggctgctttctttgtgtgtggccccaggtgtcaaaatgacaccagctgtctgtactagacaaggttaccaagtgcggaattggttaatactaacagagagatttgctccattctctttggaataacaggacatgctgtatagatacaggcagtaggtttgctctgtacccatgtgtacagcctacccatgcagggactgggattcgaggacttccaggcgcatagggtagaaccaaatgatagggtaggagcatgtgttctttagggccttgtaaggctgtttccttttgcatctggaact

SEQ ID NO: 2816 - DNA, 337 bp, Homo sapiens
aagttgtggtctgacacacactgctgtggttcccctggatttagtgaaatgccgtatgcaggtggacccccaaaagtacaagggcatatttaacggattctcagttacacttaaagaggatggtgttcgtggtttggctaaaggatgggctccgactttccttggctactccatgcagggactctgcaagtttggcttttatgaagtctttaaagtcttgtatagcaatatgcttggagaggagaatacttatctctggcgcacatcactatatttggctgcctctgccagtgctgaattctttgctgacattgccctggctcctatggaagctgct

SEQ ID NO: 2817 - DNA, 252 bp, Homo sapiens; identical to SEQ ID NO: 790
  misc_feature 144: n = A,T,C or G

SEQ ID NO: 2818 - DNA, 51 bp, Homo sapiens
actcccagctgcactggttacacgtcttccttcgtcttcacctaccccgag

SEQ ID NO: 2819 - DNA, 348 bp, Homo sapiens; identical to SEQ ID NO: 1049

SEQ ID NO: 2820 - DNA, 507 bp, Homo sapiens; identical to SEQ ID NO: 419

SEQ ID NO: 2821 - DNA, 239 bp, Homo sapiens
  misc_feature 223: n = A,T,C or G
agactccaagccctactgggaggcacggagggtggcgaggcaggctcagctggaagctcagaaagccacgcaggacttccagagggccacagaggtgctccgcgccgccaaggagaccatctccctggccgagcagcggctgctggaggatgacaagcggcagttcgactccgcctggcaggagatgctgaatcacgccactcagagggtcatggaggcgganagaccaagaccaggag

SEQ ID NO: 2822 - DNA, 313 bp, Homo sapiens
catcagtgatagggatgattcacaaacacaaagctggtcttttcaaaatgggaagaaaaaagatgcaattgatcccttactattcaagtataaagtgcaacccactaaaaaagaattacatgagtctgctattgttaaagcaacacaaatcagccggagaaaacacctattttctcgtgataaactaaagctttttctgaagcaacactgggaaccacaagatggagtcattaaaataaaggcatcatctctttcaacggataaaatagccgaacaagattttttcttatttcttccctgatgattccacccc

SEQ ID NO: 2823 - DNA, 574 bp, Homo sapiens
aaataacatcaacagaacagcttcactttgggccaaacatttgaaaaactttttataaaaaattgtttgatatttcttaatgtctgctctgagccttaaaacacagattgaagaagaaaagaaagaaaaaacttaaatatttatttctatgctttgttgcctctgagaataatgacaatttatgaatttgtgtttcaaattgataaaatatttaggtacaaataacaagactaataatattttcttatttaaaaaaagcatgggaagatttttatttatcaaaatatagaggaaatgtagacaaaatggatataaatgaaaattaccatgttgtaaaaccttgaaaatcagattctaactggatttgtatgcaactaagtatttttctgaacacctatgcaggtcttatttacagtagttactaagggaacacacaaagaattacacaacgttttcctcaagaaaatggtacaaaacacaaccgaggagcgtatacagttgaaaacatttttgttttgattggaaggcagattattttatattagtattaaaaatcaaaccctatgtttctttc

SEQ ID NO: 2824 - DNA, 518 bp, Homo sapiens
gaagggaaataacatcaacagaacaacttcactttgggccaaacatttgaaaaactttttataaaaaattgtttgatatttcttaatgtctgctctgagccttaaaacacagattgaagaagaaaagaaagaaaaaacttaaatatttatttctatgctttgttgcctctgagaataatgacaatttatgaatttgtgtttcaaattgataaaatatttaggtacaaataacaagactaataatattttcttatttaaaaaaagcatgggaagatttttatttatcaaaatatagaggaaatgtagacaaaatggatataaatgaaaattaccatgttgtaaaaccttgaaaatcagattctaactggatttgtatgcaactaagtatttttctgaacacctatgcaggtcttatttacagtagttactaagggaacacacaaagaattacacaacgttttcctcaagaaaatggtacaaaacacaaccgaggagcgtatacagttgaaaacattttt

SEQ ID NO: 2825 - DNA, 353 bp, Homo sapiens
aaataacatcaacagaacaacttcactttgggccaaacatttaaaaaactttttataaaaaaatgtttgatatttcttaatgtctgctctgagccttacaacacagattgaagaagaaaagaaagaacaaacttagatatttatttctatgctttgttgcctctgagaataatgacaatttatgaatttgagtttcaaattgataaaatatttaggtactaataacaagactaataatattttcttatttataaaaagcatgggaagatttttatttatcaaaatatacaggaagtgtagacaaaatggatataaatgaaaattaccatgttgtaaaaccttgaaaatcagag

SEQ ID NO: 2826 - DNA, 401 bp, Homo sapiens
gacctgcacacagagactccctcctgggctcctggcaccatggccccctgaagagctggccctggtcaccctcctcctgggggcttctctgcagcacatccacgcagctcgagggaccaatgtgggccgggagtgctgcctggagtacttcaagggagccattccccttagaaagctgaagacgtggtaccagacatctgaggactgctccagggatgccatcgtttttgtaactgtgcagggcagggccatctgttcggaccccaacaacaagagagtgaagaatgcagttaaatacctgcaaagccttgagaggtcttgaagcctcctcaccccagactcctgactgtctcccgggactacctgggacctccaccggtggtgttcaccgcccccaccct

SEQ ID NO: 2827 - DNA, 547 bp, Homo sapiens
gacctgcacacagagactccctcctgggctcctggcaccatggccccactgaagatgctggccctggtcaccctcctcctgggggcttctctgcagcacatccacgcagctcgagggaccaatgtgggccgggagtgctgcctggagtacttcaagggagccattccccttagaaagctgaagacgtggtaccagacatctgaggactgctccagggatgccatcgtttttgtaactgtgcagggcagggccatctgttcggaccccaacaacaagagagtgaagaatgcagttaaatacctgcaaagccttgagaggtcttgaagcctcctcaccccagactcctgactgtctcccgggactacctgggacctccaccgttggtgttcaccgcccccaccctgagcgcctgggtccaggggaggccttccagggacgaagaagagccacagtgagggagatcccatccccttgtctgaactggagccatgggcacaaagggcccagattaaagtctttatcctcaaaaaaaaaaaaaaaaaaaaaa

SEQ ID NO: 2828 - DNA, 283 bp, Homo sapiens
ctgagcagagggacctgcacacagagactccctcctgggctcctggcaccatggccccactgaagatgctggccctggtcaccctcctcctgggggcttctctgcagcacatccacgcagctcgagggaccaatgtgggccgggagtgctgcctggagtacttcaagggagccattccccttagaaagctgaagacgtggtaccagacatctgaggactgctccagggatgccatcgtttttgtaactgtgcagggcagggccatctgttcggaccccaacaa

SEQ ID NO: 2829 - DNA, 160 bp, Homo sapiens; identical to SEQ ID NO: 12

SEQ ID NO: 2830 - DNA, 300 bp, Homo sapiens
tttttttttggggccaattctttaatttaactaaattaggaacgcagcttttacagaacaataaacacaagggacggggccaccccaggatctaacagcttttcagggacctatgttgcaagctcaaaagtaatccactaacgaaccaagtcaaactccagtttttaataaaaaggggctgggggaggttgtcaaaccccttccaatataaatccccaatccgagggccaccaaatgaaaaagcaccaaaaatggaaggaaaactttcaaaaattctgcaaaaaatatgccccctttttt

SEQ ID NO: 2831 - DNA, 394 bp, Homo sapiens
gtctattcttttattttactaaattaggaacgcagcatttacagaacaataaacacaagtgacgtggccaccccaggatctaacagctcttcagtgagctatgttgcaagctcagaagtaatccactaacgaaccaagtcagactccagttcttcatcaaaaggtgctggtggaggttgtcagacgccttccaatatagatccccaatccgatggccagcaaatgagagagcagcagagatggaaggaaaacttccagaaattctgcagagaatatgccccctttcttcatgacgctcgtgttcccccatgctgaaggtggccgtgcgcttccggtgtttaaagaagaacccttggggggaatatttcccggccatttgaccaatcccattcca

SEQ ID NO: 2832 - DNA, 524 bp, Homo sapiens
gtctattcttttattttactaaattaggaacgcagcatttacagaacaaataaacacaagtgacgtggccaccccaggatctaacagctcttcagtgagctatgttgcaagctcagaagtaatccactaacgaaccaagtcagactccagttcttcatcaaaaggtgctggtggaggttgtcagacgccttccaatatagatccccaatccgatggccagcaaatgagagagcagcagagatggaaggaaaactttcagaaattctgcagagaatatgccccctttcttcatgacgctcgtgttcctcatgctgaggtggccgtgcgcttccggtgtttaaagaagaacccttggggggaatatttccggccgacttgaccaatcccatatccatctgatttttcttccagaagctttcacttccttcctccttcaatatcactccctcaactgtgactgttttccccccaatgctatggtttctgttcaaaaccccgttggttctgttgggtcgctactccgt

SEQ ID NO: 2833 - DNA, 55 bp, Homo sapiens
ggccgcccttttttttttttttttttcgggggcgttttttgatttttaaaattgg

SEQ ID NO: 2834 - DNA, 463 bp, Homo sapiens
tcactatagggaaagctggtacgcctgcaggtaccggtccggaattcccgggtcgacccacgcgtccgccgcccccgagacctgtgaagaaaaccatcttgtgaggggctgcctggactggtctggcaggttgggcctggatggggaggctctagcatctctcataggtgcaacctgagagtgggggagctaagccatgaggtaggggcaggcaagagagaggattcagacgctctgggagccagttcctagtcctcaactccagccacctgccccagctcgacggcactgggccagttccccctctgctctgcagctcggtttccttttctagaatggaaatagtgagggccaatgcccagggttggagggaggagggcgttcatagaagaacacacatgcgggcaccttcatcgtgtgtggcccactgtcagaacttaataaaagtcaactcatttgctgg

SEQ ID NO: 2835 - DNA, 274 bp, Homo sapiens
  misc_feature 144, 218, 268: n = A,T,C or G
ccgcccccgagaccatgtgaagaaaaccatcttgtgaggggctgcctggactggtctggcaggttgggcctggatggggaggctctagcatctctcataggtgcaacctgagagtgggggagctaagccatgaggtaggggcangcaagagagaggattcagacgctctgggagccagttcctagtcctcaactccagccacctgccccagctcgacngcactgggccagttccccctctgctctgcagtcggtttccttttctagantggaaa

SEQ ID NO: 2836 - DNA, 232 bp, Homo sapiens
cggctgtgagaatacgacagaagggtccggctgcgagaagacgacagaagggggatctcagcggggagccacgtctcttgcactgtggtctctgcatggaccccagggctgtggggacttgggggacagtaatcaagtaatccccttttccagaatgcattaacccactcccctgacctcacgctggggcaggtccccaagtgtgcaagctcagtattcatgatggtggggg

SEQ ID NO: 2837 - DNA, 321 bp, Homo sapiens; identical to SEQ ID NO: 1067

SEQ ID NO: 2838 - DNA, 344 bp, Homo sapiens
  misc_feature 265, 267, 272, 337: n = A,T,C or G
gtcctatttctcattttgttgataatttctgcatttaatggtctgtgctttaaatggtaacgctacggccccaggtcactgcgaggcacttaccatgtagatacgggctcaaaagtcacctctcagagacctacgtcatccactcaggaattcgcgcctctcatacttgcctgtctcattttatcttccttctagcagctgtctgaaattggttcgtctgttttcttgtttatggtattctcaagcccttgacagaccggctagngnggttntcccgtgcatcttcagcctggcacattatggacacttaaatactacgtattgatctaatattgangggttaa

SEQ ID NO: 2839 - DNA, 405 bp, Homo sapiens
ggcacgagggatgaagggtgctgctcattttcattagatgtatgtgaaggcacagtgaaaatggaaatgttcttggagctacttcctcaaaatgtatccttagtcacctcagtgcaacagctgggagggggccgtgttaagattttttttgctacaaagaggaggtggcaatggtagatccacccttatgcttctcagtttagcataacctcttatggattttcatcaaattcagcgtgttggtcactggaaagagccttttccttctccttttcttactctcccctcatggggttcccctcttaaaggagaggagcttttaatttacacttaccacctcatttgcttttttggaggccatgccatataagcgggactaccgagttaatctcctttttacaaaag

SEQ ID NO: 2840 - DNA, 227 bp, Homo sapiens
ggatgaactattcagatgctatcgtttggctaaaagaacatgatgtaaagaaagaagatggaactttctatgaatttggagaagatatcccagaagctcctgagagactgatgacagacaccattaatgaaccaatcttgctgtgtcgatttcctgtggagatcaagtccttctacatgcagcgatgtcctgaggattcccgtcttactgaatctgtcgacgtgttg

SEQ ID NO: 2841 - DNA, 521 bp, Homo sapiens
tcgaattcggatgaactattcagatgctatcgtttggctaaaagaacatgatgtaaagaaagaagatggaactttctatgaatttggagaagatatcccagaagctcctgagagactgatgacagacaccattaatgaaccaatcttgctgtgtcgatttcctgtggagatcaagtccttctacatgcagcgatgtcctgaggattcccgtcttactgaatctgtcgacgtgttgatgcccaatgttggtgagattgtgggaggctcaatgcgtatctttgatagtgaagaaatactggcaggttataaaagggaagggattgaccccactccctattactggtatacggatcagagaaaatacggtacatgtccccatggaggatatggcttgggcttggaacgattcttaacgtggattctgaataggtatcacatccgagacgtgtgcttataccctcgatttgtccagcgttgcacgccataaccattttctccagaagcgtggaggaaagattatg

SEQ ID NO: 2842 - DNA, 325 bp, Homo sapiens
ggactttcccgatcgccaggcaggagtttctctcggtgactactatcgctgtcatgtctggtcgtggcaagcaaggaggcaaggcccgcgccaaggccaagtcgcgctcgtcccgcgcgggccttcagttcccggtagggcgagtgcatcgcttgctgcgcaaaggcaactacgcggagcgagtgggggccggcgcgcccgtctacatggctgcgttcctcgagtatctgaccgctgagatcctggagctggcgggcaacgcggctcgggacaacaagaagacgcgcatcatccctcgtcacctccagctggccatccgcaacga

SEQ ID NO: 2843 - DNA, 401 bp, Homo sapiens
  misc_feature 264: n = A,T,C or G
cgttgctgtcggttttaggaaacctggcatggtgctttcaggtctggggcttttagagccccccgtgtggcttacaaattctacagcatacagagcaggccacgctcaggcccggcatgcgggccaccaagttctggaaaccacgtggtgtccctgcgaatggggcgatcaagtccagagccggggcactttcagagtttgaaggtaactgagagcagatggtcctccatttcaactccagaagtggggctctgggagggatgntctaaccctccctggcatgtcacaaccaggctctggctggaggatccctccatccggctcctgtcatcccctacactttggcctagcaagaggtggaataaccacttgtgtgctcattactgttgggaggaacaaag

SEQ ID NO: 2844 - DNA, 460 bp, Homo sapiens
catgcgggccaccaagttctggaaaccacgtggtgtccctgcgaatggggcgatcaagtccagagccggggcactttcagagtttgaaggtaactgagagcagatggtcctccatttcaactccagaagtggggctctgggagggatgttctagccctccctggcatgtcagaaccaggctctgcctggaggatccctccatccggctcctgtcatcccctacactttggccaagcaagaagtggtagaaccacttggctgctccttccttctggaggacacacagtctcagtccagatgccttcctgtctttctggccctttctggaccagatcctactcttcctttctaaatctgagatctccctccagggaatccgcctgcagaggacagagctggctgtcttcccccacccctaacctggcttattcccaactgctctgcccactgtgaaaccact

SEQ ID NO: 2845 - DNA, 496 bp, Homo sapiens
tttttttttttttttttttttttttgggattcttaaatatagatgtatttttttcatctcatctccggacacactccaatcacacccctcctgccctcccctctcaactgcaaaccaagcggtgcagacacagcacagcacacatgaggggccctccctttcaccaaagctgaaggcagggcacagtttggggatggaagagcctcgaggtaaatgtgggggttctagaacccagtgacctcagttctggatcatgggaaagggatcagtatgcagtaacgtggtaaggttccagatctagaagccaggacctagaacctagtggtttcacagtgggcagagcagttgggaataagccaggttaggggtgggggaagacagccagctctgtcctctgcaggcggattccctggagggagatctcagatttagaaaggaagagtaggatctggtccagaaagggccagaaagacaggaaggcatctggactgagact

SEQ ID NO: 2846 - DNA, 283 bp, Homo sapiens
ttttttttttttttttttttttttttttaggatttgaatacatttattgtgacaagaatgctgttataaatattcataagcaaaggccatctttttatctaggaattgtcaaagagaagattccaaattggaaggatacatcttttgtaaaatctgccaccaattcctgctttgagaataagcacctattgtaaaatttctactaacattataaatggtcacagcacatgccacttgatacaatccaaactttgaaatgtttgacttctcagtgggctgtccc

SEQ ID NO: 2847 - DNA, 335 bp, Homo sapiens
tgtcgggcagcaggcgcagcccagcctcgaaatgcagaacgacgccggcgagttcgtggacctgtacgtgccgcggaaatgctccgctagcaatcgcatcatcggtgccaaggaccacgcatccatccagatgaacgtggccgaggttgacaaggtcacaggcaggtttaatggccagtttaaaacttatgctatctgcggggccattcgtaggatgggtgagtcagatgattccattctccgattggccaaggccgatggcatcgtctcaaagaacttttgactggagagaatcacagatgtggaatatttgtcataaataaataatgaaaacc

SEQ ID NO: 2848 - DNA, 75 bp, Homo sapiens
gggtagagttcttaaatcgagatctggaggtagatggacgctttgtaaccctccagatctgggacactgcagggc

SEQ ID NO: 2849 - DNA, 611 bp, Homo sapiens
gccggggggcagcggcgggcgcgagcggcagctgtcaggccaccgaggtccaagccgcacttgctgccccattgaggacgaggaggcagcaggagcagtgacggtgactctaaggagccggattcccggcacgcagagctgacctgcctggcacccgcggccctctcctgtttccttcccattgtgttggcaccctaaaaagaaagaataaaacaacaacaggaaaaaaaggaaaatatttaaattgtgacaaaaacccactgggttctcttggttacaaactccttcccttctggtgctacaaaaatgagtgggaaatccctgctcttaaaggtcattctcttgggtgatggtggagttgggaaaagttcgcttatgaaccgttacgtaaccaacaaatttgactcccaggcttttcacaccataggggtagagttcttaaatcgagatctggaggtagatggacgctttgtaaccctccagatctgggacactgcagggcaggaacgtttcaagagccttaggacacccttctacaggggagcagactgctgcctcttgaccttcagcgtggatgatcggcagagcttcgagaatcttggtaactggca

SEQ ID NO: 2850 - DNA, 441 bp, Homo sapiens
ggcctttgcaagcctcaccggcgatgcaaggatagtcatcaacagggcccgggtggagtgccagagccaccggctgactgtggaggacccggtcactgtggagtacatcacccgctacatcgccagtctgaagcagcgttatacgcatagcactgggcgcaggcgtttggcatctctgccctcatcgtgggtttctactttgatggcactcctaggctctatcagactgacccctctgtcacataccatgcctggaaggccaatgccatacgccggggtgccaactcagtgcgtgagttcctggagaagaactatactgacgaagccattgtaacatatgatctgaccattaagctggtgatcaacgcactcctggaagtggttcactcaggtggcaaaaacattgaacttgctgtcatgaggcgagatcaatccctcaag

SEQ ID NO: 2851 - DNA, 323 bp, Homo sapiens
ggcctttgcaggcctcaccgccgatgcaaggatagtcatcaacagggcccgggtggagtgccagagccaccggctgactgtggaggacccggtcactgtggagtacatcacccgctacatcgccagtctgaagcagcgttatacgcacagcaatgggcgcaggcgtttggcatctctgccctcatcgtgggtttcgactttgatggcactcctaggctctatcagactgacccctcgggcacataccatgcctggaaggccaatgccatatgccggggtgccaagtcagtgcgtgagttcctggagaagaactatactgacga

SEQ ID NO: 2852 - DNA, 567 bp, Homo sapiens; identical to SEQ ID NO: 603

SEQ ID NO: 2853 - DNA, 314 bp, Homo sapiens
  misc_feature 48: n = A,T,C or G
atgaagtccagcggcctcttccccttcctggtgctgcttgccctgggnactctggcaccttgggctgtggaaggctctggaaagtccttcaaagctggagtctgtcctcctaagaaatctgcccagtgccttagatacaagaaacctgagtgccagagtgactggcagtgtccagggaagaagagatgttgtcctgacacttgtggcatcaaatgcctggatcctgttgacaccccaaacccaacaaggaggaagcctgggaagtgcccagtgacttatggccaatgtttgatgcttaacccccccaatttctg

SEQ ID NO: 2854 - DNA, 611 bp, Homo sapiens
ggctctgctctgcagcacacccgtgggtgacccctcaccccagaagcagcagtggcagcttgggaaatgtgaggaagggaaggagggagagacgggagggaggagagagaggagaagggaggcaggggaggggcagcagaaccaaggcaaatatttcagctgggctatacccctctccccatccctgttatagaagcttagagagccagccagcaatggaaccttctggttcctgcgccaatcgccaccagtatcaattgtgtgagcttgggtgcgagtgcacgcgtgcgtgagtacggagagtatatatagatctctatctcttagcaaaggtgaatgccagatgtaaatggcgcctctgggcaaaggaggcttgtattttgcacattttataaaaacttgagagaatgagatttctgcttgtatatttctaaaaagaggaaggagcccaaaccatcctctccttaccactcccatccctgtgagccctaccttacccctctgcccctagccaaggagtgtgaatttatagatctaactttcataggcaaaacaaaagcttcgagctgttgcgtgtgtgagtctgttgtgtggatgtgcgtgtgtggtcc

SEQ ID NO: 2855 - DNA, 370 bp, Homo sapiens
tggctggatgggcttggactgtggtcctgaaagcagcaagaagtatgctgaggctgtcactcgggctaagcagattgtgtggaatggtcctgtgggggtatttgaatgggaagcttttgcccggggaaccaaagctctcatggatgaggtggtgaaagccacttctaggggctgcatcaccatcataggtggtggagacactgccacttgctgtgccaaatggaacacggaggataaagtcagccatgtgagcactgggggtggtgccagtttggagctcctggaaggtaaagtccttcctggggtggatgctctcagcaatatttagtactttcctgccttttagttcctgtgcacagcccctaagtca

SEQ ID NO: 2856 - DNA, 177 bp, Homo sapiens
gggctgcatcaccatcataggtggtggagacactgccacttgctgtgccaaatggaacacggaggataaagtcagccatgtgagcactgggggtggtgccagtttggagctcctggaagggaaagtccttcctggggtggatgctctcagcaatatttagtactttcctgcctttta

SEQ ID NO: 2857 - DNA, 204 bp, Homo sapiens
  misc_feature 53, 55, 76, 86, 137: n = A,T,C or G
atggcttttaccttccttaaggtgctcaacaacatggagattgggcactttcncnggttgatgaagaaggaagccnagatttgtcnaagacctaatgtccaaaagctgagaagaatggtgtgaagattaccttgccntgttgacttgtcactgctgacaagtttgatgagaatgcccaagactggcccagccactggtggcttc

SEQ ID NO: 2858 - DNA, 489 bp, Homo sapiens
cttttaccttccttaaggtgctcaggacatggagattggcacttctctgtttgatgaagagggagccaagattgtcaaagacctaatgtccaaagctgagaagaatggtgtgaagattaccttgcctgttgactttgtcactgctgacaagtttgatgagaatgccaagactggccaagccactgtggcttctggcatacctgctggctggatgggcttggactgtggtcctgaaagcagcaagaagtatgctgaggctgtcactcgggctaagcagattgtgtggaatggtcctgtgggggtatttgaatgggaagcttttgcccggggaaccaaagctctcatggatgaggtggtgaaagccacttctaggggctgcatcaccatcataggtggtggagacactgccacttgctgtgccaaatggaacacggaggataaagtcagccatgtgagcactgggggtggtgccagtttggagctcctgga

SEQ ID NO: 2859 - DNA, 885 bp, Homo sapiens; identical to SEQ ID NO: 281

SEQ ID NO: 2860 - DNA, 434 bp, Homo sapiens
cggctgcgagaagacgacagaaggggggagtggttgctataccttgacttcatttatatgaatttccactttattaaataatagaaaagaaaatcccggtgcttgcagtagagtgataggacattctatgcttacagaaaatatagccatgattgaaatcaaatagtaaaggctgttctggctttttatcttcttagctcatcttaaataagcagtacacttggatgcagtgcgtctgaagtgctaatcagttgtaacaatagcacaaatcgaacttaggatttgtttcttctcttctgtgtttcgatttttgatcaattctttaattttggaagcctataatacagttttctattcttggagataaaaattaaatggatcactgatattttagtcattctgcttctcatctaaatatttccatattctgtatt

SEQ ID NO: 2861 - DNA, 318 bp, Homo sapiens
gggagtgggtgctataccttgacttcatttatatgaatttccactttattaaataatagaaaagaaaatcccggtgcttgcagtagagtgataggacattctatgcttacagaaaatatagccatgattgaaatcaaatagtaaaggctgttctggctttttatcttcttagctcatcttaaataagcagtacacttggatgcagtgcgtctgaagtgctaatcagttgtaacaatagcacaaatcgaacttaggatttgcttcttctcttctgtgttgcgatttttgatcaattctttaattttggaagcctataat

SEQ ID NO: 2862 - DNA, 231 bp, Homo sapiens
cggctgcgagaagacaacagaagggggctcccgctcgggatctcgctccggatctcgctccgggtcccgcagtgggtcccggagaggaagctttgacgccacaaggaattcttcctactcttattcctactcatttagcagtagttctattgggcactattagtcagttgggagtgggtgctataccttgacttcatttatatgaatttccactttattaaataatagaaa

SEQ ID NO: 2863 - DNA, 446 bp, Homo sapiens
atttgctgtatgccgagaatggaaaaattggaccacctaaactggatatcagaaaggaggagaagcaaatcatgattgacatatttcacccttcagtttttgtaaatggagacgagcaggaagtcgattatgatcccgaaactacctgttacattagggtgtacaatgtgtatgtgagaatgaacggaagtgagatccagtataaaatactcacgcagaaggaagatgattgtgacgagattcagtgccagttagcgattccagtatcctcactgaattctcagtactgtgtttcagcagaaggagtcttacatgtgtggggtgttacaactgaaaagtcaaaagaagtttgtattaccattttcaatagcagtataaaaggttctctttggattccagttgttgctgctttactactctttctagtgcttagcctggtattcatc

SEQ ID NO: 2864 - DNA, 209 bp, Homo sapiens
  misc_feature 19, 185, 193: n = A,T,C or G
gagaatttgctgtatgccngagatggaaaaattggaccacctaaactggatatcagaaaggaggagaagcaaatcatgattgacatatttcacccttcaagtttttgtaaatggagacgagcaggaagtcgattatgatcccgaaactacctgttacattagggtgtacaatgtgtatgtgagantgaacggnagtgagatccagtata

SEQ ID NO: 2865 - DNA, 521 bp, Homo sapiens
tgctgtcggtgactactgaagaaatattcctgacgtggtcccgggcagccatctgactccaatagagagagagagttcttcacctttaagtagtaaccagtctgaacctggcagcatcgctttaaactcgtatcactccagaaattgttctgagagtgatcactccagaaatggttttgatactgattccagctgtctggaatcacatagctccttatctgactcagaatttcccccaaataataaaggtgaaataaaaacagaaggacaagagctcataaccgtaataaaagcccccacctcctttggttatgataaaccacatgtgctagtggatctacttgtggatgatagcggtaaagagtccttgattggttatagaccaacagaagattccaaagaattttcatgagatcagctaagttgcaccaactttgaagtctgattttcctggacagttttctgctttaatttcatgaaaagattatgatctcagaaattgtatcttagttggtatcaac

SEQ ID NO: 2866 - DNA, 522 bp, Homo sapiens
tggccctcgaggccaagaattcggcactaggggagaggagcttgaatttctgacacacataacatgtaaaaagtatttggcatttcataaggatttggggtggggtaaacgcaaggttagtctgttttaaaaaatgttttcattaacgagcacataactggtggttcctaatgggaatacttgacccaggcagaaactagaaaagtagcaagtaggaaacttccatttctctcccctaaacaaccccttaaggcactgtgagctggagacaggagaggtgttgcccaacctttgttcatatactcggtgacgatgtagatgggctcctcagacaccactgcatagagctggaccagcttgtcgtgcttcagcttcttcatgatctgcgcttcctcaaggaatgattcgggggacattgtgcctggtttaagagtctttatggctacttttgtgtttccattccaggtacctacaaacatcccagaatatgaagtcaaaccaaagatcttcttttgatggaaa

SEQ ID NO: 2867 - DNA, 421 bp, Homo sapiens
  misc_feature 12, 331, 372: n = A,T,C or G
ttaatgagttanaaatcttaatatagccatcttagccataaccacaaataaactcattttttctgttaaaatacttgacagagtccttgcaattgaatgtctttgttcaacaaaaactgtattaagtgttttaaatttaaaatctaatcttatgcaaatagctggtggtcaaaacctttttccatcaaaagaagatctttggtttgacttcatattctgggatgtttgtaggtacctggaatggaaacacaaaagtagccataaagactcttaaaccaggcacaatgtcccccgaatcattccttgaggaagcgcagatcatgaagaagcngaagcacgacaagctggtccagctctatggcagtggtgtcngaggagcccatctacatcgtcaccgagtatatgaacaaaggttgggcaa

SEQ ID NO: 2868 - DNA, 503 bp, Homo sapiens
cagaaggggtttccgaatgttttagttagccttttggtggagccgccagctgacaggacatcttacaagagaatttgcacatctctggaagcttagcaatcttattgcacactgttcgctggaagctttttgaagagcacattctcctcagtgagctcatgaggttttcatttttattcttccttccaacgtggtgctatctctgaaacgagcgttagagtgccgccttagacggaggcaggagtttcgttagaaagcggacgctgttctaaaaaaggtctcctgcagatctgtctgggctgtgatgacgaatattatgaaatgtgccttttctgaagagattgtgttagctccaaagcttttcctgtcgcagtgtttcagttctttattttcccttgtggatatgctgtgtgaaccgtcgtgtgagtgtggtatgcctgatcacagatggattttgttataagcatcaatgtgacacttgcaggacactacaacgtgggaca

SEQ ID NO: 2869 - DNA, 365 bp, Homo sapiens
ggccgcccttttttttttttttgggggggaaaaaatttttttttaaaaaaaaaaaaacttcccccctggggaaaaaaaaaggttttttaaaaaaaaaaccaaacaaaattttcccgggccctttaggggttttaaattttcccccgggttgaaccccttttaaaaaaaaaggaatttttttggggggaaataatgggggaaaaaccaaaaaaaaaggggggttttttttttaaaacccttttttttttaaaaaaccttcccccaggggaaaaattcccaaaaccttttaaaaaaaaagggccgaaatttttaatccaaaggggaaaaaccccccccccaacaaaaaacccccaaaggggaaaaag

SEQ ID NO: 2870 - DNA, 680 bp, Homo sapiens
  misc_feature 172, 173, 176, 186, 199, 200, 591, 625, 659, 670: n = A,T,C or G
aggacacagacaaggaacttgctgaaaggccaaccatttcaggatcagtcaaaggcagcaagcagatagactcaaggtgtgtgaaagatgttatacaccaggagctgccacttcatgtcccaaccagactgtgtctgtctgtgtctgcatgtaagagtgagggagggaaggnnggnactacaaganagtcggagatganncagcacacacacaattccccagcccacgtgatgcttgtgttgaccagatgttcctgagtctggagcaagcacccaggccagaataacagagctttcttagttggtgaagacttaaacatctgcctgaggtcaggaggcaatttgcctgccttgtacaaaagctcaggtgaaagactgagatgaatgtctttcctctccctgcctcccaccagacttcctcctggaaaacgctttggtagatttggccaggagctttcttttatgtaattggataaatacacacaccatacactatccacagatatagccaagtagatttgggtagaggatactatttccagaatagtgtttagctcacctagggggatatgttgtatcacatttgcatatnccacatggggacataagctaattttttacagacncgattctgtcatgctgttaatagccatggttaancccccattggnggggccggtg

SEQ ID NO: 2871 - DNA, 570 bp, Homo sapiens
taagctcgggattcggctcgagcggctcgagtcaagagaaaacacaagaaggacatcagccagaacaagcgagccgtgaggcggctgcgcaccgcctgcgagagggccaagaggaccctgtcgtccagcacccaggccagcctggagatcgactccctgtttgagggcatcgacttctacacgtccatcaccagggcgaggttcgaggagctgtgctccgacctgttccgaagcaccctggagcccgtggagaaggctctgcgcgacgccaagctggacaaggcccagattcacgacctggtcctggtcgggggctccacccgcatccccaaggtgcagaagctgctgcaggacttcttcaacgggcgcgacctgaacaagagcatcaaccccgacgaggctgtggcctacggggcggcggtgcaggcggccatcctgatgggggacaagtccgagaacgtgcaggacctgctgctgctggacgtggctcccctgtcgctggggctggagacggccggaggcgtgatgactgccctgatcaagcgcaactccaccatccccaccaagcag

SEQ ID NO: 2872 - DNA, 454 bp, Homo sapiens
gccgcccttttttttttttttttttttttttttttttttgtttttttttttttttcaaaaaaaaaaaatctttttagaaaaaaaaacccccccccaacaaaaaatggggggggggggggattttccctcccgggggaaggagaaaaagccgcagtaataaaaagggggggaaccaaaaaatttttttttttttttaaaaaaggtttttttgggggcccccccccccaaaaaaaaaaaaggtcccccccctttttttcccccctttttgggggggaaaaaaaaaaaaggggggggaaaaaaacagaaaattttccccaaaaatttaaaaaaaaaaggggggggggggggaaaaaaaaggtttttttacccccctgggggggaaaaaaaaaaaatttggggccaccaaaaaggggggggggccccccaaaaaagggggttttttttaaaaaaaaaa

SEQ ID NO: 2873 - DNA, 651 bp, Homo sapiens
taagctcgggattcggctcgagtggtcttcgtctactccgggtctttcaggaggccaaaaggcagctccagaagattgacaaatctgagggccgcttccatgtccagaaccttagccaggtggagcaggatgggcggacggggcatggactccgcagatcttccaagttctgcttgaaggagcacaaagccctcaagacgttaggcatcatcatgggcactttcaccctctgctggctgcccttcttcatcgttaacattgtgcatgtgatccaggataacctcatccgtaaggaagtttacatcctcctaaattggataggctatgtcaattctggtttcaatccccttatctactgccggagcccagatttcaggattgccttccaggagcttctgtgcctgcgcaggtcttctttgaaggcctatgggaatggctactccagcaacggcaacacaggggagcagagtggatatcacgtggaacaggagaaagaaaataaactgctgtgtgaagacctcccaggcacggaagactttgtgggccatcaaggtactgtgcctagcgataacattgattcacaagggaggaattgtagtacaaatgactcactgctgtaaagcagtttttctacttttaaagacccccccc

SEQ ID NO: 2874 - DNA, 280 bp, Homo sapiens
  misc_feature 112: n = A,T,C or G
tggtcttcgtctactccagggtctttcaggaggccaaaaggcagctccagaagattgacaaatctgagggccgcttccatgtccagaaccttagccaggtggagcaggatgngcggacggggcatggactccgcagatcttccaagttctgcttgaaggagcacaaagccctcaagacgttaggcatcatcatgggcactttcaccctctgctggctgcccttcttcatcgttaacattgtgcatgtgatccaggataacctcatccgtaagaagtttac

SEQ ID NO: 2875 - DNA, 418 bp, Homo sapiens
ggccgcccttttttttttttttttttcccgggcttttttgggaaaaacccccctttcccataaaaaaatttttttgggggtttcccaatttttttttccaatttcaaataatttttttccaaaaaaaacccaaacccttggggcctttttttttttttttaaagggcctttttacttttccccaaggaggccttggggaaataaaaaaaacccggttggggggccccaaaaaaggggtgggcccccttgaatcccccattggtttgggggtaaaaaaggcccccccatgggcccccttcccccgggggggggaacccccccccaagacccccccgggggaaaccgggcccaaaaaaaaaaccctttaaaattttaaaaaacgggcccccccctaaaaaaacttttttttaaaaagggg

SEQ ID NO: 2876 - DNA, 292 bp, Homo sapiens
ttagggtataagttgctgtaaaatttgtgtaaatttgtatccacacaaattcagtctctgaatacacagtattcagagtctctgatacacagtaattgtgacaatagggctaaatgtttaaagaaatcaaaagaatctattagattttagaaaaacatttaaactttttaaaatacttattaaaaaatttgtataagccacttgtcttgaaaactgtgcaactttttaaagtaaattattaagcagactggaaaagtgatgtattttcatagtgacctgtgtttcacttaat

SEQ ID NO: 2877 - DNA, 415 bp, Homo sapiens
tccttatttatttaacttcacccgagttcctctgggtttctaagcagttatggtgatgacttagcgtcaagacatttgctgaactcagcacattcgggaccaatatatagtgggtacatcaagtccatctgacaaaatggggcagaagagaaaggactcagtgtgtgatccggtttctttttgctcgcccctgttttttgtagaatctcttcatgcttgacatacctaccagtattattcccgacgacacatatacatatgagaatataccttatttatttttgtgtaggtgtctgccttcacaaatgtcattgtctactcctagaagaaccaaatacctcaatttttgtttttgagtactgtactatcctgtaaatatatcttaagcaggtttgttttcagcactgatggaaaa

SEQ ID NO: 2878 - DNA, 326 bp, Homo sapiens
tccttatttatttaacttcacccgagttcctctgggtttctaagcagttatggtgatgacttagcgtcaagacatttgctgaactcagcacattcgggaccaatatatagtgggtacatcaagtccatctgacaaaatggggcagaagagaaaggactcagtgtgtgatccggtttctttttgctcgcccctgttttttgtagaatctcttcatgcttgacatacctaccagtattattcccgacgacacatatacatatgagaatataccttatttatttttgtgtaggggtctgccttcacaaatgtcattgtctactcctaca

SEQ ID NO: 2879 - DNA, 324 bp, Homo sapiens
tccttatttatttaacttcacccgagttcctctgggtttctaagcagttatggtgatgacttagcgtcaagacatttgctgaactcagcacattcgggaccaatatatagtgggtacatcaagttcatctgacaaaatggggcagaagagaaaggactcagtgtgtgatccggtttctttttgctcgcccctgttttttgtagaatcttttcatgcttgacatacctaccagtattattcccgacgacacatatacatatgagaatataccttatttatttttgagtaggtgtctgccttcacaaatggcattggctactccag

SEQ ID NO: 2880 - DNA, 466 bp, Homo sapiens; identical to SEQ ID NO: 1118

SEQ ID NO: 2881 - DNA, 324 bp, Homo sapiens; identical to SEQ ID NO: 2879

SEQ ID NO: 2882 - DNA, 326 bp, Homo sapiens; identical to SEQ ID NO: 2878

SEQ ID NO: 2883 - DNA, 494 bp, Homo sapiens; identical to SEQ ID NO: 601

SEQ ID NO: 2884 - DNA, 243 bp, Homo sapiens
gccgctgcaccatgccccgcatagatgcggacctcaagctcgacttcaaggatgtcctgctccgacctaagcggacagcctcaagagccgagccgaggtggatcttgaacgcaccttcacgtttcgaaattcaaagcagacctactcagggattcccatcatcgtggccaacatggacactgtgggcacgtttgagatggcagccgtgatgtcacagcactccatgtttacagcaattcataa

SEQ ID NO: 2885 - DNA, 804 bp, Homo sapiens
gcaaatgtttgattaattctgctcatatgcacatctgaaagcatgagacacactccacagacagcacgcactggagctggtggggcagatgggcactcgccgattaggtattaatgtcaataatacgtgcataaagtgctgataaaataacttaagtgttacaaaaacagacagtccacggtggctgcaggcacatgcaggcgggactgggtcagacactccagggctgcacatgttccagctggcctgagtccgacacgtcatagctggccttgtacttggccaggattttcatgaggggccgtagcttgagccaccactgttctttgggaatcctgtgctcaaaatccgtttgcttcttcagctctgccacaggtttgaaaaataacgtttcttttgcttattcccagcacacaaatggaatcatcggtggtaaatttttttcctctgccccgggcctccttgagttttgcagtgatccactccatagctctggcagagattttggttccaaagtttctatcaaatggagagggtgccccaccctgctgcatgtgacccagcacgttcttcctgcagtcaaacacgcctttgccctcttctgaatacagctggtaaatgaagtcggtggtgtagttttcactgcagctctcatttctgagcacaaggcctctctggatggtggtcttcattttctccgtcaggtgctccacgttggactgcagatcctgatgtcgaagggctcttcgaaatgtatgcggcatcagtccggccgcagccccccatgttggcaggtagcacagt

SEQ ID NO: 2886 - DNA, 624 bp, Homo sapiens
  misc_feature 514: n = A,T,C or G
tggagttgtaggcaaatgtttaattaattctgctcatatgcacatctgaaagcatgagacacactccacagacagcacgcactggggctggtggggcagatgggcactcgccgattaggtattaatgtcaataatacgtgcataaagtgctgataaaataacttaagtgttacaaaaacagacagtccacggtggctgcaggcacatgcaggcgggactgggtcagacactccagggctgcacatgttccagctggcctgagtccgacacgtcatagctggccttgtacttggccaggattttcatgaggggccgtagcttgagccaccactgttctttgggaatcctgtgctcaaaatccgtttgcttcttcagctctgccacaggttgaaaaataacgtttcttttgcttattcccagcacacaaatggaatcatcggtggtaaatttttttcctctgccccgggcctccttgagttttgcagtgatccactccatagctctggcagagatnttggttccaaagtttctatcaaatggagaggtgccccaccctgctgatgtgaccccacacgttcttcctgagtcaaacacgcctttgccctcttctgaatacaagctggt

SEQ ID NO: 2887 - DNA, 507 bp, Homo sapiens
  misc_feature 301, 460, 498: n = A,T,C or G
ttttttggagttgtaggaaatgtttaattctgctcatatgcacatctgaaagcatgagacacactccacaagacagcacgcactggggctggtggggcagatgggcactcgcgattaggtattaatgttaataatacgtgcataaagtgctgataaaataacttaagtgttacaaaaacagacagtccacggtggctgcaggcacatgcaggcgggactgggtcagacactccagggctgcacatgttccagctggcctgagtcccgacacgtcatagctggccttgtacttggccagggnttttcatgaggggccctagctttgagccaccacttgttctttggggaatcctgtgcttcaaaatcccgttttgcttctttcagctcttcccacaggtttgaaaaataacgttttctttttgcttatttcccagcacacaaatgggattcatcggtgggnaatttttttcctctgccccggggcttcttgagtttttncagtgattc

SEQ ID NO: 2888 - DNA, 224 bp, Homo sapiens
  misc_feature 198, 219: n = A,T,C or G
atcagatcccaaagaccaattgcaacgtagctgtcatcaacgtgggggcacccgcggctgggatgaacgcggccgtacgctcagctgtgcgcgtgggcattgccgacggcacaggatgctcgccatctatgatggtttgacggcttcgcaagggccagatcaaagaaatcggctggacagatgtcgggggctggaccngccaaggaggctccattcttnggaca

SEQ ID NO: 2889 - DNA, 507 bp, Homo sapiens; identical to SEQ ID NO: 2887
  misc_feature 301, 460, 498: n = A,T,C or G

SEQ ID NO: 2890 - DNA, 224 bp, Homo sapiens; identical to SEQ ID NO: 2888
  misc_feature 198, 219: n = A,T,C or G

SEQ ID NO: 2891 - DNA, 232 bp, Homo sapiens
acgacagaagggtacggctgcgagaagacgacagatgggtacggctgtgagaagacgactgatgggaacagctaaggactgctaaaccccactctgcatcaactgaacgcaaatcagccactttaattaagctaagcccttactagaccaatgggacttaaacccacaaacacttagttaacagctaagcaccctaatcaactggcttcaatgtacttctcccgccgtcggg

SEQ ID NO: 2892 - DNA, 339 bp, Homo sapiens
tactggttttggagaacttgtctacaaccagggattgattttaaagatgtctttttttattttacttttttttaagcaccaaattttgttgtttttttttttttctcccttccccacaaatcccttttaaaatatttttgttaaccccctttccaacgggccgaggaaacttaaaacccctttttcctcggcctggttcctctttaatttttaatttttccccatcagtttaaaggttttggcatacttggcatcttttttcaaagggaaaactttttttgccattctttggacttccccttttttaaaggaaatgggggggccaaaaggggatttcaa

SEQ ID NO: 2893 - DNA, 456 bp, Homo sapiens; identical to SEQ ID NO: 1150

SEQ ID NO: 2894 - DNA, 490 bp, Homo sapiens
ttacattgaatactacatatgtcgagggaatgcagaaagagttaaggaaggcaggttgtcctgctatggaggccactcttcgttttccatgtactgcatgctgtttgtggcactttatcttcaagccaggatgaagggagactgggcaagactcttaccccccacactgcaatttggtcttgttgccgtatccatttatgtgggcctttctcgagttgctgattataaacaccactggagcgatgtgttgactggactcattcagggagctctggttgcaatattagttgctgtatatgtatcggatttcttcaaagaaagaacttcttttaaagaaagaaaagaggaggactctcatacaactctgcatgaaacaccaacaactgggaatcactatccgagcaatcaccagccttgaaaggcagcagggtgcccaggtgaagctggcctgttttctaaaggaaaatgattgccacaaggcaagaggatg

SEQ ID NO: 2895 - DNA, 334 bp, Homo sapiens
gaactcggtggtggccactgcgcagaccagacttcgctcgtactcgtgcgcctcgcttcgcttttcctccgcaaccatgtctgacaaacccgatatggctgagatcgagaaattcgataagtcgaaactgaagaagacagagacgcaagagaaaaatccactgccttccaaagaaacgattgaacaggagaagcaagcaggcgaatcgtaatgaggcgtgcgccgccaatatgcactgtacattccacaagcattgccttcttattttacttcttttagctgtttaactttgtaagatgcaaagaggttggatcaagattaaatgactgtgctg

SEQ ID NO: 2896 - DNA, 377 bp, Homo sapiens
  misc_feature 349: n = A,T,C or G
gaactcggtggtggccactgcgcagaccagacttcgctcgtactcgtgcgcctcgcttcgcttttcctccgcaaccatgtctgacaaacccgatatggctgaggtcgagaaattcgataagtcgaaactgaagaagacagagacgcaagagaaaaatccactgccttccaaagaaacgattgaacaggagaagcaagcaggcgaatcgtaatgaggcgtgcgccgccaatatgcactgtacattccacaagcattgccttcttattttacttcttttagctgtttaactttgtaagacgcatagagggtggatcaagtttaaatgactgtgctgcccctttcacatcanagaactactgacaacgaaggccgcgcct

SEQ ID NO: 2897 - DNA, 555 bp, Homo sapiens
ctcggtggtggccactgcgcagaccagacttcgctcgtactcgtgcgcctcgctttgcttttcctccgcaaccatgtctgacaaacccgatatggctgagatcgagaaattcgataagtcgaaactgaagaagacagagacgcaagagaaaaatccactgccttccaaagaaacgattgaacaggagaagcaagcaggcgaatcgtaatgaggcgtgcgccgccaatatgcactgtacattccacaagcattgccttcttattttacttcttttagctgtttaactttgtaagatgcaaagaggttggatcaagtttaaatgactgtgctgcccctttcacatcaaagaactactgacaacgaaggccgcgcctgcctttcccatctgtctatctatctggctggcagggaaggaaagaacttgcatgttggtgaaggaagaagtggggtggaagaagtggggtgggacgacagtgaaatctagagtaaaaccaagctggcccaaggtgtcctgcaggctgtaatgcagtttaatcagagtgccatttttttttt

SEQ ID NO: 2898 - DNA, 300 bp, Homo sapiens
gctcaattggactatgttgacctctatcttattcattctccaatgtctctaaagccaggtgaggaactttcaccaacagatgaaaatggaaaagtaatatttgacatagtggatctctgtaccacctgggaggccatggagaagtgtaaggatgcatgattggccaagtccattggggtgtcaaacttcaaccgcaggcagctggagatgatcctcaacaagccaggactcaagtacaagcctggctgcaaccaggtagaaagtcattcgtatttcaaccggagtaaattgctagaatcg

SEQ ID NO: 2899 - DNA, 344 bp, Homo sapiens
acagaagggtacggctgcgagaagacgacagaagggtacggctgcgagaagacgacagaagggtacggctgcgagaagacgacagaagggtaaaacactgaactgacaattaacagcccaatatctacaatcaaccgacaagtcattattaccctcactgtcaacccaacacaggcatgctcataaggaaaggttaaaaaaagtaaaaggaactcggcaaatcttaccccgcctgtttaccaaaaacatcacctgtagcatcaccagtattagaggcaccgcctgcccagtgacacatgtttaacggccgcggtaccctaaccgtgcaaaggtagcataatcac

SEQ ID NO: 2900 - DNA, 507 bp, Homo sapiens
tgctcggtccttccgaggaagctaaggctgcgttggggtgaggccctcacttcatccggcgactagcaccgcgtccggcagcgccagccctacactcgcccgcgccatggcctctgtctccgagctcgcctgcatctactcggccctcattctgcacgacgatgaggtgacagtcacggaggataagatcaatgccctcattaaagcagccggtgtaaatgttgagcctttttggcctggcttgtttgcaaaggccctggccaacgtcaacattgggagcctcatctgcaatgtaggggccggtggacctgctccagcagctggtgctgcaccagcaggaggtcctgccccctccactgctgctgctccagttgaggagaagaaagtggaagcaaagaaagaagaatccgaggagtctgatgatgacatgggctttggtctttttgactaaacctcttttataacatgttcaataaaaagctgaactttaaaaaaaaaaaaaaaaaa

SEQ ID NO: 2901 - DNA, 488 bp, Homo sapiens
gaggccctcacttcatccggcgactagcaccgcgtccggcagcgccagccctacactcgcccgcgccatggcctctgtctccgagctcgcctgcatctactcggccctcattctgcacgacgatgaggtgacagtcacggaggataagatcaatgccctcattaaagcagccggtgtaaatgttgagcctttttggcctggcttgtttgcaaaggccctggccaacgtcaacattgggagcctcatctgcaatgtaggggccggaggacctgctccagcagctggtgctgcaccagcaggaggtcctgccccctgcactgctgctgctccagttgaggagaagaaagtggaagcatagaaagaagaatccgacgagtctgatgatgacatgggctatggtctttttgactaaacctcttttataacatgttcaataaaaagctgaactttaaaaagaaaaaaaaaaaactcgagcctctagaactata

SEQ ID NO: 2902 - DNA, 180 bp, Homo sapiens
ctgcgttggggtgaggccctcacttcatccggcgactagcaccgcgtccggcagcgccagccctacactcgcccgcgccatggcctctgtctccgagctcgcctgcatctactcggccctcattctgcacgacgatgaggtgacagtcacggaggataagatcaatgccctcattaaagc

SEQ ID NO: 2903 - DNA, 491 bp, Homo sapiens; identical to SEQ ID NO: 351
  misc_feature 12, 154, 255, 348, 368, 402, 409, 450, 471: n = A,T,C or G

SEQ ID NO: 2904 - DNA, 235 bp, Homo sapiens
tgatttctgtggatcccagcttggttccaggaattttgtgtgattggcttaaatccagttttcaatcttcgacagctgggctggaacgtgaactcagtagctgaacctgtctgacccggtcacgttcttggatcctcagaactctttgctcttgtcggggtgggggtgggaactcacgtggggagcggtggctgagaaaatgtaaggattctggaatacatattccatgggactt

SEQ ID NO: 2905 - DNA, 465 bp, Homo sapiens; identical to SEQ ID NO: 957

SEQ ID NO: 2906 - DNA, 243 bp, Homo sapiens
tgatttctgtggatcccagcttggttccaggaattttgtgtgattggcttaaatccagttttcaatcttcgacagctgggctggaacgtgaactcagtagctgaacctgtctgacccggtcacgttcttggatcctcacaactctttgctcttgtcggggtgggggtgggaactcacgtggggagcggtggctgagaaaatgtaaggattctggaatacatattccatgggactttccttccc

SEQ ID NO: 2907 - DNA, 506 bp, Homo sapiens; identical to SEQ ID NO: 1276

SEQ ID NO: 2908 - DNA, 390 bp, Homo sapiens
gtagtcgcctctctttcagcagttacccagggtttttggagtctctggatgatttttacattcttagcagtggattgatattgctgcagaccacaaacagtgtgtttaataaaaccctgctaaagcaggtaatacccgagactctcctgtcctggcaaagagtccgtgtggccaatatgatggcagatagtggcaagaggtgggcagacatcttttcaaaatacaactctggcacctataacaatcaatacatggttctggacctgaagaaagtaaagctgaaccacagtcttgacaaaggcactctgtacattgtggagcaaattcctacatatgtagaatattctgaacaaactgatgttctacggaaaggatattggccctcctaca

SEQ ID NO: 2909 - DNA, 372 bp, Homo sapiens
aggagattcagaagcacaaccacagcaagagcacctggctgatcctgcaccacaaggtgtacgatttgaccaaatttctggaagagcatcctggtggggaagaagttttaagggaacaagctggaggtgacgctactgagaactttgaggatgtcgggcactctacaaatgccagggaaatgtccaaaacattcatcattggggagctccatccagatgacagaccaaagttaaacaagcctccggaaactcttatcactactattgattctagttccagttggtggaccaactgggtgatccctgccatctctgcagtggccgtcgccttgatgtatcgcctatacatggcagaggactgaacacctcctc

SEQ ID NO: 2910 - DNA, 619 bp, Homo sapiens; identical to SEQ ID NO: 1153

SEQ ID NO: 2911 - DNA, 499 bp, Homo sapiens
taagctcggaattcggctcgagggctccagctgagctcctgcttctactgaggacatacctcccagatgaggtggggcccccaaccccattccctgagcctggagcagagccccctctcactgtgggcttgctcaaagccctgctggagcagactggggctcaaggatggctgtcgggcccagttctaagcccatatgaggacatcctatgggaccccagcactccacccccgactccacctcgggacctatgactacccttcaggcatcagaacactcagggcctggaggcttgcttgggactggaggcttgcttggacagttcctctgtgtcactgacacaggaaatcatttctaggacacagtgatcagggaagggtgcctgggacttggagggtcccatgtatggacctgtgtatgcaatactgttctgtcatctggagctatttttaagatgtgtgtgttaaatatatacatagtttaatatataaaaaaaaaa

SEQ ID NO: 2912 - DNA, 229 bp, Homo sapiens
ggctccagctgagctcctgcttctactgaggacatacctcccagatgaggtggggcccccaaccccattccctgagcctggagcagagccccctctcactgtgggcttgctcaaagccctgctggagcagactggggctcaaggatggctgtcgggcccagttctaagcccatatgaggacatcctatgggaccccagcactccacccccgactccacctcgggaccta

SEQ ID NO: 2913 - DNA, 467 bp, Homo sapiens
ggaagttctgcgctggtcggcggagtatcaagtggccatggggagcctcagcggtctgcgcctggcagcaggaagctgttttaggttatgtgaaagagatgttggcctcatctctaaggcttaccagaagctctgatttgaagagaataaatggattttgcacaaaaccacaggaaagtcccggagctccatcccgcacttacaacagagtgcctttacacaaacctacggattggcagaaaaagatcctcatatggtcaggtcgcttcaaaaaggaagatgaaatcccagagactgtctcgttggagatgcttgatgctgcaaagaacaagatgcgagtgaagatcagctatctaatgattgccctgacggtggtaggatgcatcttcatggttattgagggcaagaaggctgcccaaagacacgagactttaacaagcttgaacttataaaagaaagctcgtctg

SEQ ID NO: 2914 - DNA, 338 bp, Homo sapiens
ggaagttctgcgctggtcggcggagtagcaagtggccatggggagcctcagcggtctgcgcctggcagcaggaagctgttttaggttatgtgaaagagatgtttcctcatctctaaggcttaccagaagctctgatttgaagagaataaatggattttgcacaaaaccacaggaaagtcccggagctccatcccgcacttacaacagagtgcctttacacaaacctacggattggcagaaaaagatcctcatatggtcaggtcgcttcaaaaaggaagatgaaatcccagagactgtctcgttggagatgcttgatgctgcagagatcaagatgcgag

SEQ ID NO: 2915 - DNA, 601 bp, Homo sapiens
tttgcacgatgccttccacatcccacggcgctgctgctgggggcagattggcctggggaggcagcacttgctctccagctcatctgggttgcttttccccgcagtggatatcacaggctaaaggggggggcagtccccaccatatttgagtctttctccaagttgcgccggacaaccaagaccaaaggacacagttacccacctggcccctctgaagtcagccggctcagacgatgcaggaagcgctgctccgagggccgagggcccacaactccattttctccacctccacctgctgatgtcacctgctttcctgtggaagaggcctcagcacctgccactttgccggcctccccagctgggaggctggagcctggccttagcagccccttttcagacctactgggccccttgggtgcccaggcagatgaagcaggctgcagcgcccagccttcaccagagcggcagccctcccctctcgaaccacggccagtctccccctcagcgtatatgctgcgcctgcccccacccgccggagcctacatccagaatgaacacagctaccaggtgggcagcgccttactctggaagcggcgagccg

SEQ ID NO: 2916 - DNA, 52 bp, Homo sapiens
gccccttgggtgcccaggcagatgaagcaggctgcagcgcccagccttcacc

SEQ ID NO: 2917 - DNA, 525 bp, Homo sapiens
cgtttcggtttctagggttgttacgaagctgcaggagcgagatggaggtggacgcaccgggtgttgatggtcgagatggtctccgggagcggcgaggctttagcgagggagggaggcagaacttcgatgtgaggcctcagtctggggcaaatgggcttcccaaacactcctactggttggacctctggcttttcatccttttcgatgtggtggtgtttctctttgtgtattttttgccatgacttgttcgctgatatctaaattaagaagttggttcttgagtgaattctgaaaatggctacaaacttcttgaataaagaagacaggactctcaatagaagaatttcacatctccaagggacccttcctttcattttacactttgttactaatttgcagaactctattaattgggtaggatttcacccattcctagctaagttcttaaaattaaaccctttggttcgtgtttaaaaactttcaaacatctgatggctttacaggggctgaatataaaagcatttg

SEQ ID NO: 2918 - DNA, 604 bp, Homo sapiens
  misc_feature 12, 14, 18, 20, 24, 27, 29, 31, 33, 35, 54, 594, 595: n = A,T,C or G
ttcgaacccatncntttncnatcngananangntnctagttcttctgaagaccncatcgattcgtttcggtttctagggttgttacgaagctgcaggagcgagatggaggtggacgcaccgggtgttgatggtcgagatggtctccgggagcggcgaggctttagcgagggagggaggcagaacttcgatgtgaggcctcagtctggggcaaatgggcttcccaaacactcctactggttggacctctggcttttcatccttttcgatgtggtggtgtttctctttgtgtattttttgccatgacttgttcgctgatatctaaattaagaagttggttcttgagtgaattctgaaaatggctacaaacttcttgaataaagaagacaggactctcaatagaagaatttcacatctccaagggacccttcctttcattttacactttgttactaatttgcagaactctattaattgggtaggatttcacccattcctagctaagttcttaaaattaaaccctttggttcgtgtttaaaaactttcaaacatctgatggctttacaggggctgaatataaaagcatttgtacttannaaaaaaaaa

SEQ ID NO: 2919 - DNA, 285 bp, Homo sapiens
ctctaacgtgggcaacagagaccctgtctcaaaaagaaaatattcctgttagccctaaaggctttacatgaggaatggtagaagtggtcttttgtttaaattagttgcattcagcatatatgaattgtcttaaatattttggggatactcccccgccttttaaacagggcataagatctggtaaactctctgtatatcttcctacctttcaaaatcgttcttagggttagtcaagtctggaatataattgctgactataaagttagcaattatgctttaaggtga

SEQ ID NO: 2920 - DNA, 241 bp, Homo sapiens
atttacacttgatggctaataaagatggacagctaatgacagaattatttaatcgattagaaagtcagcatcatttccagatagaaaaggctctagttgagaaacttcagcaggattttgtagctgactggtgctctgagggagagtgcctagcagctattaactccacctataatacttcagggtatattttggatccacacactgctgttgcaaaagtggttgcagatagggtgcaaga

SEQ ID NO: 2921 - DNA, 315 bp, Homo sapiens
cggcttctggaagagggggtgttgcggcagatccctgtagtgggcttcgtgctgaattggttttctccggtccaggcttcacagtagggaagaacttttaacttgacagcaggctctctggagtccacagaacccatatatgtctacaaagcacaaggtgcaggagtcacgctgcctccaacgccctcgggcagtcgcaccaagcagaggcttccaggccagaagccttttaaaaggtccctgcgaggttcagatgctttgagtgagaccagctcagtcagtcatattgaagacttagaaaaggtggagcgccta

SEQ ID NO: 2922 - DNA, 164 bp, Homo sapiens
tggatcccccgggctgcaggaattcgaattctgtgtgtgtgtgtgtgtatgaatggtatatttattacattatttagaaagagaatgagtgtgttatgaggataatgttatatacagtctaagtggatgtttctgtttggcacagaatgtaggatttctgaaac

SEQ ID NO: 2923 - DNA, 206 bp, Homo sapiens
tatatttattacattattttgaaagagaattagtgtgttatgtggataatgttatatacagccaaagtggatgtttctgtttggcaaggaaggtaggatttctgaaactcaggccttaaccaataggttggaagacaagaccaattgaagagttaggaaatgtgagtttttgttacttctgttattccagtcttggtttcattgtc

SEQ ID NO: 2924 - DNA, 238 bp, Homo sapiens; identical to SEQ ID NO: 874
  misc_feature 159, 227: n = A,T,C or G

SEQ ID NO: 2925 - DNA, 504 bp, Homo sapiens
cggcgtgcttgctgctggagggtgatggccctgcaaggctgtgggctccgacctcaccgggagtcgacagcgagaggttcgccgaagagcgaggttctgggcgagcgctgaacgccggccccaagcaccccgggtctttacacagtccgcgtccacagactctgacgaagacgtggatctgctctcgctttagctgctcgcggtcctccagatcatgtccgcgactcctgcgactccgcgcggaaaaaaaagtttgccaggcgtggactcaatgacctttccaagctgtgcgcctcgctgcctggaccgggtctgagcgcggctgcccaggttgacctttctgcgggagggctttctctacgtgctgttgtctcactgggtttttgtcggagccccacgccctccggcctctgattcctggaagaaagggttggtcccctcagcacccccagcatcccggaaaatggggagcaaggctctgccagcgcccatcccgctccaccc

SEQ ID NO: 2926 - DNA, 814 bp, Homo sapiens
  misc_feature 38, 93, 94, 95, 422, 440, 467, 474, 508, 519, 529, 535, 554,557, 561, 565, 584, 594, 604, 619, 641, 655, 674, 679, 690,695, 702, 704, 706, 712, 716, 724, 734, 737, 740, 743, 780,781, 808, 813: n = A,T,C or G
cggggacggagctcggcgtgcttgctgctggagggttntggccctgcaaggctgtgggctccgacctcaccgggagtcgacagcgagaggttnnncgaagagcgaggttctgggcgagcgctgaacgccggccccaagcaccccgggtctttacacagtccgcgtccacagactctgacgaagacgtggatctgctctcgctttagctgctcgcggtcctccagatcatgtccgcgactcctgcgactccgcgcggaaaaaaaagtttgccaggcgtggactcaatgacctttccaagctgtgcgcctcgctgcctggaccgggtctgagcgcggctgcccaggttgaccttttctgcggaagggctttctctacgtgctgttgctcatgggtttttgtcggagccccaacgcccttccggncttttgattcctggaaanaaaaggggttggttccccttcaagcanccccaancattccccgggaaaaaatgggggagccaaagggnttttggccaanggccccaatncccggnttcaacccgttgggttggnaantttnaccnaaattaacttcctttcctncaaggcccgnggaaaaaacnttttcccgggccacngggggggaaccaaccttgcaanggggccttgtaccnggtcttcaaacggcgggtnccaanaacccttgccnccatngaaaccnantnggaacncctngggggttnttccccaatnggngcnccnaaaaaacaaccccggttccaaccatttaagggaaaannggcgggggggccccaagggcccttttnggacnt

SEQ ID NO: 2927 - DNA, 375 bp, Homo sapiens
ctgacgaagacgtggatctgctctcgctttagctgctcgcggtcctccagatcatgtccgcgactcctgcgactccgcgcggaaaaaaaagtttgccaggcgtggactcaatgacctttccaagctgtgcgcctcgctgcctggaccgggtctgagcgcggctgcccaggttgacctttctgcgggagggctttctctacgtgctgttgtctcactgggtttttgtcggagccccacgccctccggcctctgattcctggaagaaagggttggtcccctcagcacccccagcatcccggaaaatggggagcaaggctctgcagcgcccatcccgctccaccgtcgctgcagctcccaattactcttctgcaggcg

SEQ ID NO: 2928 - DNA, 405 bp, Homo sapiens
ggggacggagctcggcgtgcttgctgctggagggtgatggccctgcaaggctgtgggctccgacctcaccgggagtcgacagcgagaggttcgccgaagagcgaggttctgggcgagcgctgaacgccggccccaagcaccccgggtctttacacagtccgcgtccacagactctgacgaagacgtggatctgctctcgctttagctgctcgcggtcctccagatcatgtccgcgactcctgcgactccgcgcggaaaaaaaagtttgccaggcgtggactcaatgacctttccaagctgtgcgcctcgctgcctggaccgggtctgagcgcggctgcccaggttgacctttctgcgggagggctttctctacgtgctgttgtctcactgggtttttgtcggacc

SEQ ID NO: 2929 - DNA, 139 bp, Homo sapiens
ctcgtgttcagctgtcagaataacagccaataaaaactacaggagcaaaacctctcaggaaggtgctttaaaaaagatgcatgaggaagaacaccatcaacaaatgtccatcttacaactgcaactgatacaaatgaat

SEQ ID NO: 2930 - DNA, 273 bp, Homo sapiens
ttctggctgggaagcgcgattgtggctttaaaccaccatcatggtctagcaaagaggcaaagaccaagaccaccaagaagcgccctcagcgtgcaacatccaatgtgtttgccatgtttgaccagtcacagattcaggagttcaaagaggccttcaacatgattgatcagaacagagatggcttcatcgacaaggaagatttgcatgatatgcttgcttctctagggaagaatcccactgatgcataccttgatgccatgatgaatgaggccc

SEQ ID NO: 2931 - DNA, 56 bp, Homo sapiens
gggaaccgccattctgcctgggaaccgccattctggccgggaaccgccattatgac

SEQ ID NO: 2932 - DNA, 365 bp, Homo sapiens
ggcgcattcttacctgtcggggtgcggcgagtgtctcacctctctgcacttccaaggactcttgtcatctgccttaggcgggaaatgctgttgctggattgcaaccccgaggtggatggtctgaagcatttgctggagacaggggcctcggtcaacgcacccccggatccctgcaagcagtcgcctgtccacttagccgcaggaagcggccttgcttgctttcttctctggcagctgcaaacgggcgctgacctcaaccagcaggatgttttaggagaagctccactacacaaggcagcaaaagttggaagcctggagtgcctaagcctgcttgtagccagtgatgcccaaattgatttatgtag

SEQ ID NO: 2933 - DNA, 119 bp, Homo sapiens
gagcggtggctgagaaatgtaaggattctggaatacatattccatgggactttccttccctctcctgcttcctcttttcctgctccctaacctttcgccgaatggggcagcaccactga

SEQ ID NO: 2934 - DNA, 421 bp, Homo sapiens
  misc_feature 130, 185, 246, 256, 336, 361, 385, 412: n = A,T,C or G
tttttttttttttttttggaaataagtcaaagcattgtttatttatgacatatttacatatttacaaaactgattttactcaatacatcatcctgcgtaatatcataaaatgaacaccatatcctgggantaaaaatccatatttcttaataatttatgtatagcccaacttttagaacatagantattatcaatttggcttcccaaactacaaagtcctgtttataattttttctagccaaggancagagtaggntcaacaggcatattaaagtaatttagttaaccctgaggtaattactaacttggcataattttggaatggggtatatatancacactttccatctggcacttaggntacttattactattcacactaccnttttggtatttatccacctcaattttncaacttcct

SEQ ID NO: 2935 - DNA, 481 bp, Homo sapiens
gggtagccgcttttcgtcgactcttaccggttggctgggccagctgcgccgcggctcacagctgacgatgggggaccccagcaagcaggacatcttgaccatcttcaagcgcctccgctcggtgcccactaacaaggtgtgttttgattgtggtgccaaaaaatcccagctgggcaagcataacctatggagtgttcctttgcattgattgctcagggtcccaccggtcacttggtgttcacttgagttttattcgatctacagagttggattccagctggtcatggtttcagttgcgatgcatgcaagtcggaggaaacgctagtgcatcttccttttttcatcaacatgggtgttccaccaatgacaccaatgccaagtacaacagtcgtgctgctcagctctatagggagaaaatcaaatcgctcgcctctcaagcaacacggaagcatggcactgatctgtggcttgatagttgtgt

SEQ ID NO: 2936 - DNA, 136 bp, Homo sapiens
ggggtaagtttagaaatacggctgggcatgtccagccctgaccacggccagctctggagggctgtcctttggctgtacccacttggaagagaaagaaaaagaaaaaaaaaaaaaaaaaaaaaaatttttttttttt

SEQ ID NO: 2937 - DNA, 578 bp, Homo sapiens
aaacaacaaacaccagaaaaattacctataccaatgatagcaaaaaaccttatgtgtgaactcgatgaagactgtgaaaagaatagtaagagggactacttaagttctagttttctatgttctgatgatgatagagcttctaaaaatatttctatgaactctgattcatcttttcctggaatttctataatggaaagtccattagaaagtcagcccttagattcagatagaagcattaaagaatcctcttttgaagaatcaaatattgaagatccacttattgtaacaccagattgccaagaaaagacctcaccaaaaggtgtcgagaaccctgctgtacaagagagtaaccaaaaaatgttaggtcctcctttggaggtgctgaaaacgttagcctctaaaagaaatgctgttgcttttcgaagttttaacagtcatattaatgcatccaataactcagaaccatccagaatgaacatgacttctttagatgccaatggatatttcgtgtgcctacagtggttcatatcccatggctataacccctactcaaaaaagaagatcctgtatgccacatc

SEQ ID NO: 2938 - DNA, 229 bp, Homo sapiens
  misc_feature 35, 37: n = A,T,C or G
gcctaggtgcccaggctatgatgagtctgcttttnanggaggtagggaatgacatcttccttggacccaaagcttaaaagtaatgtatgctttgctgaccactgtttgttaggccttaaacaacattcactgtggtggtatcaggcacactgctatgtgcatcaattatttttttgctttccaaacagaatctctggggcacaagttttacactcaagctaagtataac

SEQ ID NO: 2939 - DNA, 503 bp, Homo sapiens
tggtacgcctgcaggtaccggtccggaattcccgggtcgacccacgcgtccggcgtcatggagctgacctggttcccatctactcctttggagagaatgaagtgtacaagcaggtgatcttcgaggagggctcctggggccgatgggtccagaagaagttccagaaatacattggtttcgccccatgcatcttccatggtcgaggcctcttctcctccgacacctgggggctggtgccctactccaagcccatcaccactgttgtgggagagcccatcaccatccccaagctggagcacccaacccagcaagacatcgacctgtaccacaccatgtacatggaggccctggtgaagctcttcgacaagcacaagaccaagttcggcctcccggagactgaggtcctggaggtgaactgagccagccttcggggccaattccctggaggaaccagctgcaaatcacttttttgctctgtaaatttggaagtgtcatgggtgtct

SEQ ID NO: 2940 - DNA, 248 bp, Homo sapiens; identical to SEQ ID NO: 54

SEQ ID NO: 2941 - DNA, 457 bp, Homo sapiens
atcttgtctcttttcatcgtgatggtgtgatgctgacgagaatatcttatgctttcttcagcctgttgcaatctgagccaatgattttctttgcactgatcctttctactctggagagaagctcttttgacacagatcctgccccgtttaatagactccagctgctggcactgccttctgagttctttcacttccgaattcttatcgtcctgcagccccaccacagtcaatgactaagttcctctggactttcacatggatcgtaatagacaacttcatcctgtttttcttaccagaccctaaaatgtgcctccaagacagtcgtgggaacagtatggagccagcagcagaagccactcacgaaccaatggaggagaacaactcagaaacagacccaagtcaatctaaggtttaacttttataagtctttcaagagagtccaactgtgtagtaagca

SEQ ID NO: 2942 - DNA, 589 bp, Homo sapiens
gcttccaggtctccttccagcatccacacaagtacctgctccactacctggtttccctccagaactggctgaaccgccacagctggcagcggacccctgttgccgtcaccgcctgggccctgctgcgggacagctaccatggggcgctgtgcctccgcttccaggcccagcacatcgccgtggcggtgctctacctggccctgcaggtctacggagttgaggtgcccgccgaggtcgaggctgagaagccgtggtggcaggtgtttaatgacgaccttaccaagccaatcattgataatattgtgtctgatctcattcagatttataccatggacacagagatcccctaaggtcctggcccaggcctgcccaaagagaagcccaggatggtcggctgcctggggacattgtcaccacgtcgccatgacggctggtccccacaggaccagctgggaggactggttgtgctgctggagaagggctggagaaggcaatggcatgctgccgctttgccagtccctaaaagtcgcggtgcaggtgatggtgggagccgcgcctccagcgggcaggccgggagtgtactgtgtgc

SEQ ID NO: 2943 - DNA, 241 bp, Homo sapiens
cgcttccaggtctccttccagcatccacacaagtacctgctccactacctggtttccctccagaactggctgaaccgccacagctggcagcggacccctgttgccgtcaccgcctgggccctgctgcgggacagctaccatggggcgctgtgcctccgcttccaggcccagcacatcgccgtggcggtgctctacctggccctgcaggtctacggagttgaggtgcccgccgaggtcgagg

SEQ ID NO: 2944 - DNA, 221 bp, Homo sapiens
ttcagctctgcaaacactgtcacatcctttcctggaagggcactgaccatccgtgcactgccaataacccagagagctgctccgtttcactttcaccccaggactttatcaacttgttcaagttctgaatcccagcacatgacaacacttcagaagggtccccctgctgactggagagctgggaatatggcatttggacacttcatttgtaaatagtgtac

SEQ ID NO: 2945 - DNA, 228 bp, Homo sapiens
  misc_feature 191: n = A,T,C or G
gagctttcttaataaccgtacttctcaaaatcagagttttactgtttcaataaatgttcaccctagattgtaagttttttgttgttgagccctagatttttttctactagtgtaaatctgtattccctccaagtatggtgataaggggactgagtcttatttacatttgtacaatcactactttacctgtngtatttgcagtaagtcttttgagccctattaaacctg

SEQ ID NO: 2946 - DNA, 531 bp, Homo sapiens
tttcttaataaccgtacttctcaaaatcagagttttactgtttcaataaatgttcaccctagattgtaagttttttgttgttgagccctagatttttttctactagtgtaaatctgtattccctccaagtatggtgataaggggactgagtcttatttacatttgtacaatcactactttacctgttgtatttgcagtaagtcttttgagccctattaaacctgtcaattttcttgtcctgtcagaaaactgagattttggctcaaaaatggatgttattaacaaaggggaacaatatagatgtcttagtacaaagaaaatgaaatgtaagaggagattgtctggagttcaggggatagagtgtcaagtcttaaatggttacatctttttgctaagtgttactcagaatatagttacaaatatggtacttaaatatctagctgaaatttgtttgtcccatgagcttctcacatgagtctactgggcaattttatgtgagttttggtcaaaattggtaatctcttttatctt

SEQ ID NO: 2947 - DNA, 147 bp, Homo sapiens
  misc_feature 112: n = A,T,C or G
aacttgttacccaataacaatttaatgttaaatttggctttcttctgtgtcccagcctcttaaattaatagatgggcctttccattatcattatgaccggacattgtaaagnacttaaggtaacacccagttttctattacttgccc

SEQ ID NO: 2948 - DNA, 518 bp, Homo sapiens
acctgaagaatattagaagaaattgtgcaccctccacaaaacatacaaagtttaaaagtttggatctttttctcagcaggtatcagttgtaaataatgaattaggggccaaaatgcaaaacgaaaaatgaatcatctacatgtagttagtaatttctagtttgaactgtaattgaatattgtggcttcatatgtattattttatattgtacttttttcattattgatggtttggactttaataagagaaattccatagtttttaatatcccagaagtgagacaatttgaacagtgtattctggaaaacaacacactaactgaacagaagtgaatgcttatatatattatgatagccttaaacctttttcctctaatgccttaactgtcaaataattataaccttttaaagcataggactatagtcagcatgctagactgagaggtaaacactgatgcaattagaacaggtactgatgctgtcagtgtttaacactatgtttagctgtgtttatgctat

SEQ ID NO: 2949 - DNA, 76 bp, Homo sapiens
gctgctcatgagcagcatggacgacctgatacgccactgtaacgggaagctgggcagctacaaaatcaatggccgg

SEQ ID NO: 2950 - DNA, 308 bp, Homo sapiens
gagcattatgagcattatgtcagaatagaatagaattggggttcgatcttaacaggccagaaatgcctgggtttttttggtttgtttttgtttttgtttttttatcaaatcctgcctgactgtctgcttgttttgcctaccatcgtgacatctccatggctgtaccaccttgtcgggtagcttatcagactgatgttgactgttgaatctcatggcaacaccagtcgatgggctgtctgacattttggtatctttcatctgaccatccatatccaatgttctcatttaaacattacccagcatcattg

SEQ ID NO: 2951 - DNA, 530 bp, Homo sapiens; identical to SEQ ID NO: 1397

SEQ ID NO: 2952 - DNA, 104 bp, Homo sapiens
ggacgtgcctggaaccacctcgtccacgtccacgtccacctgggggcctcgggaggctaggcccctcctcaaaggcccaccagcccggcgctcatgctgagccc

SEQ ID NO: 2953 - DNA, 417 bp, Homo sapiens
tatctttcatctgaccatccatatccaatgttctcatttaaacattacccagcatcattgtttataatcagaaactctggtccttctgtctggtggcacttaaagtcttttgtgccataatgcagcagtatggagggaggattttatggagaaatggggatagtcttcatgaccacaaataaataaaggaaaactaagctgcactgtgggttttgaaaaggttattatacttcttaacaattctttttttcagggacttttctagctgtatgactgttacttgaccttctttgaaaagcattcccaaaatgctctattttagatagtttaacattaaccaacataattttttttagatcgagtcagcataaatttctaagtcagcctctagtcgtggttcatctctttcacctgcat

SEQ ID NO: 2954 - DNA, 630 bp, Homo sapiens; identical to SEQ ID NO: 1287

SEQ ID NO: 2955 - DNA, 596 bp, Homo sapiens
tttttttttttttttttttttttggggtaaaagttatatcttattgccatgctacaaaatgtatgaagttggcactgatagggagaaatagagaacaaagggtgggaagggatagagggaaaattatgttgttacatatacaacaaggttttattttaattaacagtggttacgttttgccaatattaaaaatgcaaaccaaaatttaaaatgctgatctgaaacagcattaagatacaatgtatgcatagtacagtatcacttatgtctttttattagagaaatatggaatgtttataaaagaaattaaccatgggggtaaaattcatatttcatatacaatttggcaatggtagtcccactgttggacaattttttataaaagaaaaaattaaaaatctaataagctacctttatacaaagttgctatatttatgcctttacgtaggaaaaaaacatttataatgcaaattaggacatacaatagtcttacaatactatacaatgtaatgaaaataaaacataacacaaagtttgtcctttataaaatgtatattttgcattactaatgcaaatgtggcacactggtgactact

SEQ ID NO: 2956 - DNA, 559 bp, Homo sapiens
tggcgggttgctttccaaaatggcgcgggtgctgaaggctgcagccgcgaatgccgtagggcttttttccagacttcaagctcccattccaacagtaagagcttcttccacatcacagcccttggatcaagtgacaggttctgtgtggaacctgggtcgactcaaccatgtagccatagcagtgccagatttggaaaaggctgcagcattttataagaatattctgggggcccaggtaagtgaagcggtccctcttcctgaacatggagtatctgttgtttttgtcaacctgggaaataccaagatggaactgcttcatccattgggacgtgacagtccaattgcaggttttctgcagaaaaacaaggctggaggaatgcatcacatctgcatcgaggtggataatattaatgcagctgtgatggatttgaaaaaaaaagaagatccgcagtctaagtgaaggggtcaaaataggagcacatggaaaaccagtgatttttctccatcctaaagactgtggtggagtccttgtggaactggagcaagcttgacttatatt

SEQ ID NO: 2957 - DNA, 638 bp, Homo sapiens
tggcgggttgcgttccaaatggcgcgggtgctgaaggctgcagccgcgaatgccgtagggcttttttccagacttcaagctcccattccaacagtaagagcttcttccacatcacagcccttggatcaagtgacaggttctgtgtggaacctgggtcgactcaaccatgtagccatagcagtgccagatttggaaaaggctgcagcattttataagaatattctgggggcccaggtaagtgaagcggtccctcttcctgaacatggagtatctgttgtttttgtcaacctgggaaataccaagatggaactgcttcatccattgggacgtgacagtccaattgcaggttttctgcagaaaaacaaggctggaggaatgcatcacatctgcatcgaggtggataatattaatgcagctgtgatggatttgaaaaaaaaagaagatccgcagtctaagtgaaggggtcaaaataggagcacatggaaaaccagtgatttttctccatcctaaagactgtggtggagtccttgtggaactggagcaagcttgacttatatttgcaagcaactaaattaattgacctgaaaaagcctatcaaatactatcaaaatgtactatgacattgagtccttcactgc

SEQ ID NO: 2958 - DNA, 57 bp, Homo sapiens
gactacatttggggatgatgcattcctttaagattgaatgattctgcccttgggcag

SEQ ID NO: 2959 - DNA, 538 bp, Homo sapiens
gccgggctgctaattctgtttaattgttcctgggctaaaaagaattagaaggaagctgtctgtttcccactgcggttatgtttcagtaaattagacgtactttctgatgaatactaattagccactgagcatttgcacccactgtctttgctggttgtgtgcagaacagctgccaagttgcccaagaccctcgctatcccatccccctctcttgctttccacttttgggcttcctttgcctagattagaagagatttcagttccgagaaagtaaaaggtgatccaaggaagtaatcaccgagtgtctcatggtttttccttgttgacaaaattcaaaactcacacatgtgtagtctaatgatagcgctaggatttaaagaaagtgttttagtgctgtgcttatttaggactacatttggggatgatgcattcctttaagattgaatgattctgcccttgggcagagctcccaattagggaggattaggtaagctttttgtggcgatgggtaataccattcttttcctcattgtgcctg

SEQ ID NO: 2960 - DNA, 548 bp, Homo sapiens
tgaatcagtaggaatgtggggaagggagtgaggggagaccccctccttgactcagcagtggtgacggtcggtgtgtcctgcagacctgaagccaagatcaagggggcttgagcaccaggagcccccgcagttgctgaatgaccagcggagggcaggtgccagcctgtggcaaaataggaaagaaaaggacaggatggggacttcaccatttttttcagccttaaattgttccttaaaccttcatgtccttttctctaatgtgtgttcttgtttggtaaaataaaaaagtttgtaaccctgagttctctaaagatatacattcttttttactggtttgtgaagtcagaaggatgagagctgctatttcttggaaccgtgcaataaatattagcatattcagtctcggttctgcctagaggacctatttgcttttctttatctcgtaacccataactcacaggacattaaccagggtgtccaagaacagtctgggaaagttttgataattacttcagcattgctgtgtgatgggagacattgttttaaaa

SEQ ID NO: 2961 - DNA, 354 bp, Homo sapiens
tcagtgggagtgaatcagtaggaatgtggggaagggagtgaggggagaccccctccttgactcagcagtggtgacggtcggtgtgtcctgcagacctgaagccaagatcaagggggcttgagcaccaggagcccccgcagttgctgaatgaccagcggagggcaggtgccagcctgtggcaaaataggaaagaaaaggacaggatggggacttcaccatttttttcagccttaaattgttccttaaaccttcatgtccttttctctaatgtgtgttcttgtttggtaaaataaaaaagtttgtaaccctgagttctctaaagatatacattcttttttactggtttgtgaagtc

SEQ ID NO: 2962 - DNA, 570 bp, Homo sapiens
cttttataggattcatttaaaggtgaataaaataatgaatgtgaaactcatattagagcttaacatatagtagtaatgatttataaaatatttgcctcccttagaccagagcagctactaaatttgattttaataataagataaacaaattaataagatcacaaagttgttatgtaataacataaacagctgtgttaaaattagtagtgacccatatcaaagaaacacaattacaaagagattaagaaggataatatttaaagtgtagctttactcagtcttttgtgtgaaggtattcttagggataaaacaatgtatttggaagctgctggaagaatatggtgcaaagaatatttttaaatgcttgtgaatgttctgtaaccacaaacatagatacataacagatcaaagacatattttagactgccatgtggacttaaatcatgggaggcggaagagtggctccccaaagaggactatatcgtaataccagaacttgtgaatatattactttaagtggcaaaagggactttacagatgtgattaaaattaaggaccttgaaatggggg

SEQ ID NO: 2963 - DNA, 540 bp, Homo sapiens
aactagacttcttttataggattcatttaaaggtgaataaaataatgaatgtgaaactcatattagagcttaacatatagtagtaatgatttataaaatatttgcctcccttagaccagagcagctactaaatttgattttaataataagataaacaaattaataagatcacaaagttgttatgtaataacataaacagctgtgttaaaattagtagtgacccatatcaaagaaacacaattacaaagagattaagaaggataatatttaaagtgtagctttactcagtcttttgtgtgaaggtattcttagggataaaacaatgtatttggaagctgctggaagaatatggtgcaaagaatatttttaaatgcttgtgaatgttctgtaaccacaaacatagatacataacagatcaaagacatatttgagactggcatgtggacttaaatcatgggaggcggaagagtggctccccaaagaggactatatcgtagtaccagaacttgtgaatatattactttaagtggcaaaagggac

SEQ ID NO: 2964 - DNA, 622 bp, Homo sapiens; identical to SEQ ID NO: 1191

SEQ ID NO: 2965 - DNA, 378 bp, Homo sapiens
acaatgggtttgttctctgccttataaattgggggattctagaggagtctgcttttctcccaagaaggacctcttcttttcttgcttttcatatgctctccttgagatatcttgggtattctcatggctttaaatagcacttatatccagaagactcataaatctgcaatctaattatggcatctccagagttctgtattttaaaagttagcagaatctttaacgctgtggcaaagtttctggttttaagcgtaaaggtagtaatgagacatgaaaataccgtgaagccatcaaacctgtaatttaaaaaaataattgacagcattttggagaacaaagctccttgctgcatgtggggaataaaaagtaaataaaata

SEQ ID NO: 2966 - DNA, 396 bp, Homo sapiens; identical to SEQ ID NO: 1187

SEQ ID NO: 2967 - DNA, 529 bp, Homo sapiens
ttttttttttttttttttttttttttcggtagaaatggggttttaccatgttgcccaggctagtctcgaactcctgggcttaagcaatccacacacctcgcttccaaaaaagctggggttacaggtgtgagccatcacacccagcctaatatacaatctcaaatattttgttttaaatcattacttactgaactataaagtaaaactaatttttagacagcattttaatacatattttactttttaaaggttataaagaaaacactaacaatatggaaaatgcatatttaaagaaaattgaaatcaaatataatcttatggctcaaaatcattagtgttaatattttgatacctaccttccccatcttttgcctacgaatactgggttaagagtttttaaatagttttgtccttgctttgtaattttcgtatgttctcacaaaagagaagctgaggaagcatttggctattgggaaaattaattaatagatgttaacttaccaagatatactataatagattagacagc

SEQ ID NO: 2968 - DNA, 485 bp, Homo sapiens
tttaaagtaaatgactcatgttgaggaaagaggttattacctaaatctggactgcggcctaaggaaattcccttaacctctattctggtttcctatttcaaaatggttgtgtaggaggctaatggaagttagttggttgctatgatccaaaaactctatgggtgaaaatttaaagtacagatttcttatttaatcgttaaacagctttagttgtgagttctatgtcctggtataatggatcctgattattaatgcattaaatatgcattcagtgaattcaaatgttgctaattattcttttaccaatcaaagaaaactcaaagcatgggattaagaggggttggccaaaagtatttggaccaggttgcataccaggaccatgaagaaattgagaacagagcctacatcttttatactatggctcaaagcaagggctgttggaatgtgctgcttctccaaagtaggacttatgaaaaaatgagggt

SEQ ID NO: 2969 - DNA, 576 bp, Homo sapiens
tatcagcatctgtagaggagaaagcagaataagcactggggtatttgatagacttgagaataagagaaccccaaagttgtcaataggtatttgctagaaagttcagtgggtcagggtgggaatagcagctgaaattggcagggattttgactattcaaataatgggtgagtagaagggatctgtggaatagccattatgacctcttgaaaccaggcaactagggggtcccttctagaatgatgctgcgtacctaagaaattcagtagggagtggagtcaaaatgatcagaaaagatagagatagttgtggcaaaagatgatctaagagtgtgtgtgtatgtgtgtgagtgagagagagaaatctcaagaaatagtggctatggtgttgaacactacatgaaagcaacctaaaacagctgtgtgaagttagaaaaggtactctggaccatattgccctgtaaaagctcaggaaaactaattttgcataaacataagcaacaggaaattattgctgtcaaatctcattcagagttattgtacaaaaaaagagacaagaatccctatagacaatgaaag

SEQ ID NO: 2970 - DNA, 459 bp, Homo sapiens; identical to SEQ ID NO: 1165

SEQ ID NO: 2971 - DNA, 250 bp, Homo sapiens
tatacccaggatattatctaacgtgtctaacaggggtgttaatgatattagcagcaagagctatgagaaataactttagacattatttcattgaaccttcccaactgaaattattttatgatgttataacatggatagtaactcaagtagcaataagttacacagttgtgccatttgtgcttctttctataaaaccatcactcacgttttacagctcctggtattattgcctgcacattcttggtatctt

SEQ ID NO: 2972 - DNA, 509 bp, Homo sapiens
atactttatctattttcgggcaacttgcttccctcatgaaccatggacatctcaatgtgccattacacacaggagttatatgttaggtattgttgtcccattttacagaagagaatccgcaaggttcacagagtgaatcataggcataaagtccttcaggtggtaaatggcaaggctggtgttccaaccagtcttctctggctccagggactggctccttcagactacatttcaccagctgcctccaggaacagaagacgggaattcacctttcatgcgacatataccagaaacgtggacctcagccaccctgggtcctatttgatccccagggccttcatttggccctcgaataaaaaccttatttttttatctccttacctttcccagaattcatagtaggacttggctggtgaaaggctggttgctgagaaggctacagtgtggctaggctgcagttccctgttattacattgccccaggtattaatattgtatatttaggcagct

SEQ ID NO: 2973 - DNA, 554 bp, Homo sapiens
ggatttcaaatctgagatgatactttatctattttcgggcaacttgcttccctcatgaaccatggacatctcaatgtgccattacacacaggagttatatgttaggtattgttgtcccattttacagaagagaatccgcaaggttcacagagtgaatcataggcataaagtccttcaggtggtaaatggcaaggctggtgttccaaccagtcttctctggctccagggactggctccttcagactacatttcaccagctgcctccaggaacagaagacgggaattcacctttcatgcgacatataccagaaacgtggacctcagccaccctgggtcctatttgatccccagggccttcatttggccctcgaataaaaaccttatttttttatctccttacctttcccagaattcatagtaggacttggctggtgaaaggctggttgctgagaaggctacagtgtggctaggctgcagttccctgttattacattgccccaggtattaatattgtatatttaggcagctgttctcatccgtgcctggcagtgaaa

SEQ ID NO: 2974 - DNA, 537 bp, Homo sapiens
attctgaccccattgtgcaccttagtcatggcaaactttccagttgctccttgccaaaactcaagaataaaagggcccaagctagagaggctgtcctcacaagcatcagctgctgggggcttccactcattttcctctgaaacaacagagaaagagaccatctctcattcgcagagcagcccaaggccttctgaggagactgtgagtctcctctaagtcatttctctctgctttgtagcagtggagctaccaagggtgagatgagcaggttgagaggcctctgaagcctgctgggcacaatgctctgtgataagtttcagctccactggagcttatcatccaccagcaatcgacttcatggctgctgctcagaggccctaggtgctgcgctgctcactgccctcacgtctctgggacttccacacataaagccatctctttccattgcactatggcacttgtagggaggatcccacacttagggcccaaaatgagaccatttgagtcaaatttctaattgtctttcaaattttatta

SEQ ID NO: 2975 - DNA, 492 bp, Homo sapiens
attctgaccccattgtgcaccttagtcatggcaaactttccagttgctccttgccaaaactcaagaataaaagggcccaagctagagaggctgtcctcacaagcatcagctgctgggggcttccactcattttcctctgaaacaacagagaaagagaccatctctcattcgcagagcagcccaaggccttctgaggagactgtgagtctcctctaagtcatttctctctgctttgtagcagtggagctaccaagggtgagatgagcaggttgagaggcctctgaagcctgctgggcacaatgctctgtgataagtttcagctccactggagcttatcatccaccagcaatcgacttcatggctgctgctcagaggccctaggtgctgcgctgctcactgccctcacgtctctgggacttccacacataaagccatctctttccattgcactatggcacttgtagggaggatcccacacttagggcccaaatg

SEQ ID NO: 2976 - DNA, 509 bp, Homo sapiens
aagacattcaaattagccaccactggagtagatgacctaaaagttcttacaactctcaattatacccagtgatgtctcgattagcacttattataaaaattaaaatttataattcaacatttataccatccagaaaaagttaaaatatattaatagcctatttctcttcaataaagcgtatatataactctatttgttaatgtttctattctccatgacattctgtttatagataagccctatgctatttctagtcaagtgctaatctcttgaatgaagctgaattaggtagtcaactactagatgtatcctgaaaagcaagtaatgtgtatatttcatttattttatacataagagctacagactgttgtcacaatcttttcaagggctattaaattcattattttaactaacatttttgaacatctgtcttatgttgttaattgaggacatttctgaatgtataacaacataagaataatagttgttaaacttcaaagagatgacag

SEQ ID NO: 2977 - DNA, 649 bp, Homo sapiens
caaattagccaccactggagtagatgacctaaaagttcttacaactctcaattatacccagtgatgtctcgattagcacttattataaaaattaaaatttataattcaacatttataccatccagaaaaagttaaaatatattaatagcctatttctcttcaataaagcgtatatataactctatttgttaatgtttctattctccatgacattctgtttatagataagccctatgctatttctagtcaagtgctaatctcttgaatgaagctgaattaggtagtcaactactagatgtatcctgaaaagcaagtaatgtgtatatttcatttattttatacataagagctacagactgttgtcacaatcttttcaagggctattaaattcattattttaactaacatttttgaacatctgtcttatgttgttaattgaggacatttctgaatgtataacaacataagaataatagtttttaaacttcaaagagatgacaggttaatgagtaaaggagaaatatgaaatatcacagaattccttgacactaaatgatgttttgcaaatactgaacagaatgatgtttgtaaactttccactggttttcaagagtcccaaaacattaggaaaatgtacatcacctaactt

SEQ ID NO: 2978 - DNA, 494 bp, Homo sapiens
atatcagaagtaaaacaatttttcttgttgactgctttggtaaaaaacagtttgatggatagttttacatttcactggactagataaaaaatggtgctaatatttatgtagcttgatgctatagttgctttggtatcaaacttaatacctaacccatataagatccttattatataattttgtgatcagtaaaatgatattttaaagagtgatcttaaaaatatgacctggtcattgcacaacgtttgcatttgaaatgaatttttgtactatagggtggatatggagttattcagtgcaagtgtgtgcttaatatcaaaccctatgcaaggagctatgtctagatttttggtccgaatttgcctccttcaagcctactagtgtgagatggaaaaaaatcgattgctcttttaatattatttccattttgaaattctcgacacttgaatgaaggcagtagaagcctctttttggatttctcttctaataacaaa

SEQ ID NO: 2979 - DNA, 630 bp, Homo sapiens
aaaacatttttcttgttgactgctttggtaaaaaacagtttgatggatagttttacatttcactggactagataaaaaatggtgctaatatttatgtagcttgatgctatagttgctttggtatcaaacttaatacctaacccatataagatccttattatataattttgtgatcagtaaaatgatattttaaagagtgatcttaaaaatatgacctggtcattgcacaacgtttgcatttgaaatgaatttttgtactatagggtggatatggagttattcagtgcaagtgtgtgcttaatatcaaaccctatgcaaggagctatgtctagatttttggtccgaatttgcctccttcaagcctactagtgtgagatggaaaaaaatcgattgctcttttaatattatttccattttgaaattctcgacacttgaatgaaggcagtagaggcctctttttggatttctcttctaataacaaaactttatttagggaaggtttccctgtgctatcgtaagtttgttttgagcactgcattcactttaaaattctggaggaacaaaggctgggcacataatcacaaagcccaggccacacaataattccggggttgtattttctaagaacta

SEQ ID NO: 2980 - DNA, 156 bp, Homo sapiens
gggggagataaggcaaagaggcacttttggatttctccatctgagcagctctgtgattcattatctgttctagaaagcagcacacgcagttccagcaaaaaaaaaaaaaaaaaaaaatttttttttttttccccccttttttttttttttttcccc

SEQ ID NO: 2981 - DNA, 579 bp, Homo sapiens
attccgttgctgtcggcggccgggtcccgatgagcctcctgttgcctccgctggcgctgctgctgcttctcgcggcgcttgtggccccagccacagccgccactgcctaccggccggactggaaccgtctgagcggcctaacccgcgcccgggtagagacctgcgggggatgacagctgaaccgcctaaaggaggtgaaggctttcgtcacgcaggacattccattctatcacaacctggtgatgaaacacctccctggggccgaccctgagctcgtgctgctgggccgccgctacgaggaactagagcgcatcccactcagtgaaatgacccgcgaagagatcaatgcgctagtgcaggagctcggcttctaccgcaaggcggcgcccgacgcgcaggtgccccccgagtacgtgtgggcgcccgcgaagcccccagaggaaacttcggaccacgctgacctgtaggtccgggggcgcggcggagctgggacctacctgcctgagtcctggagacagaatgaagcgctcagcatcccgggaatacttctcttgctgagagccgatgcccgtccccggg

SEQ ID NO: 2982 - DNA, 472 bp, Homo sapiens
ggcttagcggataacaatttcacacaggagctagcagacaccacaagataccaacagagcttctgaaacagatacccatagcattggagagaaaaacagctcacagtctgaggaagatgatattgaaagaaggaaagaagttgaaagcatcttgaagaaaaactcagattggatatgggattggtcaagtcggccggaaaatattccccccaaggagttcctctaaacacccgaagcgcacggccaccctcagcatgaggaacacgagcgtcatgaagaaagggggcatattctctgcagaatttctgaaagatttccttccatctctgctgctctctcatttgctggccatcggattggggatctatattggaaggcgtgtgacaacctccaccagcaccttttgatgaagaactggagtctgacttggttcgttagtggattacttctgagcttgcaacatagctcactg

SEQ ID NO: 2983 - DNA, 355 bp, Homo sapiens
tctacacttaaagctttggagcaattcccatcgaccagagttggtccgaccagccttggaaaggtcactgaaaaatcttcaattggactatggtgacctctatcttatacattttccattgtctgcaaagccaggtgaggaagtgatcccaaaagatgacaatggaaaaatactatttgacacagtggatctctgtgccacatgggaggccatggagaagtgtaaagatgcacgattggccaagtccatcggggtgtccaacttcaaccacaggctgctggagatgatcctcaacaagccagggctcaagtacaagcctgtctgcaaccaggtggaatgtcatccttacttcaac

SEQ ID NO: 2984 - DNA, 510 bp, Homo sapiens
aagactactgaatctgctaccaaaacagtgaatcagtgagtcgatgttctattttttgttttgtttcctcccctatctgtattcccaaaaattactttggggctaatttaacaagaactttaaattgtgttttaattgtaaaaatggcagggggtggaattattactctatacattcaacagagactgaatagatatgaaagctgattttttttaattaccatgcttcacaatgttaagttatatggggagcaacagcaaacaggtgctaatttgttttggatatagtataagcagtgtctgtgttttgaaagaatagaacacagtttgtagtgccactgttgttttgggggggcttttttcttttcggaaatcttaaaccttaagatactaaggacgttgttttggttgtactttggaattcttagtcacaaaatatattttgtttacaaaaatttctgtaaaacaggttataacagtgtttaaagtctcagtttcttgcttggggaac

SEQ ID NO: 2985 - DNA, 371 bp, Homo sapiens
ttccgttgctgtcggaattgaggaagagctgggggatgaagctcgctttgccggacataacttccgtaatcccagtgtgctgtgattcctctgcttgcctggagacgtggaacctctgtctcatcctcctggaaccttgctgtcctgatctgtgatagttcaccccctgagatcccctgagccccagggtgcccagaacttccctgattgacctgctccgctgctccttggcttacctgacctcttgctgtctctgctcgccctcctttctgtgccctactcattggggttccgcactttccacttcttcctttctctttctctcttccctcaaaaactagaaatgtgaatgaggattattataaaagggg

SEQ ID NO: 2986 - DNA, 543 bp, Homo sapiens
aattccgttgctgtcggtgtctggaggccatcctccagaactctcctgacgccaaaatcttctgcctggtgcacaaaatggatctggttcaggaggatcagcgtgacctgatttttaaagagcgagaggaagacctgaggcgtctgtctcgcccgctggagtgtgcttgttttcgaacgtccatctgggatgagacgctctacaaagcctggtccagcatcgtctaccagctgattcccaacgttcagcagctggagatgaacctcaggaattttgcccaaatcattgaggccgatgaagttctgctgttcgaaagagctacattcttggttatttcccactaccagtgcaaagagcagcgcgacgtccaccggtttgagaagatcagcaacatcatcaaacagttcaagctgagctgcagtaaattggccgcttccttccagagcatggaagttaggaattccaacttcgctgctttcatcgacatcttcacctcaaatacgtacgtgatggtggtcatgtcagatccgtcgatcccttctg

SEQ ID NO: 2987 - DNA, 415 bp, Homo sapiens
ggcttactcactatagggcttttttttttttcgggtctattctttaattttactaaattaggaacgcagcttttacagaacaaataaccccaggggacggggcccccccaggatctaacagcttttcagggagctatgttgcaagctcaaaagtaatccactaacgaaccaagtcaaactccagtttttaataaaaaggggctgggggaggttgtcaaaccccttccaatataaatccccaatccgatggccaccaaatgaaaaagcaccagggatggaaggaaaactttcaaaaattctgcaaaaaatatgcccccttttttaatgaccctcgggttcctaatgctaaggggggccgcccccttcgggggttaaaaaaggaactccttggggggaatattttccggccgacttg

SEQ ID NO: 2988 - DNA, 240 bp, Homo sapiens
tttttttttttaaagtcatggaggccatggggttggcttgaaaccacctttggggggtccaatcccttccttttttgcctaaattttatgtatacgggttcttcaaatgcgtggtaggggggggggcatccatatagtccctccaggtttatggagggttcttctactattaggacttttcgcttcaaaacaaaggcttttcaaatcatgaaaatttttaattttcctgctgttaaaaaa

SEQ ID NO: 2989 - DNA, 293 bp, Homo sapiens
ttttttttttaataaatctcctaaggggatggctactttttctatctaaataataatatatagacctattcgatcagagatacaggggactaacaatcacaatcctgtgatcgacatccgaacataagtcactatctatcagaataaacaatgatccaacgaataatagaggagtaaggggacatgtccaaagcatcaggtatcgtcatgatcgaaaaccactgtcaagcaagacacaaacaaacaaaacagctttacacacaagtcagcagtccaagcgttcatgtcccaag

SEQ ID NO: 2990 - DNA, 221 bp, Homo sapiens
tttttttttttcaagggacactttaatggttaacttaagggatcatcaattttgcctcactacctacaaagggaatttcatcttgtccccatgctgagtagggaaacagggacaaagttaatcataataccctacatcaaaaaaaaactaagctaacactgctaactttttttttaacaggcaaaatataaatatatgccctctaaaatgcccaagggttt

SEQ ID NO: 2991 - DNA, 563 bp, Homo sapiens
ttccgttgctgtcgcctccgctctgctcttcgtggaacacgaccgtggtgcccggcccttgggagccttggggccagctggcctgctgctctccagtcaagtagcgaagctcctaccacccagacacccaaacagccgtggccccagaggtcctggccaaatatgggggcctgcctaggttggtggaacagtgctccttatgtaaactgagccctttgtttaaaaaacaattccaaatgtgaaactagaatgagagggaagagataacatggcatgcagcacacacggctgctccagttcatggcctcccaggggtgctggggatgcatccaaagtggttgtctgagacagagttggaaaccctcaccaactggcctcttcaccttccacattatcccgctgccaccggctgccctgtctcactgcagattcaggaccagcttgggctgcgtgcgttctgccttgccagtcagccgaggatgtagttgttgctgccgtcgtcccaccacctcagggaccagagggctaggttggcactgcggccctcaccaggtcctgggctc

SEQ ID NO: 2992 - DNA, 271 bp, Homo sapiens
ctcatatggtcaggtcgcttcaaaaaggaagatgaaatcccagagactgtctcgttggagatgcttgatgctgcaaagaacaagatgcgagtgaagatcagctatctaatgattgccctgacggtggtaggatgcatcttcatggttattgagggcaagaaggctgcccaaagacacgagactttaacaagcttgaacttagaaaagaaagctcgtctgaaagaggaagcagctatgaaggccaaaacagagtagcagaggtatccgtgtt

SEQ ID NO: 2993 - DNA, 342 bp, Homo sapiens
ggcttgtaatacgactcactatagggctttttttttttcgaattaaaaaaattccgttagccttttctccatctcctctaattctggtagcatctttggacccctaacacttggcatctgctacttcagacaaacaaaccctatgtaaatgacaaagaaggggcctcccaaccttctccctgtgttactatttcaaaagcactactcggggcacaggggtacaaatttcttatggccactagcatcttttttcaattttcaaaggaatcatcaaacatctgggtcaattatacttaaattacagaagcccggaattttaggcaacaggcccctcattttacc

SEQ ID NO: 2994 - DNA, 326 bp, Homo sapiens
ttttttttttaaaaagtcatggaggccatggggttggcttgaaaccagctttggggggttcgattccttccttttttgtctaaattttatgtatacgggttcttcaaatgtgtggtagggtggggggcatccatatagtcactccaggtttatggagggttcttctactattaggacttttcgcttcgaagcgaaggcttctcaaatcatgaaaattattaatattactgctgttagaaaaatgaatgagcctaccgatgataggatgtttcatgtggtgtatgcatcggggtagtccgagtaacgtcggggcattccggataggc

SEQ ID NO: 2995 - DNA, 55 bp, Homo sapiens
tttttttttttttttttttgagaaaccggggggggttttttttttaaaattgggg

SEQ ID NO: 2996 - DNA, 558 bp, Homo sapiens
cgccgcgtccccttctcgctcctgcggggccccagctgggaccccttccgcgactggtacccgcatagccgcctcttcgaccaggccttcgggctgccccggctgccggaggagtggtcgcagtggttaggcggcagcagctggccaggctacgtgcgccccctgccccccgccgccatcgagagccccgcagtggccgcgcccgcctacagccgcgcgctcagccggcaactcagcagcggggtcttcggagatccggcacactgcggaccgctggcgcgtgtccctggatgtcaaccacttcgccccggacgagctgacggtcaagaccaaggatggcgtggtggagatcaccggcaagcacgaggagcggcaggacgagcatggctacatctcccggtgcttcacgcggaaatacacgctgccccccggtgtggaccccacccaagtttcctcctccctgtcccctgagggcacactgaccgtggaggcccccatgcccaagctagccacgcagtccaacgagatcaccatcccagtcaccttcgagtcgcgggc

SEQ ID NO: 2997 - DNA, 370 bp, Homo sapiens
ggctagcggataacaatttcacacaggatggattggtcagagtgaattgaatattgtaagtcagccactgggacccgaggatttctgggaccccgcagttgggaggaggaagtagtccagccttccaggtggcgtgagaggcaatgactcgttacctgccgcccatcaccttggaggccttccctggccttgagtagaaaagtcggggatcggggcaagagaggctgagtacggatgggaaactattgtgcacaagtctttccagaggagtttcttaatgagatatttgtatttatttccagaccaataaatttgtaactttgcgaaaaaaaaaaagccctatagtgagtcgtattacaagccgaattcc

SEQ ID NO: 2998 - DNA, 560 bp, Homo sapiens
cagccagcatgaccgagcgccgcgtccccttctcgctcctgcggggccccagctgggaccccttccgcgactggtacccgcatagccgcctcttcgaccaggccttcgggctgccccggctgccggaggagtggtcgcagtggttaggcggcagcagctggccaggctacgtgcgccccctgccccccgccgccatcgagagccccgcagtggccgcgcccgcctacagccgcgcgctcagccggcaactcagcagcggggtctcggagatccggcacactgcggaccgctggcgcgtgtccctggatgtcaaccacttcgccccggacgagctgacggtcaagaccaaggatggcgtggtggagatcaccggcaagcacgaggagcggcaggacgagcatggctacatctcccggtgcttcacgcggaaatacacgctgccccccggtgtggaccccacccaagtttcctcctccctgtcccctgagggcacactgaccgtggaggcccccatgcccaagctagccacgcagtccaacgagatcaccatcccagtcacc

SEQ ID NO: 2999 - DNA, 443 bp, Homo sapiens
ggcttgtaatacgactcactatagggcttttttttttgcaagtgctgtgggaagaaagttagatttacgccgatgaatatgatagtgaaatggattttggcgtaggtttggtctagggtgtagcctgagaataggggaaatcagtgaatgaagcctcctatgatggcaaatacagctcctattgataggacatagtggaagtgagctacaacgtagtacgtgtcgtgtagtacgatgtctagtgatgagtttgctaatacaatgccagtcaggccacctacggtgaaaagaaagatgaatcctagggctcaaagcactgcagcagatcatttcatattgcctccgtggagtgtggcgagtcagctaaatactttgacgccggtggggatagcgatgattatggtagcatcatcctgtgtgaaattgttatccgctaagccgaa

SEQ ID NO: 3000 - DNA, 249 bp, Homo sapiens
ttttttttttcgaaggatttggcaaagatttgtttttttttccatttccagttttttaaagtaaacacagatttgcttaaaataaagctgattttaaaagcccacaaaagttgaacacaaaggagaggattaaattccccaatgcagagtgataaaaaggaaaagatcctgagtaggtgccttcagcaaaaaactgatcatccagggtgatcacctaataatcggagacttaattccttataatgcaaa

SEQ ID NO: 3001 - DNA, 434 bp, Homo sapiens
tttccgtatctgcttcgggcttccacctcatttttttcgctttgcccattctgtttcagccagtcgccaagaatcatgaaagtcgccagtggcagcaccgccaccgccgccgcgggccccagctgcgcgctgaaggccggcaagacagcgagcggtgcgggcgaggtggtgcgctgtctgtctgagcagagcgtggccatctcgcgctgcgccgggggcgccggggcgcgcctgcctgccctgctggacgagcagcaggtaaacgtgctgctctacgacatgaacggctgttactcacgcctcaaggagctggtgcccaccctgccccagaaccgcaaggtgagcaaggtggagattctccagcacgtcatcgactacatcagggaccttcagttggagctgaactcggaatccgaagttggaacccccggggg

SEQ ID NO: 3002 - DNA, 368 bp, Homo sapiens
tttttttttgcttatggagggttcctctactattaggacttttcgcttcgaagcgaaggcttctcaaatcatgaaaattattaatattactgctgttagagaagtgaatgaccctacagatgataggatgtttcatgtggtgtatgcatcggggtagtccgagtaacgtcggggcattccggataggccgaaaaagtgttgtgggaaaaaagttagatttaccccgatgaatatgatagtgaaatggattttggcgtaggtttggtctagggtgtaccctgagaataggggaaatcagtgaatgaagcctcctatgatggcaaatacagctcctattgataggacatagtggaagtgagctacaacgt

SEQ ID NO: 3003 - DNA, 482 bp, Homo sapiens
ccagccttcctgtcccgggccagcgctctgacatgcagaaggtgaccctgggcctgcttgtgttcctggcaggctttcctgtcctggacgccaatgacctagaagataaaaacagtcctttctactatgactggcacagcctccaggttggcgggctcatctgcgctggggttctgtgcgccatgggcatcatcatcgtcatgagtgcaaaatgcaaatgcaagtttggccagaagtccggtcaccatccaggggagactccacctctcatcaccccaggctcagcccaaagctgatgaggacagaccagctgaaattgggtggaggaccgttctctgtccccaggtcctgtctctgcacagaaacttgaactccaggatggaattcttcctcctctgctgggactcctttgcatggcagggcctcatctcacctctcgcaagagggtctctttgttcaatttttttttatctaaaatgatt

SEQ ID NO: 3004 - DNA, 489 bp, Homo sapiens
tggcgagcagtttcccacttgccaaagatcccttttaaccaacactagcccttgtttttaacacacgctccagcccttcatcagcctgggcagtcttaccaaaatgtttaaagtgatctcagaggggcccatggattaacgccctcatcccaaggtccgtcccatgacataacactccacacccgccccagccaacttcatgggtcactttttctggaaaataatgatctgtacagacaggacagaatgaaactcctgcggctctttggcctgaaagttgggaatggttgggggagagaagggcagcagcttattggtggtcttttcaccattggcagaaacagtgagagctgtgtggtgcagaaatccagaaatgaggtgtagggaattttgcctgccttcctgcagacctgagctggctttggaatgaggttaaagtgtcagggacgttgcctgagcccaaatgtgtagtgtggtctgggcaggcag

SEQ ID NO: 3005 - DNA, 25 bp, Homo sapiens
ggaatcaccgctttgccatcttcaa

SEQ ID NO: 3006 - DNA, 25 bp, Homo sapiens
aacttctaccgtttcgccactaagg

SEQ ID NO: 3007 - DNA, 23 bp, Homo sapiens
gaccgtgtactgcgtgtcgtgcg

SEQ ID NO: 3008 - DNA, 23 bp, Homo sapiens
gcgtgctgtgcgtcatgtgccag

SEQ ID NO: 3009 - DNA, 24 bp, Homo sapiens
gccgtcttcaggcaacaactccca

SEQ ID NO: 3010 - DNA, 24 bp, Homo sapiens
tgctggacgaggctgtcatcttgc

SEQ ID NO: 3011 - DNA, 25 bp, Homo sapiens
acagggagaaaactggttgtcctgg

SEQ ID NO: 3012 - DNA, 23 bp, Homo sapiens
aaggcagaacccatccactccaa

SEQ ID NO: 3013 - DNA, 25 bp, Homo sapiens
gctgctggattcgtttggcataact

SEQ ID NO: 3014 - DNA, 25 bp, Homo sapiens
tcaatacggtttgcttaggtcgtcg

SEQ ID NO: 3015 - DNA, 24 bp, Homo sapiens
tctcctctgagttcaaccgctgct

SEQ ID NO: 3016 - DNA, 24 bp, Homo sapiens
tcgtcgccaacttgagtctcctct

SEQ ID NO: 3017 - protein, 406 aa, Homo sapiens
MAENGKNCDQRRVAMNKEHHNGNFTDPSSVNEKKRREREERQNIVLWRQPLITLQYFSLEILVILKEWTSKLWHRQSIVVSFLLLLAVLIATYYVEGVHQQYVQRIEKQFLLYAYWIGLGILSSVGLGTGLHTFLLYLGPHIASVTLAAYECNSVNFPEPPYPDQIICPDEEGTEGTISLWSIISKVRIEACMWGIGTAIGELPPYFMARAARLSGAEPDDEEYQEFEEMLEHAESAQDFASRAKLAVQKLVQKVGFFGILACASIPNPLFDLAGITCGHFLVPFWTFFGATLIGKAIIKMHIQKIFVIITFSKHIVEQMVAFIGAVPGIGPSLQKPFQEYLEAQRQKLHHKSEMGTPQGENWLSWMFEKLVVVMVCYFILSIINSMAQSYAKRIQQRLNSEEKTK

SEQ ID NO: 3018 - DNA, 1221 bp, Homo sapiens
atggcagagaatggaaaaaattgtgaccagagacgtgtagcaatgaacaaggaacatcataatggaaatttcacagacccctcttcagtgaatgaaaagaagaggagggagcgggaagaaaggcagaatattgtcctgtggagacagccgctcattaccttgcagtatttttctctggaaatccttgtaatcttgaaggaatggacctcaaaattatggcatcgtcaaagcattgtggtgtcttttttactgctgcttgctgtgcttatagctacgtattatgttgaaggagtgcatcaacagtatgtgcaacgtatagagaaacagtttcttttgtatgcctactggataggcttaggaattttgtcttctgttgggcttggaacagggctgcacacctttctgctttatctgggtccacatatagcctcagttacattagctgcttatgaatgcaattcagttaattttcccgaaccaccctatcctgatcagattatttgtccagatgaagagggcactgaaggaaccatttctttgtggagtatcatctcaaaagttaggattgaagcctgcatgtggggtatcggtacagcaatcggagagctgcctccatatttcatggccagagcagctcgcctctcaggtgctgaaccagatgatgaagagtatcaggaatttgaagagatgctggaacatgcagagtctgcacaagactttgcctcccgggccaaactggcagttcaaaaactagtacagaaagttggattttttggaattttggcctgtgcttcaattccaaatcctttatttgatctggctggaataacgtgtggacactttctggtacctttttggaccttctttggtgcaaccctaattggaaaagcaataataaaaatgcatatccagaaaatttttgttataataacattcagcaagcacatagtggagcaaatggtggctttcattggtgctgtccccggcataggtccatctctgcagaagccatttcaggagtacctggaggctcaacggcagaagcttcaccacaaaagcgaaatgggcacaccacagggagaaaactggttgtcctggatgtttgaaaagttggtcgttgtcatggtgtgttacttcatcctatctatcattaactccatggcacaaagttatgccaaacgaatccagcagcggttgaactcagaggagaaaactaaataa

SEQ ID NO: 3019 - DNA, 338 bp, Homo sapiens
gtgctgtccccggcataggtccatctctgcagaagccatttcaggagtacctggaggctcaacggcagaagcttcaccacaaaagcgaaatgggcacaccacagggagaaaactgcttgtcctggatgtttgaaaagtcggtcgatgtcatggtgtgttacttcatcctatctatcattaactccatggcacaaagttatgccaaacgaatccagcagcggttgaactcagaggagaaaactaaataagtagagaaagttttaaactgcagaaattggagtggatgggttctgccttatattgggaggactccaagccgggaaggaaaattccctttt

SEQ ID NO: 3020 - DNA, 186 bp, Homo sapiens
tgtgttaatgttttctagcatgtactctggtttcaacagacacaaatttatatgttaacccagttttcttgccgttctgtaagtgttttattcttagtgtgatttttttccattgggatgtttttgattgaacttgttcattttgttttgcttgggaggaaaataaacaattttacttttttcctt

SEQ ID NO: 3021 - DNA, 118 bp, Homo sapiens
acagggagaaaactggttgtcctggatgtttgaaaagttggtcgttgtcatggtgtgttacttcatcctatctatcattaactccatggcacaaagttatgccaaacgaatccagcag

SEQ ID NO: 3022 - DNA, 527 bp, Homo sapiens
gcccagctgcttcactccgtgtcccccacccctgaggatcaggtgagtgctgcacctctgttggctcgtgccttgcactggggtgccaagggctggaggccctgccgctggccttgtcctccttgggcctcacgcccccttcgggggtggccggttctccccatcacctctctggggcagtcacaccacctgttaagcatcaagctaccacagaggctccggccacctgggctccaccagcccagcccccctgggctccgtgtgcgctgggcctcatccccatctatgggaggaaactgaagctcaggaggctgtgtggcttgcggggtctctgggttctgggccccactgttccccagtgaagcccttgtgggaaggttccgggagcaggtggtgtcctcagagcagcctcgcctgctgaccccactgggagaggcgccgtgcctcgggcccctggtgggagctccgctggctcctgtctgaacctcctcgcagggccaaaggctggcttggcctgtgtttcccct

SEQ ID NO: 3023 - DNA, 594 bp, Homo sapiens
gtgcgcgcctttctggagcgcggccacaccgaactggacacggccttcatgtacagcgacggccagtccgagaccatcctgggcggcctggggctcgggctgggcggtggcgactgcagagtgaaaattgccaccaaggccaacccttgggatggaaaatcactaaagcctgacagtgtccggtcccagctggagacgtcattgaagaggctgcagtgtccccaagtggacctcttctacctacacgcacctgaccacggcaccccggtggaagagacgctgcatgcctgccagcggctgcaccaggagggcaagttcgtggagcttggcctctccaactatgctagctgggaagtggccgagatctgtaccctctgcaagagcaatggctggatcctgcccactgtgtaccagggcatgtacaacgccaccacccggcaggtggaaacggagctcttcccctgcctcaggcactttggactgaggttctatgcctacaaccctctggctgggggcctgctgactggcaagtacaagtatgaggacaaggacgggaaacagcctgtgggccgcttctttgggaatagctgggct

SEQ ID NO: 3024 - DNA, 532 bp, Homo sapiens
ccggaggtcgcacgcgggttccagttgtgattgctggagttgtgtattgccaggaggctctccgagattggggtcgggtcactgcctcatccaccggagcgatggcgtttctccgaagcatgtggggcgtgctgactgccctgggaaggtctggagcagagctgtgcaccggctgtggaagtcgactgcgctcccccttcagttttgtgtatttaccgaggtggttttcatctgtcttggcaagttgtccaaagaaacctgtaagttcttaccttcgattttctaaagaacaactacccatatttaaagctcagaacccagatgcaaaaactacagaactaattagaagaattgcccagcgttggagggaacttcctgattcaaagaaaaaaatatatcaagatgcttatagggcggagtggcaggtatataaagaagagataagcagatttaaagaacagctaactccaagtcagattatgtctttggaaaaagaaatcatggacaaacatttaaaaaggaaagctatgac

SEQ ID NO: 3025 - DNA, 506 bp, Homo sapiens
gctggtcccttctcccgtctgctgtccgcccgcccgggactcaggctcctggctttggccggagcggggtctctagccgctgggtttctgctccgaccggaacctgtacgagctgccagtgaacgacggaggctgtatcccccgagcgctgagtacccagacctccgaaagcacaacaactgcatggccagtcacctgaccccagcagtctatgcacggctctgcgacaagaccacacccactggttggacgctagatcagtgtatccagactggcgtggacaaccctggccaccccttcatcaagactgtgggcatggtggctggagatgaggagacctatgaggtatttgctgacctgtttgaccctgtgatccaagagcgacacaatggatatgacccccggacaatgaagcacaccacggatctagatgccagtaaaatccgttctggctactttgatgagagggatgtattgtcctctagagtcagaactggccgaagcat

SEQ ID NO: 3026 - DNA, 365 bp, Homo sapiens
ggccctgccttcctcagtagggagtcaacatgcccaagtcatttgcacctttacctctcacatggatgctcccaagggttagggactgcattgagcaggcccacctgcttcccagaacctcctcactagggctgagcaccttctctgagtagagtcttcatccttagcaccacagacttctgaggtcctgtgccctttacttgctggtgaggtgtcataggtagaaaagggctggcccttcagatctgggggtgtggtgagtggcaagtaagggcagaattttaggagaaccagagtcacccgctggctctactgagattgttacacccagaatccttttgtgtttttttgtggttttttttttt

SEQ ID NO: 3027 - DNA, 632 bp, Homo sapiens
cctccccttattcttccttgaagtgcccgagcatgtagggcaagaaggaaggctgaagcgctgtccctaggaggaatttctccttcaggggagcctcagttttgcccatttatctaattgaatcagttttttacccaatcccccgattttgtaggataatctcccttatctaaagtcaactgattatggactttaatcacatctacaaaacacttccatggcgacagctagatgagtgtttgaataactgggactgtagcccgtccaagttgacacataaaactgaccatcgggccgggggcggtggctcacgcctgtaatcccaacactttgggagcccgaggcgggcggatcacaaggtcaggagttcgagaccagcctggccaacacggtgaaaccccgactctactaaaaatacaaaaaattagcccgggtgtggtggcacacacctgtagtcccagctactcgggaggctgaggcaggagaatcgtttgaacctgggaggcagaggttgcagtgagccaagatcacactattgcactccagcctgggcgacagggcaagactctgtctcaaaaaaataaaaaactgaccatctagtccttgtcatctgggcaccctcaaaaaaagcc

SEQ ID NO: 3028 - DNA, 486 bp, Homo sapiens
cagcctgcctttccataaagtcacctaggtgaggataggcgcgggagcctcggcatgacaccatggagatcggggccctcttcccagtgggttcactccttttcacacctgctgggtccctcctcacccagcaggcctggtccacctctcattgcaagccccaagcactgagccagcaggtgccagggagccacccgccccccatagcttctgcacacctcagactcaccccatcaccttggcagcaaagcactggctctgccgtctgacccctgatccaggcagccccctccgcagagaaaagggttggggagaagcctctgcagtcctggaagatgtggggtgctgggtgagaggcatcagcccccacaagtatgtttttgtgtcttaagatagcagtttactttgaaaaagtgaaaaaggcttccgggctgtcctctgcccagtgagatggaggacgctagagaaagtgctgagtgtcccgag

SEQ ID NO: 3029 - DNA, 579 bp, Homo sapiens
ttccgttgctgtcggctatcccacaccctgcacaccttagataaaaagaacattttaaaagcagagttcactttcactccagtctcccctcttttgccctcactgaagccaaaccacagaagactttgaggaatgagagacaaatgaggtagagctcacctgtgctcaccagctccgtcagggtggtcagccgacccctttccctgggaaccccacttctctctgtggctggcttggttgtcgggggtgagatgccatattgattacagggcagcaaagaaccagtaccaggaatttacttgaccattccccttatttttcatctagaggaatctcggattcagccctttcattgctaagacaccttttcactgaggttcttaccagctcagccaaatctccactctgctatagcagaagcaataatgtttgctttaaaaagatttcttgacctatgccttttcttagaaaagttgatagattagttagaacttcagatcatcagatcagtctcaaatgggtttcttggaatttatatttgacaatatttatactataccaaactcatttgcagttctt

SEQ ID NO: 3030 - DNA, 342 bp, Homo sapiens
acatttgttaattttctttttcctctcatttttctattgaatgatttgtccttttatctcatggatttgttaggagttctcttgtattttctgtattttatgtctgttgccaatgttttctcctacttagccatttggctttaattttacatggtgtctgcttaaataaatgttttatatttgtatacaatcaaattgattaattttcatgacttatttcacgatataaagcaaattattttctaagacatttacagtgtttgttttcctatgtttacatgtgctcatttcacgtcatgtattttcctctacgacatgtttctgtgtgagtagttaacatgt

SEQ ID NO: 3031 - DNA, 288 bp, Homo sapiens
ccgttgctgtcggacccttccagcatgccagaggaaagttcccccaggcggaccgcgcagagcattccctaccaggacctccctcacctggtcaatgcagacggacagtacctcttctgcaggtactggaaacccacaggcacacccaaggccctcatctttgtgtcccatggagccggagagcacagtggccgctatgaagagctggctcggatgctgatggggctggacctgctggtgttcgcccacgaccatgttggccacggacagagcgaaggggagaggatg

SEQ ID NO: 3032 - DNA, 363 bp, Homo sapiens
ccgttgctgtcgcttgacagagtctgccccctcccccactgcaccccaagagagagagccccagccagcggaacagtttctattaccccctccctgcccccagacccatgtgatttctgctttcttctttagcaagatattctggtttctagataaggaagagtctctaatgagcccccgagccccagtctcttcagactcatggattggtctgaggggtctgaacgtctcctagccaatcagaactggctgtggaccaccctagcacggccacctctcagggccactggcaggccttcctgagttagatttgtagttgcatatttagctttgcacatttgaaataaaccacggttgcagccc

SEQ ID NO: 3033 - DNA, 368 bp, Homo sapiens
ggcacgagggcgtcttggcgattcggcccgacgagctccgctttcgctacagcatggtggcctactggagacaggctggactcagctacatccgatactcccagatctgtgcaaaagcagtgagagatgcactgaagacagaattcaaagcaaatgctgagaagacttctggcagcaacgtaaaaattgtgaaagtaaagaaggaataatctaccctgactaaagcttgaaatgctacatttccaaggtgaagatgtgtgggcacatgttatggcagattgaaaaggatctcattccatgggaaaaaaaaaaatcctgtcttgttcataaattgacaatgtcaataaattgaaatatggttcactgtt

SEQ ID NO: 3034 - DNA, 202 bp, Homo sapiens
tgccaaatcaagagagatatcaacagaaggagagccatgcgtactttctaaaaactgatggtgaaaagctcttaccgaagcaaccaaattcagcagacacctcttcagcttgagttcttcaccatcttttgcaactgaaatatgatggatatgcttaagtacaactgatggcatgaaaaaaatcaaatttttgatttattat

SEQ ID NO: 3035 - DNA, 534 bp, Homo sapiens
ccgaccgctggtaccagtacttcaccaagaccgtgttcctgtcgggtctgccgccgcccccagcggagcccgagcccgagcccgaacccgaacctgaacctgcgctggacctcgcggcgctgcgtgcggtcgcctgcgactgcctgctgcaggagcacttctacctgcggcgcaggcggcgcgtgcaccgttacgaggagagcgaggtcatatctttgcccttcctggatcagctggtgtcaaccctcgtgggcctcctcagcccacacaacccggccctggccgctgccgccctcgattatagatgcccagttcatttttactgggtgcgtggtgaagaaattattcctcgtggtcatcgaagaggtcgaattgatgacttgcgataccagatagatgataaaccaaacaaccagattcgaatatccaagcaactcgcagagtttgtgccattggattattctgttcctatagaaatccccactataaaatgtaaaccagacaaacttccattattcaaacggcagtatgaaa

SEQ ID NO: 3036 - DNA, 546 bp, Homo sapiens
tcctctgtggcctctgtcctggggcgctgggtcgtctggcggggacccaggagttccaggtgcccgacgaggtgctggggctcatctacgcgcagacggtggtctgggtggggagttttttctgccctttactgcccctgcttaacacggtcaagttcctgctgcttttctacctgaagaagcttaccctcttctccacctgctccccggctgcccgcaccttccgggcctccgcggcgaatttctttttccccttggtccttctcctgggtctggccatctccagcgttcccctgctttacagcatcttcctgatcccgccttctaagctttgtggtccattccgggggcagtcgtccatctgggcccagatccctgagtctatttccagcctccctgagaccacccagaatttcctcttcttcctggggacccaggcttttgctgtgccccttctgctgatctccagcatcctgatggcgtacactgtggctctggctaactcctacggacgcctcatctctgagctcaaacgtcagagagaga

SEQ ID NO: 3037 - DNA, 300 bp, Homo sapiens
tgctttttaaaaggggcaaatccccggccccaaaaccccttgggggccggggcccttttccttggggttaaatttcgggggggggggggtatttccccaaaaattgggggaatcctagggtttttgggttttttcccaaaaatttttttttttttgggaagaaaaaaacacccccttgggggggcccttgggaaacccccttttttccaatttttaaaaaaaatttttcccccaaaggggatttaaaaaagacttttgggaaaaggcaccccttttttccccaaaactttttttttttgg

SEQ ID NO: 3038 - DNA, 536 bp, Homo sapiens
catcctggtccctcgtccccgccagccgcgccagcgtccaagaggagcctaggggaacccgcagctggagaaggctccgcgaagcgatcgcaacccgagccaggggttgcggacgaggatcagacggcctgaaactccggactgtgggccacctagtccggcaggatcttccgccagcgcctccaccttcagatgtacctccagcctttcactcctcggtcctccggagcccacaacctggacacagctcctcaagacaggtagcatggaccttaaggcgacaagagaggggccccaggagtggcaggagaggatccccgaccaccctagggaaacttcgtgcgataattgctgcttatgcccgtgttgcgtgaagacacggaacttcaccttttctgggaccttctttgggggagaatggtggacagtgggattctggaaacttgtttgggacccccaagggttaaagccacccagcattcacgaagagcacctgaagtatggaagctgagaagagttattggaatcacccccac

SEQ ID NO: 3039 - DNA, 467 bp, Homo sapiens; identical to SEQ ID NO: 357

SEQ ID NO: 3040 - DNA, 242 bp, Homo sapiens
ccgttgctgtcgcttcgtgtaagcaagtacataaggaccctcctttggtgaaatcggggttcgaatgaatatctcaaggcaggagatgcatctattttaagatgctttggagcagacagctttagccgttcccaatccttagcaatgccttagctgggacgcatagctaatactttagagaggatgacagatccataaagagagtaaagataagagaaaatgtctaaagcatctggaaaggt

SEQ ID NO: 3041 - DNA, 467 bp, Homo sapiens; identical to SEQ ID NO: 359

SEQ ID NO: 3042 - DNA, 496 bp, Homo sapiens
tgatgaaggccctcctggccgggcccctccggcccgggcgcgtcgctggaggaacccgattccctttcccgagacgtttgacggagataccgaccgactcccggagttcatcgtgcagacgtgctcctacatgttcgtggacgagaacacgttctccaacgacgccctgaagacctacgctaccactgccatcgccatccaccgcatctcaccaacagactgtggctcctagtgatgtggactcacctcggaggtatccgagctggacacagcccctggacagtgatccagacagctggccgtcccccaaggagcctgtcaccttcagcgagacccatttcctccccatccccagagacctcttgtgttcctgccacatagctgccagggcttaagtgtgcctggcaaccaaatcgaatctctcattttctcctgtggaccagttagttttgcctagaatcctgttttcttctgaatttgcagctgtctctctgat

SEQ ID NO: 3043 - DNA, 372 bp, Homo sapiens
tcgagtctttaatataaccccaaatgaaagaaccaaggggaggggtgggatggcacttttttttgttggtcttgttttgttttgttttttggttggttggttattttttaagattagccattctctgctgctatttccctacataatgtcaatttttaaccataattttgacatgattgagatgtacttgaggcttttttgttttaattgagaaaagactttgcaatttttttttaggatgagcctctcctagacttgacctagaatattacatattcctccagtaatactgaagagcaaaagagaggcaggattggggtcacagccgcttcttcagcatggaccaagtgggccttggggattgcagcgttc

SEQ ID NO: 3044 - DNA, 465 bp, Homo sapiens
tgtcgggcggcgctccgcaggggctcggctgttttccgcgcggcaggcgcggccatggcgcagctgggaaagctgctcaaggagcagaagtacgaccggcagctgaggttgtggggtgatcatgggcaagaggctttagaatctgctcatgtttgcctaataaatgcaacagccacaggaactgaaattcttaaaaacttggtactaccaggtattggttcgtttacaattattgatggaaatcaggtcagcggagaagatgctggaaacaatttcttccttcaaagaagcagtatcggcaagaaccgagctgaagctgccatggaattcttacaagaattaaatagcgatgtctctggaagttttgtggaagagagtccacaaaaccttctagacaatgatccctcatttttctgtaggtttactgttgtagttgcaactcaacttcctgaaagcacttcacta

SEQ ID NO: 3045 - DNA, 426 bp, Homo sapiens
ttgctgtcggcttttcctgattattatgggaaagcgatcatctaatgaagtgttgaatgtgatacaagggaacacaacagtagatgagttaatgatgagactcatggctgcaatggagatcttcacagcccaacaacaggaagatataaaggacgaggatgaacgtgaagccagagaaaatgtgaagagagagcaagatgaggcctatcgcctttcacttgaggctgacagagcaaagagggaagctcacgagagagagatggcagaacagtttcgtttggagcagattcgcaaagaacaagaagaggaacgtgaggccatccggctgtccttagagcaagccctgcctcctgagccaaaggaagaaaatgctgagcctgtgagcaaactgcggatccggacccccagtggcgagttcttggagcg

SEQ ID NO: 3046 - DNA, 488 bp, Homo sapiens
cgaattcggcacgaggcaatggcttcaggttacttcgcggagctggaacgctggccgcgcaggccctgagggctcgcggccccagtggcgcggccgcgatgcgctccatggcatctggaggtggtgttcccactgatgaagagcaggcgactgggttggagagggagatcatgctggctgcaaagaagggactggacccatacaatgtactggccccaaagggagcttcaggcaccagggaagaccctaatttagtcccctccatctccaacaagagaatagtaggctgcatctgtgaagaggacaataccagcgtcgtctggttttggctgcacaaaggcgaggcccagcgatgcccccgctgtggagcccattacaagctggtgccccagcagctggcacactgagcacctgcactaaattactcaaaatgtgctgtaaagtttcttctttccagtaaagactagccattgcattggctccttctc

SEQ ID NO: 3047 - DNA, 584 bp, Homo sapiens
tgctgtcgcctcccagtgtctctgctgctcaaaatttctcttccagagacagaacctcgcctgtttcctcacaaacccacactgtggcagccttgttaatgcagatggccatggtgaagtgtggacagattggaataatatgtccaagtttttccagtatggatggcgatgcaccactaatgagaatacctattcaaaccgtaccctgatgggcaactggaaccaggaaagatatgacctgaggaatatcgtgcagcccaaacccttgccttcccagtttggacactactttgaaacaacatatgatacaagctacaacaacaaaatgccactttcaacacatagatttaagcgagagcctcactggttcccaggacatcaacctgaactggatcctccccgatacaaatgcacagaaaagtcaacttacatgaatagctattcaaagccttaaattgggcatcactcaggatgtgtataagatcttaatattgactagtttcacatccaggtttctaagaaatgataagatacttcacttttccagagtgaaatgtaggagggagcacattctaagtacagct

SEQ ID NO: 3048 - DNA, 107 bp, Homo sapiens
tttaaaattccaatatagaatctgacttgcaaactctagctgcagcatgtggagcttctagatgtttactaccttgaatggttgtcagtgtcactgaaccacagggg

SEQ ID NO: 3049 - DNA, 472 bp, Homo sapiens
ggagctgccctcgcgacatgggtcacccgccgctgctgccgctgctgctgctgctccacacctgcgtcccagcctcttggggcctgcggtgcatgcagtgtaagaccaacggggattgccgtgtggaagagtgcgccctgggacaggacctctgcaggaccacgatcgtgcgcttgtgggaagaaggagaagagctggagctggtggagaaaagctgtacccactcagagaagaccaacaggaccctgagctatcggactggcttgaagatcaccagccttaccgaggttgtgtgtgggttagacttgtgcaaccagggcaactctggccgggctgtcacgtattcccgaagccgttaccttgaatgcatttcctgtggctcatcagacatgagctgtgagaggggccggcaccagagcctgcagtgccgcagccctgaagaacagtgcctggatgtggtgacccactggat

SEQ ID NO: 3050 - DNA, 520 bp, Homo sapiens
gaggcgctgattttggaaccttccctgtatactgtcaaagccatcctgattctggacaatgatggagatcgactttttgccaagtactatgacgacacctaccccagtgtcaaggagcaaaaggcctttgagaagaacattttcaacaagacccatcggactgacagtgaaattgccctcttggaaggcctgacagtggtatacaaaagcagtatagatctctatttctatgtgattggcagctcctatgaaaatgagctgatgcttatggctgttctgaactgtctcttcgactcattgagccagatgctgaggaaaaatgtagaaaagcgagcactgctggagaacatggaggggctgttcttggctgtggatgaaattgtagatggaggggtgatcctagagagtgatccccagcaggtggtacaccgggtggcattaaggggtgaagatgtcccccttacggagcagaccgtgtctcaggtgctgcagtcagccaaagaacagatcaagtggtcac

SEQ ID NO: 3051 - DNA, 587 bp, Homo sapiens
ggtcgttgtctttctaggtctcagccggtcgtcgcgacgttcgcccgctcgctctgaggctcctgaagccgaaaccagctagactttcctccttcccgcctgcctgtagcggcgttgttgccactccgccaccatgttcgaggcgcgcctggtccagggctccatcctcaagaaggtgttggaggcactcaaggacctcatcaacgaggcctgctgggatattagctccagcggtgtaaacctgcagagcatggactcgtcccacgtctctttggtgcagctcaccctgcggtctgagggcttcgacacctaccgctgcgaccgcaacctggccatgggcgtgaacctcaccagtatgtccaaaatactaaaatgcgccggcaatgaagatatcattacactaagggccgaagataacgcggataccttggcgctagtatttgaagcaccaaaccaggagaaagtttcagactatgaaatgaagttgatggatttagatgttgaacaacttggaattccagaacaggagtacagctgtgtagtaaagatgccttctggtgaatttgcacgtatatgccgagatctca

SEQ ID NO: 3052 - DNA, 523 bp, Homo sapiens
ttggcagtatgagagttgtaatggcccgactgttgagtgagggggagcaggggatcccaacggcttgcgctgcctttgcgcagcagccggcgggcggccacgtcgcggcctggctggggtaggagagggcggtccccagtgcagttgggtgaactaccgttgcacactggagtttctggtgtctttgcttggaactgacctagctcgtggcagggggaactcggctagcggccccacagcccctgctgactcaaaacaactgagttgtaagacgttcatcgccgtgttatccttgagtaaagaatgaactctggaagcccagccagggacaatgcaccttcacagagattctgcactaatctgagtgaaggtctaaggtttggaatctccccctcatggagagaagctttgtatggctgtcatgcttagacagtgattcctgcaacttgaccttcaggctgggagaggtggagagccatgcctgttctccttccttgctatggaatttgctgacacaatattc

SEQ ID NO: 3053 - DNA, 672 bp, Homo sapiens
gccgttccggctgcaccgcgctcgctccgagtttcaggctcgtgctaagctagcgccgtcgtcgtctcccttcagtcgccatcatgattatctaccgggacctcatcagccacgatgagatgttctccgacatctacaagatccgggagatcgcggacgggttgtgcctggaggtggaggggaagatggtcagtaggacagaaggtaacattgatgactcgctcattggtggaaatgcctccgctgaaggccccgagggcgaaggtaccgaaagcacagtaatcactggtgtcgatattgtcatgaaccatcacctgcaggaaacaagtttcacaaaagaagcctacaagaagtacatcaaagattacatgaaatcaatcaaagggaaacttgaagaacagagaccagaaagagtaaaaccttttatgacaggggctgcagaacaaatcaagcacatccttgctaatttcaaaaactaccagttctttattggtgaaaacatgaatccagatggcatggttgctctattggactaccgtgaggatggtgtgaccccatatatgattttctttaaggatggtttagaaatggaaaaatgttaacaaatgtggcaattattttggatctatcacctgtcatcataactggcttctgcttgtcatccacacaaca

SEQ ID NO: 3054 - DNA, 543 bp, Homo sapiens
gccatcaaaagttaagacagggaagcctgaagaagccagccttgattctagagagaagaaaaccaacttggctcccaaaagcacagcaatgaatgagagctcttctggaaaagctgggaagcctccgtgtggagccacaaagaggtccatcgctgacagtgaagaatcggaggcctacaagtccctctttaccactcacagctccgccaagcgctccaaggaggagtctgcccactgggtcacccacacgtcctactgcttctgaagcccgcactgccaccgctcctgccccagaaggttgtttagtttccacgtaggcaggtcgctttgtgcctctgagtgcgctgctgtgtgttctctctatagttctgtgtcataaagctgtcctggccagccttcaagctggtgtggccactcttgatgtgaggcgtgtcggttccaggggggacatgggaggggctgcacagtggcccgaggtcatgcttgcttccacctgcaggtgcatttggtcctttccatggccaggaagccctgtgggctgca

SEQ ID NO: 3055 - DNA, 466 bp, Homo sapiens
cgcatgagccgcagctcaggccgagtgtactacttcaaccacatcactaacgccagccagtgggagcggcccagcggcaacagcagcagtggtggcaaaaacgggcagggggagcctgccagggtccgctgctcgcacctgctggtgaagcacagccagtcacggcggccctcgtcctggcggcaggagaagatcacccggaccaaggaggaggccctggagctgatcaacggctacatccagaagatcaagtcgggagaggaggactttgagtctctggcctcacagttcagcgactgcagctcagccaaggccaggggagacctgggtgccttcagcagaggtcagatgcagaagccatttgaagacgcctcgtttgcgctgcggacgggggagatgagcgggcccgtgttcacggattccggcatccacatcatcctccgcactgagtgagggtggggagccc

SEQ ID NO: 3056 - DNA, 492 bp, Homo sapiens
tccttcttttccagccccggtaccggaccctgcagccgcagagatgttgatgcctaagaagaaccggattgccatttatgaactcctttttaaggagggagtcatggtggccaagaaggatgtccacatgcctaagcacccggagctggcagacaagaatgtgcccaaccttcatgtcatgaaggccatgcagtctctcaagtcccgaggctacgtgaaggaacagtttgcctggagacatttctactggtaccttaccaatgagggtatccagtatctccgtgattaccttcatctgcccccggagattgtgcctgccaccctacgccgtagccgtccagagactggcaggcctcggcctaaaggtctggagggtgagcgacctgcgagactcacaagaggggaagctgacagagatacctacagacggagtgctgtgccacctggtgccgacaagaaagccgaggctggggctgggtcagcaaccgaatt

SEQ ID NO: 3057 - DNA, 96 bp, Homo sapiens
tttgcatccagccctgagacatgtaggaaacacctttcagacccaggctctgaagattcccagaagccacaaggattgaagggaaaaggtgatcct

SEQ ID NO: 3058 - DNA, 580 bp, Homo sapiens
tcaccatgaagttcaatcccttcgttacctcggaccgcagtaaaaaccgcaaacgtcacttcaatgccccctcacacgtgcgcaggaagatcatgtcatccccgctctccaaggagctgcggcagaagtacaatgtccgctccatgcccatccgcaaggacgacgaggtccaggtagttcgaggacactacaaaggtcagcaaattggcaaggtagtccaggtgtacagaaagaaatatgtcatctacatcgaagcgggtgcagcgtgagaaggccaacggcacaactgtccacgtgggcattcacccaagcaaggtggttatcaccaggctaaaactggacaaggatcggaaaaaaattcttgaacgcaaagccaagtctcgacaagttggaaaagagaaaggcaaatataaagaagaacttattgagaaaatgcaggaataaatagaacctgttgtgcaaccacggtttaaccggagattttgaggctagggtgtgtttctttcgaacttttcggaatgtctggaacatttcatttcctgttttgttacctgtgcctctgtaaatctacttttgcaat

SEQ ID NO: 3059 - DNA, 572 bp, Homo sapiens
gttattggaagcggttgcaatctggattcagcccgattccgttacctaatgggggaaaggctgggagttcacccattaagctgtcatgggtgggtccttggggaacatggagattccagtgtgcctgtatggagtggaatgaatgttgctggtgtctctctgaagactctgcacccagatttagggactgataaagataaggaacagtggaaagaggttcacaagcaggtggttgagagtgcttatgaggtgatcaaactcaaaggctacacatcctgggctattggactctctgtagcagatttggcagagagtataatgaagaatcttaggcgggtgcacccagtttccaccatgattaagggtctttacggaataaaggatgatgtcttccttagtgttccttgcattttgggacagaatggaatctcagaccttgtgaaggtgactctgacttctgaggaagaggcccgtttgaagaagagtgcagatacactttgggggatccaaaaggagctgcaattttaaagtcttctgatgtcatatcatttcactgtctaggctacaacagg

SEQ ID NO: 3060 - DNA, 494 bp, Homo sapiens
ccccctgcctgagcgtccccgggaaaaagaagaccagtggttcgagagacaggtgaggtggtcgactgccacctcagtgacatgctgcagcagctgcacagtgtcaatgcctccaagccctcggagcgtgggctggtcaggcaagaggaggctgaggatcctgcctgcatccccatcttctgggtcagcaagtgggtggactattcaggacaagtacggccttgggtatcagctctgtgataacagcgtgggggtgctcttcaatgactcaacacgcctcatcctctacaatgatggtgacagcctgcagtacatagagcgtgacggcactgagtcctacctcaccgtgagttcccatcccaactccttgatgaagaagatcaccctccttaaatatttccgcaattacatgagcgagcacttgctgaaggcaggtgccaacatcacgccgcgcgaaggtgatgagctcgcccggctgccctacctacggacct

SEQ ID NO: 3061 - DNA, 448 bp, Homo sapiens; identical to SEQ ID NO: 369

SEQ ID NO: 3062 - DNA, 248 bp, Homo sapiens
tcggtggggccggcggtcagtctgcggcagcggcagcaagacggtgcagtgaaggagagtgggcgtctggcggggtccgcagtttcagcagagccgctgcagccatggccccaatcaaggtgggagatgccatcccagcagtggaggtgtttgaaggggagccagggaacaaggtgaacctggcagagctgttcaagggcaagaagggtgtgctgtttggagttcctggggccttcacccctggatgt

SEQ ID NO: 3063 - DNA, 494 bp, Homo sapiens
gtcgttttacatcatgtcttcagctatttgtattttaaccagtaatttcaatggtctgaaacatgattctgagcttcacataatatcttaactgtggaactcaaaagtttgatcactgaatttggcagttattattacctaggtacccccgctgttacacaggtgtttagatacgtgttcctgaatgaagctgcttttgaattttgttatgttgaaatgcaagaaataacaatgatggcagcaattaaggtcacagaaatcattaggtaaaggaaaaccaatgaggagttctgcagttttcttttaataagtaaagtgagacttgggtggtgggaagaaggaaggtgggaagaaggaattagacactctgcctgccactctgcgtgtgtgtgctctcgcgcacgtgctgtctatatggaagccactcccttttctttcctttgaaactggtaaggttaaaataggggagaaatcctacatgttggaatgatagc

SEQ ID NO: 3064 - DNA, 341 bp, Homo sapiens
cgttgctgtcggtgttgcccaggctggtctcaaactgcattcaagcagtcctcctgcatcggcctctgaaagtgctgggattataggcatgaaccaccacacctgacttcccccatactttcttattaattaccatactgtatatttttattttgtttaaacatcttttcttcccacttttatcgtttttacttgagtgcttaattcatcttcctaaattaatttaaaaactcatctttaagactgtgaattttcttccgaatatacctttggccacagttcaaagactttgatgtgttactcttttggcattggttctaaaatgtcaatcattctttttt

SEQ ID NO: 3065 - DNA, 557 bp, Homo sapiens
ccaaccagcagcagccatcatggaggcgcctggggctgtggagatccggagtcgccacagctcctaccccgcggggacggaggacgacgaagggatgggggaggagcccagcccctttcggggccgctcgcgcctcggcgccccccaacctctgggcagcacagcgctatggccgcgagctccggaggatgagtgacgagtttgtggactcctttaagaagggacttcctcgcccgaagagcgcgggcacagcaacgcagatgcggcaaagctccagctggacgcgagtcttccagtcctggtgggatcggaacttgggcaggggaagctccgccccctcccagtgaccttcgctccacatcccgaaactccacccgttcccactgccctgggcagccatcttgaatatgggcggaagtacttccctcaggcctatgcaaaaagaggatccgtgctgtctcctttggagggagggctgacccagattcccttccgggtgcgtgtgaagccacggaaggcttggtcccatcggaagttttgggttttccgcccacagc

SEQ ID NO: 3066 - DNA, 555 bp, Homo sapiens
ttgggggcagccaggcacagccggctcacggaggggccaccacactgggccagggtctcactgtacaagtgggcaggggccgcgcttgggcgcttgggagggtgtcggcctgcagccaagttcactgtcacgggggaaggagccaccagccagtcctcagatttcagagactgcggaggggcttggcagacggtcttagccaagggctgtggtggcattggccgagggtcttcgggtgcttcccagcacaagctgcccttgctgtcctgtgcagtgaagggagaggccctgggtgggggacactcagagtgggagcacatcccagcagtgcccatgtagcaggagcacagtggatggccttgtgtccctcgggcatgacaggcagaaacgagggctgctccaggagaagggcctcctgctggccagagcaaggaaggctgagcagcttggttctcccctctggcccctggagagaagggggagcattcctagacccctgggtgcttgtctgcacagagctctggtctgtgccaccttggccaggctggctgtggg

SEQ ID NO: 3067 - DNA, 602 bp, Homo sapiens
tgtaatggcccgactgttgagtgagggggagcaggggatcccaacggcttgcgctgcctttgcgcagcagccggcgggcggccacgtcgcggcctggctggggagttgtaagacgttcatcgccgtgttatccttgagtaaagaagcgggcttttgccatgttgtccaggctggtctctactcctgggctcaagcagtcctcctgcctcagtctcccaaagtgctggaattacagggaatgaactctggaagcccagccagggacaatgcaccttcacagagattctgcactaatctgagtgaaggtctaaggtttggaatctccccctcatggagagaagctttgtatggctgtcatgcttagacagtgattcctgcaacttgaccttcaggctgggagaggtggagagccatgcctgttctccttccttgctatggaatttgctgacacaatatcttccgcctggtgctgggcatatcctaagaacttacaactttcctgtattatcctgtgtgagcagctgtcaccttattgggggaaaaatgcctgaaaattagggggcacttcaaggcctctagaactatagtgagtcgtattacgt

SEQ ID NO: 3068 - DNA, 565 bp, Homo sapiens
ccagcgtggcctctcccagttctggtggagaagatgaggacttggaccaggagcgacggcgaaacaagaagagggggatcttccccaaggtggccaccaacatcatgcgagcctggttgttccagcacctctcgcacccgtacccctcggaggagcagaagaaacagctggcgcaggacacggggctcaccatcctgcaagtcaacaactggttcattaacgcccggagacgcatcgtgcaacctatgatcgatcaatccaaccgcacagggcagggtgcagccttcagcccagagggccagcccatcgggggctataccgagacgcagccacacgtggccgtccggcctccgggatcagtggggatgagtttgaacttggaaggagaatggcattatctatagaggctgatgcaggagagacccagcctccggctgtgacccccagcctcacacctgcctctggttcccgcctggtcctccagcttcaggaccccacctccaaaggcccctctgctcaatgcctacctccctagggccctgctgggacatgggggcctgagtgc

SEQ ID NO: 3069 - DNA, 476 bp, Homo sapiens
ttccgttgctgtcggccagcagctaggactgggagagataggagaagtaggactgctgtgattaggacggatcagacgaagaggggcgtttggtattgggttatggcagggggttttatattgataattgttgtgatgaaattgatggcccctaagatagaagagacacctgctaggtgtaaggagaagatggttaggtctacggaggctccagggtgggagtagttccctgctaagggagggtagactgttcaacctgttcctgctccggcctccactatagcagatgcgagcaggagtaggagagaggggggtaagagtcagaagcttatgttgtttatgcggggaaacgccatatcgggggcaccgattattaggggaactagtcagttgccaaagcctccgattatgatgggtattactatgaagaagattattacaaatgcatgggctgtgacgataacgttgtagatgtg

SEQ ID NO: 3070 - DNA, 488 bp, Homo sapiens
tccgttgctgtcggtggtttccccaagctgcacaggaggccagaaaccacaagtatgatgactaggaagcctactgtcatgagagtggggagacaggcagcaaagcttatgaaggaggtacagaatattctttgcgttgtaagacagaatacgggtttaatctagtctaggcaccagatttttttcccgcttgataaggaaagctagcagaaagtttatttaaaccacttcttgagctttatcttttttgacaatatactggagaaactttgaagaacaagttcaaactgatacatatacacatatttttttgataatgtaaatacagtgaccatgttaacctaccctgcactgctttaagtgaacatactttgaaaaagcattatgttagctgagtgatggccaagttttttctctggacaggaatgtaaatgtcttactggaaatgacaagtttttgcttgatttttttttttaaacaaaaaatga

SEQ ID NO: 3071 - DNA, 456 bp, Homo sapiens; identical to SEQ ID NO: 2710

SEQ ID NO: 3072 - DNA, 476 bp, Homo sapiens
aattccgttgctgtcggtgttttccattttacagtttatattccagcactcaaaactcagggtcaagttttaacaaaagaggtatgtagtcacagtaaatactaagatggcatttctatctcagagggccaaagtgaatcacaccagtttctgaaggtcctaaaaatagctcagatgtcctaatgaacatgcacctacatttaataggagtacaataaaactgttgtcagcttttgttttacagagaacgctagatattaagaattttgaaatggatcatttctacttgctgtgcattttaaccaataatctgatgaatatagaaaaaaatgatccaaaatatggatatgattggatgtatgtaacacatacatggagtatggaggaaattttctgaaaaatacatttagattagtttagtttgaaggagaggtgggctgatggctgagttgtatgttactaacttggccctgact

SEQ ID NO: 3073 - DNA, 653 bp, Homo sapiens
  misc_feature 84, 88, 107, 119, 138, 143, 161, 186, 225, 258, 262, 263,272, 280, 282, 290, 293, 309, 338, 359, 367, 373, 374, 430,449, 450, 499, 524, 558, 590, 638: n = A,T,C or G
ggcacgagccctttgagatttctggctttttgtagggacctcagttccattttcccaactcatgggttctcaataccttaactntctnttatttgtcaaattccaantcctcaaaatcncccaccattacctgacccnctggnagtcaccacaccaccttncccactttcccagggatgcttatgnattagcttaaatcctcaccattctgatttgtaatgccgnccccaccccctttttttgacacctgggagttancttnnctttctggnaagatcancntcacacanacnagcacattttcttatnatactttatctagaaaacccatgtgtcantggcagaagcatcctgaattntggtagancattgnntcgctggactggaacctcctgaaacacagcagtgggaattgcttgtaatccgctgngtctatcatcaacaaaagnnaatattgtattttttcaggggtaatttaacataagaaggttaacatttnccattcaatttaaaactaaaaacangcccgggtgcggtggctcacgcctgtgatcccancctttgggaggccgaggtgggtggatcacgangtcaaggagattgagaccattctggctaacgcagtgaaaacccgtctntactaaaaaacaaat

SEQ ID NO: 3074 - DNA, 477 bp, Homo sapiens
ggtaggatgattgtatcttgaatatgtggtagggccacatctattgtaggaaaaccttgcttttatcatctgtgtgtaaagggcttaataaggagaagaggccttttgactgatttgtgagtataaatgcatttgctgtttcatttcaaaaatgttgtggaggaaaagagtacatttaacttgtataagagaatatttgtactcctgtccaggctgcaggacctttcttcgagagctttgcacacttgacttgaaccacattttctgatccctttactttgttttagaagcacactgaaaaatctcgttgtttaaagtacaatttgtaaatatttcaaaggtctaggagtcataacttttgttttcatactgaaaatgatgttgatcagagaaaccaactgttttgcttttcattgctctgtgagaaatttgaggattctgttttgctgttaggtaagctaaactcagaaattgaaa

SEQ ID NO: 3075 - DNA, 622 bp, Homo sapiens
  misc_feature 255, 602, 615: n = A,T,C or G
ggcacgagggtccttcttgctcataaatggcattgctggatatttgcatttgctagcaatgaagaccaaagaactgattggaagcatgaaaattaatggaagggttgcagcatccacattctcttcagatagtaagaaagtatacgcctcttcgggggatggagaagtttatgtttgggatgtgaactcaaggaagtgccttaacagatttgttgatgaaggcagtttatatggattaagcattgccacatctangaatggacagtatgttgcttgtggttctaattgtggagtggtaaatatatacaatcaagattcttgtctccaagaaacaaacccaaagccaataaaagctataatgaacttggttacaggtgttacttctctgaccttcaatcctactacagaaatcttggcaattgcttcagaaaaaatgaaagaagcagtcagattggttcatcttccttcctgtacagtattttcaaacttcccagtcattaaaaataagaatatttctcatgttcataccatggatttttctccgagaagtggatactttgccttggggaatgaaaaagggcaaggccctgatgtataggttncaccattactcanacttcta

SEQ ID NO: 3076 - DNA, 591 bp, Homo sapiens
gatgctacactcagctttgggtctctgcctcttactcgtcacagtttcttccaaccttgccattgcaataaaaaaggaaaagaggcctcctcagacactctcaagaggatggggagatgacatcacttgggtacaaacttatgaagaaggtctcttttatgctcaaaaaagtaagaagccattaatggttattcatcacctggaggattgtcaatactctcaagcactaaagaaagtatttgcccaaaatgaagaaatacaagaaatggctcagaataagttcatcatgctaaaccttatgcatgaaaccactgataagaatttatcacctgatgggcaatatgtgcctagaatcatgtttgtagacccttctttaacagttagagctgacatagctggaagatactctaacagattgtacacatatgagcctcgggatttacccctattgatagaaaacatgaagaaagcattaagacttattcagtcagagctataagagatgatagaaaaaagccttcacttcaaagaagtcaaatttcatgaagaaaacctctggcacattgacaaatactaaatgtgcaagtatat

SEQ ID NO: 3077 - DNA, 521 bp, Homo sapiens
ccgttgctgtcggccaaaaccagagcaaaatgctaaatacgttattgctaatcagtggtctcaaatcgatttgcctccctttgcctcgtctgagggctgtaagcctgaagatagtggcaagcaccaagtcagtttccaaaattgcccctcagctgctttaagtgactcagcaccctgcctcagcttcagcaggcgtaggctcaccctgggcggagcaaagtatgggccagggagaactacagctacgaagacctgctgtcgagttgagaaaaggggagaatttatggtctgaattttctaactgtcctctttcttgggtctaaagctcataatacacaaaggcttccagacctgagccacacccaggccctatcctgaacaggagactaaacagaggcaaatcaaccctaggaaatacttgcattctgccctacggttagtaccaggactgaggtcatttctactggaaaagattgtgagattgaacttatctgatcgcttgagactcctaataggcagga

SEQ ID NO: 3078 - DNA, 513 bp, Homo sapiens
tcctgggcctatgtcaagaagtgcaaaaacaacatgtgtccaaatcggggattggtgagccagctgctggaatgggagaagactatccttggagattccatcacaaacatcatggatccgctctactgatcttctccgaggcccaccgaagggagacccatcggctctaccgcctgaagctggaggagctgaccaaacttcagaacaattgcaccagctccatcacgcggcagaagaagcggctccaggagctggccctcgccctgaagaaatgcaaaccctccctcccagcagaggccgagggggccgcacaggagctggagaaccagatgaaagagcgccaaggcctcttctttgacatggaggcctatttgcctaagaagaatggattgtacctgagcctggttctggggaacgtcaacgtcacgctcctgagcaagcaggctaagtttgcctacaaggacgagtatgagaagttcaagctctacctcaccatcatcctcatcctcatct

SEQ ID NO: 3079 - DNA, 486 bp, Homo sapiens
ggccacgctgccatcgactacacgcagctgggcctgcggttcaagctgcaagcctgggaggtgctacacaatgtggcgtcggcacagtgccagctggggctctggacagaggcggccagcagcctaagggaggccatgtccaagtggccggaggggtccctgaatggcctggactcagccctggaccaagtgcagagacggggctcactgccgccacggcaggtccccaggggcgaggtcttccggccccaccggtggcacctgaagcacttggagcccgtggatttcctgggcaaggccaaggtggtggcctctgccatccccgacgaccagggctggggcgtccgccctcagcagccacagggaccaggagcgaaccatgatgccaggtccctaatcatggactccccaagagctggcacccaccagggccccctcgatgcagagacagaggtcggtgctgaccgctgcacgtcgactgcctac

SEQ ID NO: 3080 - DNA, 560 bp, Homo sapiens
ggcattcagtcacccccaggaaaggaggcaagtccacgctgggagttagaaggcatcgcctctaatccaggtttcgccatctcctctgctaagtgacgtccagcaagtcacttcactttcaggacctcaaatctcctccccagtagtaaaataggggtaataaaaacagctacagcggaagactgttgtgaggcacagagaaagggcttggtcattggaagcgggttccaggttctcaaccttcatttccttcacggttgaaggacgccaaagaaagcggaaagggtgtgcctagattgatcggtataaggctcactctcccgccccccaaagtggttgatcgttggaacgagaaaagggccatgttcggagtgtatgacaacatcgggatcctgggaaactttgaaaagcaccccaaagaactgatcagggggcccatatggcttcgaggttggaaagggaatgaattgcaacgttgtatccgaaagaggaaaatggttggaagtagaatgttcgctgatgacctgcacaaccttaataaacgcatccgctatctctac

SEQ ID NO: 3081 - DNA, 560 bp, Homo sapiens
gaaaggaagccagcccccagggccagtcccggaggggctgatccgcatctacagcatgaggttctgcccctattctcacaggacccgcctcgtcctcaaggccaaagacatcagacatgaagtggtcaacattaacctgagaaacaagcctgaatggtactatacaaagcacccttttggccacattcctgtcctggagaccagccaatgtcaactgatctatgaatctgttattgcttgtgagtacctggatgatgcttatccaggaaggaagctgtttccatatgacccttatgaacgagctcgccaaaagatgttattggagctattttgtaaggtcccacatttgaccaaagagtgcctggtagcgttgagatgtgggagagaatgcactaatctgaaggcagccctgcgtcaggaattcagcaacctggaagagattcttgagtatcagaacaccaccttctttggtggaacctgtatatccatgattgattacctcctctggccctggtttgagcggctggatgtgtatgggatactggactgtgtgagccaca

SEQ ID NO: 3082 - DNA, 389 bp, Homo sapiens
agctgtgtggaccatatgaaaaatttatatgtgagcaggatcatcaaaattttttgagactcctcacagaaactgaagactggctgtatgaagaaggagaggaccaagctaaacaagcatatgttgacaagttggaagaattaatgaaaattggcactccagttaaagttcggtttcaggaagctgaagaacggccaaaaatgtttgaagaactaggacagaggctgcagcattatgccaagatagcagctgacttcagaaataaggatgagaaatacaaccatattgatgagtctgaaatgaaaaaagtggagaagtctgttaatgaagtgatggaatggatgaataatgtcatgaatgctcaggctaaaaagagtcttgatcaggat

SEQ ID NO: 3083 - DNA, 542 bp, Homo sapiens
gactgtcaataaaatgcgggtttctgggccattcgtcttactttcattttttgattacaaatttctcttgacgcacacaattatgtctgctaatcctcttcttcctagagagagaaactgtgctccttcagtgttgctgccataaaggggtttggggaatcgattgtaaaagtcccaggttctaaattaactaaatgtgtacagaaatgaacgtgtaagtaatgtttctacaggtctttgcaacaaactgtcactttcgtctccagcagagggagctgtaggaatagtgcttccagatgtggtctcccgtgtggggcccagcaatgggggcccctgatgccaagagctctggaggttcttgaaagaggggacacgaaggaggagtgactgggaagcctcccatgccaaggaggtgggaggtgccctggaaatagctgcctcatgccacttaggccatgactggatttaatgtcagtggtgtgccacagtgcagaggctagacaactgaaaggggctaccaaggctgggaaaaaaatgcaatt

SEQ ID NO: 3084 - DNA, 652 bp, Homo sapiens
tgtgaaccaaaccagtgatactttgcagaattgcacattagaactagctacactaggggatctgaaacttgtggaaaagccgtctcctttgactcttgctcctcatgacttcgcaaatattaaagctaacgtcaaagtagcatcaacagaaaatggaataatttttggtaatatagtttatgatgtctctggagcagcaagtgacagaaattgtgtggttctcagtgatattcacatcgacatcatggactatatccagcctgcaacttgcactgatgcagaattccgtcagatgtgggccgaatttgaatgggaaaacaaagtgacagttaacaccaacatggttgatttaaatgactacttacagcacatattaaagtcaaccaatatgaaatgcctgactccagaaaaggccctttctggttactgtggctttatggcagccaacctttatgctcgttccatatttggtgaagatgcacttgcaaatgtcagcattgagaagccaattcaccagggaccagatgctgctgttaccggccatataagaattcgtgcaaagagccagggaatggccttaagtcttggagataaaatcaacttgtcacagaagaaaactagtatataaaaataaacaaaaagtccttgaagc

SEQ ID NO: 3085 - DNA, 228 bp, Homo sapiens
ggccacatggtgtcagatgaatatgagcagctgtcctatgaagccctggaggctgcccgaatctgttccaataagtacatggttaaaagttgcggcaaatatggctaccatatccaggtgcggctccaccccttccacgtcatacgcatcaacaagatgttgctctgtgctggggctgacaggctccaaacaggcatgcgaggtgccttaggaaagccccatggcact

SEQ ID NO: 3086 - DNA, 549 bp, Homo sapiens
atcctggcatcagcatcacggatctttccaagaaggcaggcgagatctggaagggaatgtccaaagagaagaaagaggagtgggatcgcaaggctgaggatgccaggagggactatgaaaaagccatgaaagaatatgaagggggccgaggcgagtcttctaagagggacaagtcaaagaagaagaagaaagtaaaggtaaagatggaaaagaaatccacgccctctaggggctcatcatccaagtcgtcctcaaggcagctaagcgagagcttcaagagcaaagagtttgtgtctagtgatgagagctcttcgggagagaacaagagcaaaaagaagaggaggaggagcgaggactctgaagaagaagaactagccagtactccccccagctcagaggactcagcgtcaggatccgatgagtagaaacggaggaaggttctctttgcgcttgccttctcacaccccccgactccccacccatattttggtaccagtttctcctcatgaaatgcagtccctggattctgtgccatctgaacatgctctc

SEQ ID NO: 3087 - DNA, 356 bp, Homo sapiens
gaaaaacaaacaaacatatacacagaatacttttacctttttattttgaaataattatagactcacaggaagtttcaaaagtagtacatggagtcccatgaacccttcaccccctcttccttcaatggtgacatataactgtagcacactgtcacaaccaggaaattgacattagtataatactgttaaccaaactatgggcctcactgggttttaagcagcacttgtgtgtgtgtggttgtgcgtgcctgtgtgtgtatgtgtgtgtgtgtagtattatgcagttttatcccatgcataaattcatgtaaccactcccacaatcaagatacagaatcgttctatagaatatcttt

SEQ ID NO: 3088 - DNA, 568 bp, Homo sapiens
gccgcgtgacttgctttttgcggctggggaggtctacgcttctagagcttgagccagcggggcgaccctgcagtggcaggactcggcaccgcgccctccaccgccggttggtggcctgcgtgacagtttcctcccgtcgacatcgaaaggaagccggacgtgggcgggcagagagcttcatcgcagtaggaatggcagccccatctatgaaggaaagacaggtctgctggggggcccgggatgagtactggaagtgtttagatgagaacttagaggatgcttctcaatgcaagaagttaagaagctctttcgaatcaagttgtccccaacagtggataaaatattttgataaaagaagagactacttaaaattcaaagaaaaatttgaagcaggacaatttgagccttcagaaacaactgcaaaatcctaggctgttcataaagattgaaagtattctttctggacattgaaaaagctccactgactatggaacagtaatagtttgaatcatagtgaacatcaatacttgttccctatatacgacacttgataattaagatgatcaag

SEQ ID NO: 3089 - DNA, 494 bp, Homo sapiens
ccgttgctgtcgcggcgggcggactcggagcgggcggcggagtgacccggacagctgtcctctctgacaccaccccggcctgcctctttgttgccatgagagctgcctacctcttcctgctattcctgcctgcaggcttgctggctcagggccagtatgacctggacccgctgccgccgttccctgaccacgtccagtacacccactatagcgaccagatcgacaacccagactactatgattatcaagaggtgactcctcggccctccgaggaacagttccagttccagtcccagcagcaagtccaacaggaagtcatcccagccccaaccccagaaccaggaaatgcagagctggagcccacagagcctgggcctcttgactgccgtgaggaacagtacccgtgcacccgcctctactccatacacaggccttgcaaacagtgtctcaacgaggtctgcttctacagcctccgccgtgtgtacgtcattaac

SEQ ID NO: 3090 - DNA, 463 bp, Homo sapiens; identical to SEQ ID NO: 344

SEQ ID NO: 3091 - DNA, 526 bp, Homo sapiens
ccccctgcttaccgacgagtgccggaccctgcagagctgtaagactggcaaggccaagatcaccggcggctatcggctcccggccaagtacgtcatccacacagtggggcccatcgcctacggggagcccagcgccagccaggctgccgagctccgcagctgctacctgagcagtctggacctgctgctggagcaccggctccgctcggtggcgttcccctgcatctccaccggcgtgtttggctacccctgtgaggcggccgccgagatcgtgctggccacgctgcgagagtggctggagcagcacaaggacaaggacgaggacatctaccggagccggctcccccactacttccccgtggcctgaggctcccgcagcccaccctgaccgggactgacccgccttcgggaccccgctcccagctctgagaggtcgccaaagcctgcagcctggcctgggcctggccaccccttctttccctccgcgccccgcccccgaggagcctaataaagatctcgttgtggc

SEQ ID NO: 3092 - DNA, 645 bp, Homo sapiens
agctctggggggaaagagggcggacaggcccctccctctgccctctccctgcagaatgtggcaggcggacctggaatgtgttggagggaagggggagtaccacctgagtctccagcttctccggaggagccagctgtcctggtgggacgatagcaaccacaagtggattctccttcaattcctcagcttcccctctgcctccaaacaggggacacttcgggaatgctgaactaatgagaactgccagggaatcttcaaactttccaacggaacttgtttgctctttgatttggtttaaacctgagctggttgtggagcctgggaaaggtggaagagagagaggtcctgagggccccagggctgcgggctggcgaaggaaatggtcacaccccccgcccaccccaggcgaggatcctggtgacatgctcctctccctggctccggggagaagggcttggggtgacctgaagggaaccatcctggtgccccacatcctctcctccgggacagtcaccgaaaacacaggttccaaagtctacctggtgcctgagagcccagggcccttcctccgttttaagggggaagcaacatttggaggggacggatgggctggtcagctggtctccttttcctactcatactata

SEQ ID NO: 3093 - DNA, 374 bp, Homo sapiens
attccgttgctgtcggacggccagagcctgtttgttagggctgttagagggtgatcttcagttttacaggaagtgggtcacgggttaattttaaatgtgattccgaatctcctttcagtcctcgagaagggccaatgagcatttttcagcagtcacagccagtgtgagtgctgctctttccacctgccttgcaaattctgtttcccaggggaatgtgtctactgcctggtggttcaaaggttggaaggcagggcagaggtgggggctgattctgctgggacaggtcttccagaggcagcctccccccactgcctgtccccgtccccaccaggctgcccttgggatggaccttttcattcttttctttatattct

SEQ ID NO: 3094 - DNA, 289 bp, Homo sapiens
aagacttaaagaaaaacttgaagctgaaatgaaaaagctaaattatgaagaaaataaagaggaaagccttttggaaaagcgcaggcagctgtctcgtgatattggtagattgaaagaaacatatgaagctctattagccagatttcccaatcttcgatttgcatacaaggatccagagaagaactggaatagaaattgtgtgaaaggacttgtggcttctctgattagtgtgaaagacacttctgcaaccacagctttagaattagtggctggagaacgactctacaat

SEQ ID NO: 3095 - DNA, 733 bp, Homo sapiens
  misc_feature 44, 451, 623, 630, 686, 717: n = A,T,C or G
cagcattcagttgtaccctaacgagtttccaggtagtgaccctngagattgtcccagagacctgccgaagaatgccgctttgaaattggggtgcatcaatgctgagtatcccgactccttcggccattatagagaggccaaattctcccagaccaaacatcactggtggtggaagctgcattttgtgtgggaaagagtgaaaattcttcgagattatgctggccttatacttttcctagaagaggatcactacttagccccagacttttaccatgtcttcaaaaagatgtggaaactgaagcagcaagagtgccctgaatgtgatgttctctccctggggacctatagtgccagtcgcagtttctatggcatggctgacaaggtagatgtgaaaacttggaaatccacagagcacaatatgggtctagccttgacccggaatgcctatcanaagctgatcgagtgcacagacactttctgtacttatgatgattataactgggactggactcttcaatacttgactgtatcttgtcttccaaaattctggaaagtgctggttcctcaaattcctaggatctttcatgctggagactgtggtatgcatcacaagaaaacctgtngaccatncactcagagtgcccaaattgagtcactcttaaataataaccaacaatacatgtttncagaaactctactataatgaaaagttactgnggtagcccattttcct

SEQ ID NO: 3096 - DNA, 375 bp, Homo sapiens
  misc_feature 375: n = A,T,C or G
ggcacgagaaaggaagattactcagagattatagggagcatgggtgaagcacttgaggaagaactggattccatggcaaaacatgaatccagggaagataaaatttttcagaagtttaaaactcagatagcccttgaaccagaacagattcttagatatggcagaggtattgcccccatctggatttctggtgaaaatattcctcaagaaaaggatattccagattgcccctgtggtgccaagagaatattggaattccaggtcatgcctcagctcctaaactacctgaaggctgacagactgggcaagagcattgactggggcatcctggctgtcttcacctgtgctgagagctgcagcttgggtactggctan

SEQ ID NO: 3097 - DNA, 167 bp, Homo sapiens
gcacctaattggaagcgccaccctagcaatatcaaccattaaccttccctctacacttatcatcttcacaattctaattctactgactatcctagaaatcgctgtcgccttaatccaagcctacgttttcacacttctagtaagcctctacctgctcgacaacacat

SEQ ID NO: 3098 - DNA, 503 bp, Homo sapiens
ttttattttacttgaatatattcttgcttcactttaccctccataatatgttgtacattagtgctgatcaagtttacagagttacattttgctttcctaaccattcagtcaggaattaaaatatggcattgtataacaactgggaagaagctcatagtggatataaattagagtagataatgggtcaccttgatagcctctgtttacattacttgtatatgggcaaaataattattacctatacgtgtatttaagcttaattttcatataaacagtatttttaatctatgttaaaatagataatatctaaaagtgtgatctctaggtagtccttagtttattagtactgtacttcaaaaagatttttaaataggtccggcacggtggctcatgcctgtaatcccagcactttgggaggctgaggcgggcgaatcacctgaggtcaggagttcgagatcagcctggccaacatggtgaaaccctgtctcaactaaaaatataaa

SEQ ID NO: 3099 - DNA, 578 bp, Homo sapiens
gttgctgtcgggggtcttagttttcaaactctggcaactctgtgaaaaataggagcaaactagagagccctggagattggtagtagggaagggaggatagcaggaagtttgaaaaattagcagccccggggcctaaaggaatcagctgtcatcattttcatcattattattttggttaggatggcttgaaaatcagaacgtatcttggtttacgtaattgaggtcttaaagaactaagaacagttaaatagtcacaactaccaccctctgacttacataatcattggtgtgggcttcgttttgcctttagagtcacatctttcagtaaattcacagagatcaagagggacgtgcaacatacagcttaaaggctgttatgcttcagggttgctgaagaaatgaaacatcagcctgccatcgtctagaagagacattggcagttaaaaattagcacctccagtgtagtcgcctggcactgcccatcatgctgagggagcagattcttcccaaggcagcttcagctaggagtttgtaagcaaggactttgtgacacatttgtcccctggaactgagccttt

SEQ ID NO: 3100 - DNA, 639 bp, Homo sapiens
tgctgtcggtggcccagctgtagtcctgaccttcctcttctttaaccctttagccctaggatggctttggtgggagaggggatagaagcccatgacttcagacagactttctcttggcagatgcaggcgggcctcctcccaggctgctccagacatgggggttggggatggggggcaccttgcagccccttcctgctggggctccctccttgtagcaccccccttgcggctcagctctggtttcctctcccaggctcacccaggctctgctcaggctgggaggcagagggcacaaaccttataattttttaaatgaaaaaccgctgctgctggctgtggctagagccccctggggctgctggagctgctgcctctgttctggaggacgagccttctccttatctgctgcccatctttccaggaagtcaggatggagtcagaacaactacagtcatcccccgtggtgtctgcacatcactccagccccataaagagtgtcatgttagctgagtcaccatttggcttcggcctggaaatagtgtgattagaacactgatcgtgtgcgaggccaggagatcaagaccatcctgactaacaaacacagtgaaaccccgtctctactaaaaatacaaaaaaatt

SEQ ID NO: 3101 - DNA, 486 bp, Homo sapiens
ccgcccggcccctccagcttcccggaccatggccaacctggagcgcaccttcatcgccatcaagccggacggcgtgcagcgcggcctggtgggcgagatcatcaagcgcttcgagcagaagggattccgcctcgtggccatgaagttcctccgggcctctgaagaacacctgaaacagcactacattgacctgaaagaccgaccattcttccctgggctggtgaagtacatgaactcagggccggttgtggccatggtctgggaggggctgaacgtggtgaagacaggccgagtgatgcttggggagaccaatccagcagattcaaagccaggcaccattcgtggggacttctgcattcaggttggcaggaacatcattcatggcagtgattcagtaaaaagtgctgaaaaagaaatcagcctatggtttaagcctgaagaactggttgactacaagtcttgtgctcatgactgggtctatgaata

SEQ ID NO: 3102 - DNA, 290 bp, Homo sapiens
ggcacgagagaagtcaggcacgtagctcagcggcggccgcggcgcgtgcgtctgtgcctctgcgcgggtctcctggtccttctgccatcatgccgatgttcatcgtaaacaccaacgtgccccgcgcctccgtgccggacgggttcctctccgagctcacccagcagctggcgcaggccaccggcaagcccccccagtacatcgcggtgcacgtggtcccggaccagctcatggccttcggcggctccagcgagccgtgcgcgctctgcagcctgcacagcatcggcaag

SEQ ID NO: 3103 - DNA, 552 bp, Homo sapiens
attccaccgacgtggaggcagccgtcaacagcctggtcaatttgtacctgcaggcctcctacacctacctctctctgggcttctatttcgaccgcgatgatgtggctctggaaggcgtgagccacttcttccgcgaattggccgaggagaagcgcgagggctacgagcgtctcctgaagatgcaaaaccagcgtggcggccgcgctctcttccaggacatcaagaagccagctgaagatgagtggggtaaaaaccccagacgccatgaaagctgccatggccctggagaaaaagctgaaccaggcccttttggatcttcatgccctgggttctgcccgcacggacccccatctctgtgacttcctggagactcacttcctagatgaggaagtgaagcttatcaagaagatgggtgaccacctgaccaacctccacaggctgggtggcccggaggctgggctgggcgagtatctcttcgaaaggctcactctcaagcacgactaagagccttctgagcccagcgacttctgaagggccccttgcaaagtaata

SEQ ID NO: 3104 - DNA, 471 bp, Homo sapiens
ttgcagcaagcacggcagcaacaggaggaactcgaggccgagcatgggactggggacaagcccgcggcgccgcgggaacgcaccacgcggctgggtccaagaatgcctcaggatggatcagatgacgaggacgaggagtggcccaccctggagaaggctgccacaatgacagcagcgggccatcatgcagaggtggttgtggaccctgaggatgagcgtgccatagagatgttcatgaacaagaaccctcctgccaggcgcaccctggctgacatcatcatggagaagctgactgagaagcagacagaggttgagacagtcatgtcagaggtgtcgggcttccctatgccccagctggacccccgggtcctagaagtgtacaggggggtccgggaggtattatctaagtaccgcagtggaaaactgcccaaggcatttaagatcatccctgcactctccaactgggagcaa

SEQ ID NO: 3105 - DNA, 516 bp, Homo sapiens
ctaaaactagagcagtttgatttaaaagtgtcactcttcctccttttctactttcagtagatatgagatagagcataattatctgttttatcttagttttatacataatttaccatcagatagaactttatggttctagtacagatactctactacactcagcctcttatgtgccaagtttttctttaagcaatgagaaattgctcatgttcttcatcttctcaaatcatcagaggccgaagaaaaacactttggctgtgtctataacttgacacagtcaatagaatgaagaaaattagagtagttatgtgattatttcagctcttgacctgtcccctctggctgcctctgagtctgaatctcccaaagagagaaaccaatttctaagaggactggattgcagaagactcggggacaacatttgatccaagatcttaaatgttatattgataaccatgctcagcaatgagctattagattcattttgggaaatctccataatttcaatttgtaaac

SEQ ID NO: 3106 - DNA, 413 bp, Homo sapiens
tagctgctctacggtcatctttgcttagagtatgctttaacctggcttttaaagcagtagtaactgccccaccaaaggtcttaaaagccatttttggagcctattgcactgtgttctcctactgcaaatattttcatatgggaggatggttttctcttcatgtaagtccttggaattgattctaaggtgatgttcttagcactttaattcctgtcaaattttttgttctccccttctgccatcttaaatgtaagctgaaactggtctactgtgtctctagggttaagccaaaagacaaaaaaaattttactacttttgagattgccccaatgtacagaattatataattctaacgcttaaatcatgtgaaagggttgctgctgtcagccttgcccactgtgacttcaaaccca

SEQ ID NO: 3107 - DNA, 514 bp, Homo sapiens
  misc_feature 232: n = A,T,C or G
ctcaaatgctgtccccggcagctttcctgggggactagagctccttctggccatgttatatgaaatgtaattcttattttataaataatgtgatgtagatgtaaccggtgccccctccccgttgtgactgagggcgagtgttatacctggctgcgtgtgcagctgaggagggagtgaacctcaagcctaaatacctgttaggattggagggtctgggtgggcctgggcctancaatcaagcttctacctgtaccttatgtaaggtagaccctcctagtgtcagtacctgagcttgtttacctcagttccgcaggcaggacagccggtccgggaaccctgagtgagagtgagtgtggatgtgtacagtacacacactggacggcagcgggaggctgggactttccattacaaatagagacttcattcctgttgagtctagttggaatttttagtatgaatgtgagatttttctcctgcttgtgacattaagaataaaaaactgtgatctataaaa

SEQ ID NO: 3108 - DNA, 238 bp, Homo sapiens
ctgtttgtcaaagcctgtctgaggataccactgaagagacattaaaggagtcatttgacggctccgttcgggcaaggatagttactgaccgggaaactgggtcctccaaagggtttggttttgtagacttcaacagtgaggaggatgccaaagctgccaaggaggccatggaagacggtgaaattgatggaaataaagttaccttggactgggccaaacctaagggtgaaggtggctt

SEQ ID NO: 3109 - DNA, 492 bp, Homo sapiens
gcgaattgtggatgactgtggtggggcctttacgatgggtaccattggtggtggtatctttcaagcaatcaaaggttttcgcaattctccagtgggagtaaaccacagactacgagggagtttgacagctattaaaaccagggctccacagttaggaggtagctttgcagtttggggagggctgttttccatgattgactgtagtatggttcaagtcagaggaaaggaagatccctggaactccatcacaagtggtgccttaacgggagccatactggcagcaagaaatggaccagtggccatggttgggtcaaccgcaatgggtggcattctcctagctttaattgaaggagctggtatcttgttgacaagatttgcctctgcacagtttcccaatggtcctcagtttgcagaagacccctcccagttgccttcaactcagttaccttcctcaccttttggagactatcgacaatatcagtaggacttctt

SEQ ID NO: 3110 - DNA, 507 bp, Homo sapiens
ggcacgaggccatttttttggaaacctctgcgccatgagagccaagtggaggaagaagcgaatgcgcaggctgaagcgcaaaagaagaaagatgaggcagaggtccaagtaaaccgctagcttgttgcaccgtggaggccacaggagcagaaacatggaatgccagacgctggggatgctggtacaagttgtgggactgcatgctactgtctagagcttgtctcaatggatctagaacttcatcgccctctgatcgccgatcacctctgagacccaccttgctcataaacaaaatgcccatgttggtcctctgccctggacctgtgacattctggactatttctgtgtttatttgtggccgagtgtaacaaccatataataaatcacctcttccgctgttttagctgaagaattaaatcataaaaaaaaaaataaataaataaaaaaaaaaactcgagcctctagaactatagtgagtcgtattacgtagatccagacatgataaga

SEQ ID NO: 3111 - DNA, 593 bp, Homo sapiens
ttgagtttgctactcatgaagaagctgtggcagctatgtccaaagacagggccaatatgcagcacagatatatagaactcttcttgaattcaacaacaggggccagcaatggggcgtatagcagccaggtgatgcaaggcatgggggtgtctgctgcccaggccacttacagtggcctggagagccagtcagtgagtggctgttacggggccggctacagtgggcagaacagcatgggtggctatgactagttttgttaggaacatttgagttacttcaatcattttcacaggcagccaacaagcaattaagagcagttataatagaggaagctgggggacccattttgcaccatgagtttgtgaaaaatctggattaaaaaattacctcttcagtgttttctcatgcaaaattttcttctagcatgtgataatgagtaaactaaaactattttcagcttttctcaattaacattttggtagtatacttcagagtgatgttatctaagtttaagtagtttaagtatgttaaatgtggatcttttacaccacatcacagtgaacacactggggagacgtgcttttttggaaaac

SEQ ID NO: 3112 - DNA, 160 bp, Homo sapiens
taatgacaaccaggaattttatcaggatacttatgggcaacagtggaagtagacaagtaagggcttgaaaatgatactggcaagatacgattggctctagatctacattcttcaaaaaaaaaaatgggcttaactgtttcatctttaagtaccattttgc

SEQ ID NO: 3113 - DNA, 392 bp, Homo sapiens
  misc_feature 392: n = A,T,C or G
ggcacgagctgggggacagcagagacaaggaggccatggccctggatggcacagcctatcaggggagcagctccacctgcatcctccaggagacctccctgtgatgttgactcaggaccccgcctctgtcctcactgtgccaggccatagccagaggccaccctgtagtacagggatgagtcttggtgtgttctgcagggacaggcctggatgatctagctcataccaaaggaccttgttctgagaggttcttgcctgcaggagaagctgtcacatctcaagcatgtgaggcaccgtttttctcgtcgcttgccaatctgttttttaaaggatcaggctcgtaaggagcaggatcatgccagaaatagggatggaagtgcatcctctgggan

SEQ ID NO: 3114 - DNA, 423 bp, Homo sapiens
cagtttcctggtcatccccttagcagttcacaagttcctggcaaatgttccaaagcaaaaagcgattgcaattagcatccagttcctgcagcctggtgctctgccctgcacgtcagggttggcatccacccagatccagatggaagggaaacttctctcttctcctttgcctcctcttccctcaccagagcagggcgcttctcttggggtggtgagaaggatcttcgagaaatcgtgttcagtatttcaagctctatttctgtggcacatgtcttttgagaggcatcttcacctcttctgtgatgacttggtatgttgtttggtagagagatcttgattttcggaggatcttgcatttttctagggaatattttgtagttgtgtgtgtgtgtttttgccttggtccccattatgggatgcatt

SEQ ID NO: 3115 - DNA, 358 bp, Homo sapiens
gaatccgaagaagcggcctgtggcagcaagaagcgggtagtgccaggtattgtgtacctgggccatatcccgccgcgctttcggcccctgcacgtacgcaaccttctcagcgcctatggcgaggtctgacgcgtcttctttcaggctgaggaccggttcgtgagactcaagaagaatgcagcagcagctgcctgagggaaaaagcggtcctacaccaacgactacaccgagggatgggtggagttccgtgacaagcgcataaccaagcgcgtggcggtcagtctacacaacacgcctatgggtgcccgcatgcgcagacccttccgatatgatctttggaacctcaagtacttgcacc

SEQ ID NO: 3116 - DNA, 564 bp, Homo sapiens
gaatggagacattcgaggcggcctcaggagtggatgcgatctgtctctcctggctccactcttgccgccttccagctctgagtcttgggaatgttgttacccttggaagataaagctgggtcttcaggaactcagtgtctgggaggaaagcatggcccagcattcagcatgtgttcctttctgcagtggttctttatcaccacctccctcccagccccagcgcctcagccccagccccagctccagccctgaggacagctctgatgggagagctgggccccctgagcccactgggtcttcagggtgcactggaagctggtgttcgctgtcccctgtgcacttctcgcactggggcatggagtgcccatgcatactctgctgccggtcccctcacctgcacttgaggggtctgggcagtccctcctctccccagtgtccacagtcactgagccagacggtcggttggaacatgagactcgaggctgagcgtggatctgaacaccacagcccctgtacttgggttgcctcttgtccctgaacttcgttgtaccagtgcatggagag

SEQ ID NO: 3117 - DNA, 556 bp, Homo sapiens
cagtcggatttctgtccttggtacattggattaccgtttattccatatgtggataatttgccgaacttcaatagatcagttgatggaccaatcaggctgccaattgtggataagtacaaggatatgggcactgtggtcctgggaaagctggaatcaggatctatttgtaaaggccagcagcttgtgatgatgccaaacaagcacaacgtggaagttcttggaatactttccgatgatgtagagactgataccgtagccccaggtgaaaacctcaaaatcagactgaaaggaattgaagaagaggagattcttccagggtttatactttgtgatcctaataatctttgtcattctggacgcacatttgatgcccagatagtgattatagagcacaaatccatcatctgcccaggctataatgcggtgctgcatattcatacctgtattgaggaggtggaaataacagccttaatctgcttggtagacaaaaaatcaggagaaaaaagtaagacccgaccccgttttgtcaaacaagatcaagtatgcattgctcgct

SEQ ID NO: 3118 - DNA, 450 bp, Homo sapiens
gtcggcttggtcgcgtctgagggggcttgtaggtggctctggctgaaacaggcgcctgcgagagtctgtaggagggaaaccgccatggacgatcagggttgccctcggtgtaagaccaccaaatatcggaacccctccttgaagctgatggtgaatgtgtgcggacacactctctgtgaaagttgtgtagatttactgtttgtgagaggagctggaaactgccctgagtgtggtactccactcagaaagagcaacttcagggtacaactctttgaagatcccactgttgacaaggaggttgagatcaggaaaaaagtgctaaagatatacaataaaagggaagaagattttcctagtctaagagaatacaatgatttcttggaagaagtggaagaaattgttttcaacttgaccaacaatgtggatttggacaacaccaaaaagaaaatg

SEQ ID NO: 3119 - DNA, 465 bp, Homo sapiens
attccgttgctgtcggccgcgagctgccacccgaccaggctgagtactgcatcgcgcggatggccccctacaccggccccgactccgtgccaggtgctctggactacatgtccttctccacggcgctgtacggcgagagtgacctctaatccaccccgcccggccgccctcgtcttgtgcgccgtgccctgccttgcacctccgccgtcgcccatctcctgcctgggttcggtttcagctcccagcctccacccgggtgagctggggcccacgtggcatcgatcctccctgcccgcgaagtgacagtttacaaaattattttctgcaaaaaagaaaaaaaagttacgttaaaaaccaaaaaactacatattttattatagaaaaagtattttttctccaccagacaaatggaaaaaaagaggaaagattaactatttgcaccgaaatgtcttgttttgttgcgac

SEQ ID NO: 3120 - DNA, 182 bp, Homo sapiens
ctctacacttatcatctacacaattataatggtactgactatcctagaaatcgctgccgccttaatccaagcctacgttttcacacttctagtaagcctctacctgcacgacaacacataaaaaaaaaaaaaaaaaaaaacccggccctttaaaatttaagggggtttttttccttaaaccc

SEQ ID NO: 3121 - DNA, 552 bp, Homo sapiens
ccgttgctgtcgtgatttgaggagcagtaaaatgaaagctatatctattctaaaccttatttagacattggtaccagttacccaggtgaaaatatggagtaactttgttttgtatggtaaggtttaggaatggtggatgaagggtatctctatataaataaagtgctcaacaatgtgcaatgattgtaaatttagtaagatattacagccatttcatgaatgctttaccattcaacatagtatctattacaaaacacctttcttgtatccatatacttcaggtgttgctgttaacatttactatgatatttattttaaccaaaatgttactcacattaaatgtttattctttaaaatgaatgtattatgtttttaacccacaaatgcatacttaccctgtgcctcatatttcaatagtactgtaatatggacatcttttgtgaaatacttttattttgttatgctttaaatatacatacaaaaagatttctgttattagctttgaaaattgtataatatcctaatataaacaaaaatataaaaataaaaatg

SEQ ID NO: 3122 - DNA, 590 bp, Homo sapiens
  misc_feature 362: n = A,T,C or G
tccgttgctgtcggcgttttggggacgggggctggtgaggctcacgttggagggcttcgcgtctgcttcggagaccgtaaggatattgatgaccatgagatccctgctcagaacccccttcctgtgtggcctgctctgggccttttgtgccccaggcgccagggctgaggagcctgcagccagcttctcccaacccggcagcatgggcctggataagaacacagtgcacgaccaagagcatatcatggagcatctagaaggtgtcatcaacaaaccagaggcggagatgtcgccacaagaattgcagctccattacttcaaaatgcatgattatgatggcaataatttgcttgatggcttanaactctccacagccatcactcatgtccataaggaggaagggagtgaacaggcaccactaatgagtgaagatgaactgattaacataatagatggtgttttgagagatgatgacaagaacaatgatggatacattgactatgctgaatttgcaaaatcactgcagtagatgttatttggccatctcctggttatatacaaatgtgacccgtgataatgtgattgaacac

SEQ ID NO: 3123 - DNA, 520 bp, Homo sapiens
ttccgttgctgtcgagcaaatctacaaaggttcttgaacctttctattatatacaaaactgaaaagtcattaaggagttcaactaatcaggaattaaatggtcatttatttcatgcagtatgatttaaggtatttcttgagattctggtcaaatgtcataatcagcaaacgggattaaaaaaaaaactccaaaatcactaaataattatctaaataatggtattggagaacttgtttcctgctatttggaagagattgttgcttcattgctagtttgtatttctaacttctacagttatagactccactgtgctttgtgtctgaatttctcagtataaacattttgtttactgtatgcttgcatatttattttcaactttgtttgtctttaaaattgcttgaggaaaaatggttgtaattaatttctgctacagaaaagccacctggtacgttttgtctcatcaggattgttttaaattctaaactataagtttgttcagaggggcttttgcaatgatag

SEQ ID NO: 3124 - DNA, 519 bp, Homo sapiens
gtctttctgccgagcctcggtcccggcccccatcctccccgccccatcggttgttgtctgggcggatttaaacagtcaagtaaaatcaagctgggtaatcatggcagaaggtggatttgatccctgtgaatgtgtttgctctcatgaacatgcaatgagaagactgatcaatctgttacggcagtcccagtcctactgcacagacacagagtgtcttcaggaattaccgggaccctctggtgataatggcatcagtgttacaatgatcttggtagcctggatggttattgcattgatcttgttcttactgagacctcctaatctaagaggatccagcctacctggaaagccaaccagtcctcataatggacaagatccaccagctcctcctgtggactaactttgtgatatgggaagtgaaaatagttaacaccttgcacgaccaaacgaacgaagatgaccagagtactcttaaccccattagaactgtttttccttttgtatctgcaatatgggatg

SEQ ID NO: 3125 - DNA, 501 bp, Homo sapiens
ggcacgagggagtcttgctgtgtctcccaggctagagtgcagtggcatgatctcggctcactgcaatctctacctcccgggttcaagcgattctcctgcctcagccttgtgagtagctgggattacaggcatgtgccaccacgcccaactaatttttgtatttttagtagatatggggtttcaccgtgttggtcaggctggtctcgaactcctgacctcatgatccacccacctcagcttcccgaagtgctgtgattacaggcatgagccacagcacacagcccatctttttttaaactatgtttgtttaatcatcacaaatctattcatctatccactcctttatttatctatccacctcttattttgtacacatttcaaagtaaactatagacatctgtatacttatctttaaatatttcaatatgtacatcattaactggtgttaagtatttctttatagcttttcctcttggtggaaagtttacatacaaagaaatg

SEQ ID NO: 3126 - DNA, 376 bp, Homo sapiens
ggcacgaggtctgcaggcactcagaatggtccacgtttgacataccgacgtaggctttcctacaatacagcctctaacaaaactaggctgtcccgaacccctggtaatagaattgtttacctttataccaagaaggttgggaaagcaccaaaatctgcatgtggtgtgtgcccaggcagacttcgaggggttcgtgctgtaagacctaaagttcttatgagattgtccaaaacaaagaaacatgtcagcagggcctatggtggttccatgtgtgctaaatgtgttcgtgacaggatcaagcgtgctttccttatcgaggagcagaaaatcgttgtgaaagtgttgaaggcacaagcacagagtcagaaagctaaat

SEQ ID NO: 3127 - DNA, 479 bp, Homo sapiens
ttcgtcgtggcaacgttgctggtgacagcaaaaatgacccaccaatggaagcagctggcttcactgctcaggtgattatcctgaaccatccaggccaaataagcgccggctatgcccctgtattggattgccacacggctcacattgcatgcaagtttgctgagctgaaggaaaagattgatcgccgttctggtaaaaagctggaagatggccctaaattcttgaagtctggtgatgctgccattgttgatatggttcctggcaagcccatgtgtgttgagagcttctcagactatccacctttgggtcgctttgctgttcgtgatatgagacagacagttgcggtgggtgtcatcaaagcagtggacaagaaggctgctggagctggcaaggtcaccaagtctgcccagaaagctcagaaggctaaatgaatattatccctaatacctgccaccccactcttaatcagtggtggaaga

SEQ ID NO: 3128 - DNA, 321 bp, Homo sapiens
gctgaagagagggacaggcactccaaacctgtcttggggccactttcagagcccccagccctgggaaccactcccaccacaggcataagctatcacctagcagcctcaaaacgggtcagtattaaggttttcaaccggaaggaggccaaccagcccgacagtgccatccccaccttcacctcggagggatggagaaagaagtggagacagtcctttcccaccattcctgcctttaagccaaagaaacaagctgtgcaggcatggtcccttaaggcacagtgggagctgagctggaaggggccacgtggatgggcaaagctt

SEQ ID NO: 3129 - DNA, 579 bp, Homo sapiens
cgctgctgcccctttctttttttcaggcggccgggaagatggcggacattcagactgagcgtgcctaccaaaagcagccgaccatctttcaaaacaagaagagggtcctgctgggagaaactggcaaggagaagctcccgcggtactacaagaacatcggtctgggcttcaagacacccaaggaggctattgagggcacctacattgacaagaaatgccccttcactggtaatgtgtccattcgagggcggatcctctctggcgtggtgaccaagatgaagatgcagaggaccattgtcatccgccgagactatctgcactacatccgcaagtacaaccgcttcgagaagcgccacaagaacatgtctgtacacctgtccccctgcttcagggacgtccagatcggtgacatcgtcacagtgggcgagtgccggcctctgagcaagacagtgcgcttcaacgtgctcaaggtcaccaaggctgccggcaccaagaagcagttccagaagttctgaggctggacatcggcccgctccccacaatgaaataaagttattttctcattcccaaaaaaaaaaa

SEQ ID NO: 3130 - DNA, 621 bp, Homo sapiens
ctgtctcaatgtgaattttcaatgggcaaaactttactagtatatgatatgaatctcagagaaatggaaaattatgaaaaaatttacaaggaaatagaatgtagcatagctggagcacatgaaaaaattgctgagtgcaaaaagcaaattcttcaagcaaaacgaatacgaaaaaatcgccaagaatatgatgctttggcaaaagtgattcagcaccatccagacaggcatgagacattaaaggaactagaggctctgggaaaagaattagagcatctttcacacattaaagaaagtgttgaagataagctggaattgagacggaaacagtttcatgttcttcttagtaccatccatgaacttcagcaaacattggaaaatgatgaaaaactctcagaggtagaagaagctcaggaagcaagcatggaaacagatcctaagccatagacaggctaattgcccaccactcccaggaatattgaaatagctacatgaccataatgtgtttaaaatgtggtatgctcttgagatatttaaagttttggcagtaaaatactctgtttttaagtatgaatgtatttcattcatatttcctctcacaaaggaaaatgacttcagtat

SEQ ID NO: 3131 - DNA, 485 bp, Homo sapiens
gcggcgatggcatctctcggcgccctggcgctgctcctgctgtccagcctctcccgctgctcagccgaggcctgcctggagccccagatcaccccttcctactacaccacttctgacgctgtcatttccactgagaccgtcttcattgtggagatctccctgacatgcaagaacagggtccagaacatggctctctatgctgacgtcggtggaaaacaattccctgtcactcgaggccaggatgtggggcgttatcaggtgtcctggagcctggaccacaagagcgcccacgcaggcacctatgaggttagattcttcgacgaggagtcctacagcctcctcaggaaggctcagaggaataacgaggacatttccatcatcccgcctctgtttacagtcagcgtggaccatcggggcacttggaacgggccctgggtgtccactgaggtgctggctgcggcgatcggccttgtgatctactactt

SEQ ID NO: 3132 - DNA, 466 bp, Homo sapiens
tgaagactattctcagcaatcagactgtcgacattccagaaaatgtcgacattactctgaagggacgcacagttatcgtgaagggccccagaggaaccctgcggagggacttcaatcacatcaatgtagaactcagccttcttggaaagaaaaaaaagaggctccgggttgacaaatggtggggtaacagaaaggaactggctaccgttcggactatttgtagtcatgtacagaacatgatcaagggtgttacactgggcttccgttacaagatgaggtctgtgtatgctcacttccccatcaacgttatccaggagaatgggtctcttgttgaaatccgaaatttcttgggtgaaaaatatatccgcagggttcggatgagaccacgtgttgcttgttcagtatctcaagcccagaaagatgaattaatccttgaaggaaatgacattgagcttgtttcaaattc

SEQ ID NO: 3133 - DNA, 463 bp, Homo sapiens
cagagaggaggcaatggccaccatggagaacaaggtgatctgcgccctggtcctggtgtccatgctggccctcggcaccctggccgaggcccagacagagacgtgtacagtggccccccgtgaaagacagaattgtggttttcctggtgtcacgccctcccagtgtgcaaataagggctgctgtttcgacgacaccgttcgtggggtcccctggtgcttctatcctaataccatcgacgtccctccagaagaggagtgtgaattttagacacttctgcagggatctgcctgcatcctgacgcggtgccgtccccagcacggtgattagtcccagagctcggctgccacctccaccggacacctcagacacgcttctgcagctgtgcctcggctcacaacacagattgactgctctgactttgactactcaaaattggcctaaaaattaaaagagatcgatatt

SEQ ID NO: 3134 - DNA, 431 bp, Homo sapiens
gggggccaccttgagtgggtggcccagagacagcctcagggctccaaggtaacggggtgctcaggttatcttgggtgctgccctcccaggttctgggggagcagaggctgggcgctggcccaacttacaggaaacactcacctttgaactgccattggcaccatctgggcagtacacagccccacccaggtcctctagttcttgttctcggcttagaatctttgtgtttctgcctgagaagccactgcctcctagtttgtggtctctacagttatagccaggttggacttccggctccgtcctttgataactgtgtgctcttgggcaaatttcttaacttgcaggttcttgtgaggataacatgagttaattgagggcacttaacactacctggcacagattaagctcatctgaagtgggagctgttactt

SEQ ID NO: 3135 - DNA, 297 bp, Homo sapiens
  misc_feature 260, 267, 268, 269, 274, 277, 281, 282, 284, 285: n = A,T,C or G
aattccgttgctgtcgctttcttcttgcacctaaaagtggagactgggtgcaaatgtaagcagtggtggatccagaaatatgaactttgtgtaataagcttcttaaaacagtcctttcttacacctgcccagggccagaccctcggtcttggcctttttcaggagctaggatatctgcgcctggtgaaaatgaaacgaattcctgatttaggaattcagtgtttcctcctcactccagctaagcactcactttttttttnttttttnnnaacanggntatnntnntgcacccaagcc

SEQ ID NO: 3136 - DNA, 520 bp, Homo sapiens
ccgttgctgtcggcagtttggggaagtctggatgggttactataacaacagtaccaaggtggctgtgaaaaccctgaagccaggaactatgtctgtgcaagccttcctggaagaagccaacctcatgaagaccctgcagcatgacaagctcgtgaggctctacgctgtggtcaccagggaggagcccatttacatcatcaccgagtacatggccaagggcagtttgctggatttcctgaagagcgatgaaggtggcaaagtgctgcttccaaagctcattgacttttctgctcagattgcagagggaatggcatacatcgagcggaagaactacattcaccgggacctgcgagcagctaatgttctggtctccgagtcactcatgtgcaaaattgcagattttggccttgctagagtaattgaagataatgagtacacagcaagggaaggtgctaagttccctattaagtggacggctccagaagcaatcaactttggatgtttcactattaagtctgat

SEQ ID NO: 3137 - DNA, 215 bp, Homo sapiens
gcccttagcgtggtcgcggccgaggtaccatgctgacttcttggtatcttttaaggcctaattttcccttccttgagattactgtagtgtgttccagctaatttctatttggaaacgagttggaacagctgaaaactaggtattattgaaggcaaagcagcctcacgtcagttttttatcagctcatttgggaagtttttttttttttttttttt

SEQ ID NO: 3138 - DNA, 472 bp, Homo sapiens
gcccttagcgtggtcgcggccgaggtacctggggtctcagggttgctctgggcctgatcatccactcagatctgtaaggaggatttgcaggatccatttagaaagatcctcccttacttccacaagcatggcctttggctcttaaatacctgtgctggggttttgtaattatagaaacaacaggaaccaaaactcattaatgttgagctacaaaccagagggaagcttctttctcaaaacagggctcaggcctagaaaaatctagttttctgaaatcgctagccagcaacagcactgagatggccatcccagaaacaaggccaacacagaagcacccataaaggctgctggaggttgggacaaagagatccttgctgtccttacagaccccctgacttccaaggagctcccctctcacccagcctggcctgccttctccacagggtagctgatcgtcagcatcatcttcaat

SEQ ID NO: 3139 - DNA, 405 bp, Homo sapiens; identical to SEQ ID NO: 2543

SEQ ID NO: 3140 - DNA, 173 bp, Homo sapiens
aggtaccatgctgacttcttggtatcttttaaggcctaattttcccttccttgagattactgtagtgtgttccagctaatttctatttggaaacgagttggaacagctgaaaactaggtattattgaaggcaaagcagcctcacgtcagttttttatcagctcatttgggaag

SEQ ID NO: 3141 - DNA, 367 bp, Homo sapiens; identical to SEQ ID NO: 428

SEQ ID NO: 3142 - DNA, 322 bp, Homo sapiens
gggtaggcgtgatgtcagcagaagccctgcaggctgggtgggcaggacacgtggtgggggccactgaaaccaggcctaggagggagaacaagttccaaaggtgccgactggaagaagggggtaaaagtttgctttggtgagtgagaaaaggctggggcgtgtgatccatcccctcacgtttcagaacttccaggctttctacctcgactctcaccacagccagcacatacacctaggctgtttttccttcctccacacctgagggacgcagcaacagctaggatctgcattttcaggttccgagcctgacccctggaactga

SEQ ID NO: 3143 - DNA, 521 bp, Homo sapiens
tccaacttgccacccgcgtccctggtacctgagaccaccgacatcctcaggttcctgaccgtggcgcccttctacccagcccagtgtgcggccgccgcgctgtctgcacagctgggggcctctgagcctggtgggcttcctggactcttggcctcactccttgccccctccccacgacacccatgagccgaaaggatgtcactaaggatggctgattccccaagggcacccgctctccctccctccctgctggaggaacacgtcatatcagatgagaggaagatggcctctgatggacagaatttttctcttaactcagcttttgctactttggcaaaaactagcgaggggtagcagaaacctgcaccaaggattgtccctatgtcttggcccctcctagagcgtgtgcagactgatgattttatatgtaaatcaagactcacatccctttcctagtcccccacatccaaagcccctcagcctgccttgcagaccaatgggctccatgttctgtagccccc

SEQ ID NO: 3144 - DNA, 558 bp, Homo sapiens
ggtatcatcagtgagcccctcacaagagcctgcgccgctcccgcccgctctcccactactcttcttttggcagcagtggtggtagtggcggtggcagcatgatgggcggagagtctgctgacaaggccactgcggctgcagccgctgcctccctgttggccaatgggcatgacctggcggcggccatggcggtggacaaaagcaaccctacctcaaagcacaaaagtggtgctgtggccagcctgctgagcaaggcagagcgggccacggagctggcagccgagggacagctgacgctgcagcagtttgcgcagtccacagagatgctgaagcgcgtggtgcaggagcatctcccgctgatgagcgaggcgggtgctggcctgcctgacatggaggctgtggcaggtgccgaagccctcaatggccagtccgacttcccctacctgggcgctttccccatcaacccaggcctcttcattatgaccccggcaggtgtgttcctggccgagagcgcgctgcacatggcgggcctggctgagtaccccatgcagggagagc

SEQ ID NO: 3145 - DNA, 528 bp, Homo sapiens
gaagtttggcgtggtggtggttggtgttggccgagccggctccgtgcggatgagggacttcgcggaatccacacccttcctcagcgttcctgaacctgattggcttcgtgtcgagaagggagctcgggagcattgatggagtccagcagatttctttggaggatgctctttccagccaagaggtggaggtcgcctatatctgcagtgagagctccagccatgaggactacatcaggcagttccttaatgctggcaagcacgtccttgtggaataccccatgacactgtcattggcggccgctcaggaactgtgggagctggctgagcagaaaggaaaagtcttgcacgaggagcatgttgaactcttgatggaggaattcgctttcctgaaaaaagaagtggtggggaaagacctgctgaaagggtcgctcctcttcacagctggcccgttggaagaagagcggtttggcttccctgcattcagcggcatctctcgcctgacctggctggtctccctctttggggagc

SEQ ID NO: 3146 - DNA, 587 bp, Homo sapiens
agggtcagccatgtcatctgagcctcccccacaccacagccccccacccatcaagcttcagtcgggctgctggacacccctcggagccgtgagcgctcaccatcccctctgcgcggcaacgtggtcccaagcccactgcccactcgccggacgaggaccttctcggcgacggtgcgggcttcacagggccccgtctacaaaggagtctgcaaatgcttctgccggtccaagggccatggcttcattaccccagctgatggcggccccgacatcttcctgcacatctctgatgtggaaggggagtatgtcccagtggaaggcgacgaggtcacctataaaatgtgctccatcccacccaagaatgagaagctgcaggccgtggaggtcgtcatcactcacctggcaccaggcaccaagcatgagacctggtctggacatgtcatcagctcctaggagatggtggaagcaccccttgtcctgtgcttgtgggagactttgcggggaggaggcagcagacactggagatgacattcttccacacgagacggggcttcagccgggcatggtccctctcaagtatctcctgg

SEQ ID NO: 3147 - DNA, 314 bp, Homo sapiens
cgcgtccccgctcggcctggccaggccccgcgctatggagttcctctgggcccctctcttgggtctgtgctgcagtctggccgctgctgatcgccacaccgtcttctggaacagttcaaatcccaagttccggaatgaggactacaccatacatgtgcagctgaatgactacgtggacatcatctgtccgcactatgaagatcactctgtggcagacgctgccatggagcagtacatactgtacctggtggagcatgaggagtaccagctgtgccagccccagtccaaggaccaagtccgctggcagtgcaacc

SEQ ID NO: 3148 - DNA, 674 bp, Homo sapiens
tcccgcttctgggagtggggaaagacatcgtctgcgtggggaggaactacgcggaccacgtcagggagatgcgcagcgcggtgttgagcgagcccgtgctgttcctgaagccgtccacggcctacgcgcccgagggctcgcccatcctcatgcccgcgtacactcgcaacctgcaccacgagctggagctgggcgtggtgatgggcaagcgctgccgcgcagtccccgaggctgcggccatggactacgtgggcggctatgccctgtgcctggatatgaccgcccgggacgtgcaggacgagtgcaagaagaaggggctgccctggactctggcgaagagcttcacggcgtcctgcccggtcagcgcgttcgtgcccaaggagaagatccctgaccctcacaagctgaagctctggctcaaggtcaacggcgaactcagacaggagggtgagacatcctccatgattttttccatcccctacatcatcagctatgtttctaagatcataaccttggaagaaggagatattatcttgactgggacgccaaagggagttggaccggttaaagaaaacgatgagatcgaggctggcatacacgggctggtcagtatgacatttaaagtggaaaagccagaatattgagttatttcttaacaagtttcgagagagaag

SEQ ID NO: 3149 - DNA, 566 bp, Homo sapiens
ccaagtggctcctacaaagcggcattgtcatcctccttccacatggctacgatggggctgggccagaccactcatcctgtcgaatagagcgtttcctgcagatgtgtgacagtgcggaagagggggtggacggagacactgtgaacatgtttgtggttcacccaacaactcctgcacagtatttccacttgcttaggagacagatggtccggaacttcagaaaaccactcattgttgcttcccctaagatgttactcaggctcccggcagccgtgtcaactcttcaagaaatggcaccaggaacaacatttaacccggtcattggtgattcatctgtggatccaaaaaaggttaagaccctcgtgttctgctccggcaaacatttctactccctggtgaaacaaagagaatctctgggggccaagaagcatgactttgccatcatccgagtagaggaactctgccccttcccgttggattctttacagcaagagatgagcaaatacaaacatgttaaagatcatatttggagtcaggaggaacctcagaacatgggtccgtggtcg

SEQ ID NO: 3150 - DNA, 455 bp, Homo sapiens
gtcggtccgcgccatcaggcccgagatagcggcgaggtccgctttcagtgtatggttttccctgccaaacggttctgcttggtgccatccatggagggcgtgcgctgggccttttcctgcggcacttggctgccgagccgagccgaatggctgctggcagtgcgatcgattcagcccgaggagaaggagcgcattggccagttcgtctttgcccgggacgctaaggcagccatggctggtcgtctgatgataaggaaattagttgcagagaaattgaatatcccttggaatcatattcgtttgcaaagaactgcaaaaggaaaaccagttcttgcaaaggactcatcgaatccttacccgaatttcaactttaacatctctcatcaaggagactatgcagtgcttgctgctgaacctgagctgcaagttggaattgatataatgaagactagttt

SEQ ID NO: 3151 - DNA, 409 bp, Homo sapiens
ttccgttgctgtcgaagtaatctcttttttaaaactttttgaagctacttattttcagccaaataggaatattagagagggactggtagtgagaatatcagctctgtttggatggtggaaggtctcattttattgagatttttaagatacatgcaaaggtttggaaatagaacctctaggcaccctcctcagtgtgggtgggctgagagttaaagacagtgtggctgcagtagcatagaggcgcctagaaattccacttgcaccgtagggcatgctgataccatcccaatagctgttgcccattgacctctagtggtgagtttctagaatactggtccattcatgagatattcaagattcaagagtattctcacttctgggttatcagcataaactggaatgtagtgtc

SEQ ID NO: 3152 - DNA, 559 bp, Homo sapiens
atttgtggaccacgtgtttactttcaccattttggataataggatatggtttcggaactttcagatcatagaagaagatgctgctcttgtagaaataggacctcgttttgtcttaaatctcataaagattttccagggaagtgggggaggaccaactttatatgaaaatcctcactaccagtcaccaaacatgcatcggcgtgtcataagatccatcacagctgcaaaatacagagagaaacagcaagtgaaagatgtgcaaaaactgagaaagaaagagccgaagactcttcttccacatgatcccactgcagatgtttttgtaacaccagctgaggagaaaccaatagaaatacagtgggtaaaaccagagccaaaagttgatttgaaagcaagaaagaaacggatttacaaaaggcaaagaaaaatgaaacagaggatggacagtgggaaaacaaataagtcaatggaaacctgatttgtttttcagttactttatatttattttggattcaatgtgtaaatacttttattatctaatactatcttacgtctaatt

SEQ ID NO: 3153 - DNA, 494 bp, Homo sapiens
gctgtcggactggtattcccactagagtaattaatcataaactgggtagagtcggtagaatttgacagtgcaattgacctatccttgaagagttctccatagacatagtctgtcttgcaggattcatgagaattctttctggcccctttgtccaaaagtggaatggaaaaatgctcaatatccacccatccttgctgccttcttttaagggtcaaatgcccatgagcaagccctggaaaccggagtcacagttactgggtgcactgtacactttgtagctgaagatgtggatgctggacagattattttgcaagaagctgttcccgtgaagaggggtgatactgtcgcaactctttctgaaagagtaaaattagcagaacataaaatatttcctgcagcccttcagctggtggccagtggaactgtacagcttggagaaaatggcaagatctgttgggttaaagaggaatgaagccttttaattcagaaatggg

SEQ ID NO: 3154 - DNA, 547 bp, Homo sapiens
attcggcacgagctaagttaatgctttttctcaaggaaaaaaatgtacagtttttgtaaacctaataaacatcaaaagcagtggattattttcatccccccatttcttaatttctttttcacagcagtggaatgcaaagtgcttgattgctttgaattttgtgactcggatgcaaatactggtaatatttcagttctgtgaatttgcaagtaatatttcagagaagttaagaggtgattggtgagtcctttgatgagcatgtccttggaattcattttttcttttatcttcataaaggatttgttttattagcatctccaattcccctgagataaattactcatgcataaagtggtttttgagagcacttaaagttcatttcagtattaatttacagcatatttaatcagtggggactgttaccacctccacaacagaaatcatgccctcgagttaccccactgcgcccagtttagaggactagtagatgctaacatactagggaatggtcattgccacagttaaaaatcggcagttaagtaaatgt

SEQ ID NO: 3155 - DNA, 514 bp, Homo sapiens
ttccgttgctgtcggtttggctaataatcattccttaacctagaattcagatgatcctggaattaaggcaggtcagaggactgtaatgatagaattaaattagtgtcactaaaaactgtcccaaagtgctgcttcctaataggaattcattaacctaaaacaagatgttactattatatcgatagactatgaatgctatttctagaaaaagtctagtgccaaatttgtcttattaaataaaaacaatgtaggagcagcttttcttctagtttgatgtcatttaagaattactaacacagtggcagtgttagatgaagatgctgtctacaaggtagataatatactgtttgatactcaaaacatttttcattttgtttaaagtagaagttacataattctatattttaagtcttgggtaaaaaagtagttttacattttataaagtaaagatgtaaatgattcaggtttaaagctctatttgacttcctttttttgtttgagatagcgtcttgct

SEQ ID NO: 3156 - DNA, 417 bp, Homo sapiens
tgcgtgccaccacgcccagctaaattttgtatttttagtggagacggggtttcaccatgttggccaggatggtctcaatctcctgaccctgcgatctgcccacctcagcctcccaaagtgctgggattacaggcgtaagccaccgggcctggcctgttttatgattcttaatagttacttggtttaaatcacatttgatactatccttctgaaaagtctgagacagatctacaaactacagtcaaaattatagattaagaggaatgaatgcacctatttggctttaagttgaagatgaattatttctcatgctcattttcttgcggcagttatcttagaaagacccccaaaggctttgtgattgtaagcactgtcatgatcacagaatgcaagcttctggtaccatgatcctcaact

SEQ ID NO: 3157 - DNA, 562 bp, Homo sapiens; identical to SEQ ID NO: 2525

SEQ ID NO: 3158 - DNA, 598 bp, Homo sapiens
agctgcagcccaatgaggaggccgactacctcggcgtgcgtatccagctgcggagggagcagggtgcgggggccaccggcttcctcgaatggtgggtcatcgagctgcaggagtgccggaccgactgcaacctgctgcccatggtcattttcagtgacaaggtcagcccaccgagcctcggcttcctggctggctacgggtgagtgagtggctgggggggcaccccgcagctcggggggctccgggcggccccaggactcaccagcttcccccgcagcatcatggggctgtacgtgtccatcgtgctggtcatcggcaagtttgtgcgcggattcttcagcgagatctcgcactccattatgttcgaggagctgccgtgcgtggaccgcatcctcaagctctgccaggacatcttcctggtgcgggagactcgggagctggagctggaggaggagttgtacgccaagctcatcttcctctaccgctcaccggagaccatgatcaagtggactcgtgagaaggagtaggagctgctgctggcgcccgagagggaaggagccggcctgctgggcagcgtggccacaaggggcggcactcc

SEQ ID NO: 3159 - DNA, 220 bp, Homo sapiens
gggactggttgggccagggatgaatatttgagggataaaaattgtgtaagagccaaagaattggtagtagggggagaacagagaggagctgggctatgggaaatgatttgaataatggagctgggaatatggctggatatctggtactaaaaaagggtctttaagaacctacttcctaatctcttccccaatccaaaccatagctgtctgtccagtgctc

SEQ ID NO: 3160 - DNA, 549 bp, Homo sapiens
atgccgccctacccgtggtctatttcccagttcgaggccgctgcgcggccctgcgcatgctgctggcagatcagggccagagctggaaggaggaggtggtgaccgtggagacgtggcaggagggctcactcaaagcctcctgcctatacgggcagctccccaagttccaggacggagacctcaccctgtaccagtccaataccatcctgcgtcacctgggccgcacccttgggctctatgggaaggaccagcaggaggcagccctggtggacatggtgaatgacggcgtggaggacctccgctgcaaatacatctccctcatctacaccaactatgaggcgggcaaggatgactatgtgaaggcactgcccgggcaactgaagccttttgagaccctgctgtcccagaaccagggaggcaagaccttcattgtgggagaccagatctccttcgctgactacaacctgctggacttgctgctgatccatgaggtcctagcccctggctgcctggatgcgttccccctgctctcagcatatgtggggcgcc

SEQ ID NO: 3161 - DNA, 504 bp, Homo sapiens
tccttgccgggtcagccctgacaaaggtcagctagccccttgaggacatcagctttggcctcagggtcctaatggcagcagaaccactgacagagctagaggagtccattgagaccgtggtcaccaccttcttcacctttgcaaggcaggagggccggaaggatagcctcagcgtcaacgagttcaaagagctggttacccagcagttgccccatctgctcaaggatgtgggctctcttgatgagaagatgaagagcttggatgtgaatcaggactcggagctcaagttcaatgagtactggagattgattggggagctggccaaggaaatcaggaagaagaaagacctgaagatcaggaagaagtaaagccgcctggctgagatggggtgggcagggcagagctgatcagggccgagcagaaccgcactcttcccaaataaagcttcctccttgaaacaaaaaaaaagcctctagaactatagtgagtcgtattacgtagatc

SEQ ID NO: 3162 - DNA, 408 bp, Homo sapiens
ggcacgaggggcgctccgctggcttcttggacaattgcgccatgtgtgctgctcggctagcggcggcggcggcccagtcggtgtatgccttctcggcgcgcccgctggccggcggggagcctgtgagcctgggctccctgcggggcaaggtactacttatcgagaatgtggcgtccctctgaggcaccacggtccgggactacacccagatgaacgagctgcagcggcgcctcggaccccggggcctggtggtgctcggcttcccgtgcaaccagtttgggcatcaggagaacgccaagaacgaagagattctgaattccctcaagtacgtccggcctggtggtgggttcgagcccaacttcatgctcttcgagaagtgcgaggtgaacggtgcgggggcgcaccctc

SEQ ID NO: 3163 - DNA, 552 bp, Homo sapiens
ataccagaaattcctgatgacctgaagcaactttataaaactgtgtgggaaatctctcagaaaactgttctcaagatggcagctgagagaggtgctttcattgatcaaagccaatctttgaacatccacattgctgagcctaactatggcaaactcactagtatgcacttctacggctggaagcagggtttgaagactgggatgtattatttaaggacgagaccagcagctaatccaatccagttcactctaaataaggagaagctaaaagataaagaaaaggtatcaaaagaggaagaagagaaggagaggaacacagcagccatggtgtgctctttggagaatagagatgaatgtctgatgtgtggatcctgaggaaagacttggaagagaccagcatgtcttcagtagccaaactacttcttgagcatagataggtatagtgggtttgcttgaggtggtaaggctttgctggaccctgttgcaggcaaaaggagtaattgatttaaagtactgttaatgatgttaatgatttttttttaaactcatata

SEQ ID NO: 3164 - DNA, 456 bp, Homo sapiens
gaggccctcacttcatccggcgactagcaccgcgtccggcagcgccagccctacactcgcccgcgccatggcctctgtctccgagctcgcctgcatctactcggccctcattctgcacgacgatgaggtgacagtcacggaggataagatcaatgccctcattaaagcagccggtgtaaatgttgagcctttttggcctggcttgtttgcaaaggccctggccaacgtcaacattgggagcctcatctgcaatgtaggggccggaggacctgctccagcagctggtgctgcaccagcaggaggtcctgccccctgcactgctgctgctccagttgaggagaagaaagtggaagcatagaaagaagaatccgacgagtctgatgatgacatgggctatggtctttttgactaaacctcttttataacatgttcaataaaaagctgaactttaaaaag

SEQ ID NO: 3165 - DNA, 569 bp, Homo sapiens
ctggcggctggtgcccaagcgacgaggaggaggccttcaccgcgttcacgccggcgccggaagacagcctggcctccgtgccgtacccgcctctcctccgggccatgattatcgcagaacgacagaaaaatggagacacaagcaccgaggagcccatgctgaatgtgcagaggatacgcatggaaccctgggattaccctgcaaaacaggaagacaaaggaagggccaagggcacccccgtctagaatgccagaaccagcgggtggccttaggggctgtgaggcagtggggaccttattgatgaaagaaaccgtctttgcgttacacccgagtctgcctctcggagcagggagctcaccttccgcgacgtgttctgagggtctgcatcttaagggggagggctggggcaaatcgccacctgtgcctttcctctggccctgctgcccccacacccaactccgagggcccacgctggggaaagcgggaagcgctcgctccctttcccccattagtgctctctctgcctggatcccggcagaagctatgaaagggaataaagagaaaagaag

SEQ ID NO: 3166 - DNA, 532 bp, Homo sapiens
cgtggtaactcacgtagtgctccacctacacgagggcccccgccatcttatggtggaagcagtcgctatgatgattacagcagctcacgtgacggatatggtggaagtcgagacagttactcaagcagccgaagtgatctctactcaagtggtcgtgatcgggttggcagacaagaaagagggcttcccccttctatggaaagggggtaccctcctccacgtgattcctacagcagttcaagccgcggagcaccaagaggtggtggccgtggaggaagccgatctgatagagggggaggcagaagcagatactagaaacaaacaaaactttggaccaaaatcccagttcaaagaaacaaaaagtggaaactattctatcataactacccaaggactactaaaaggaaaaattgtgttactttttttaaattccctgttaagttcccctccataatttttatgttcttgtgaggaaaaaagtaaaacatgtttaattttatttgactttcgcattgcttttcaacaagcaaat

SEQ ID NO: 3167 - DNA, 544 bp, Homo sapiens
ttccgttgctgtcgctaagaaacactaatcctaggttattgctagccaaaatatttttgtcctgagtagtgtcactgggccaaaagatagatcaggacgacagcctttagttttcctgaaatcaccaggtcaggcacaaggagaaaaggttcctggatactgactaacttgggtgggtctagccaggagaaagacagtaacatgtgttctgtactttctgggaagatccctgaagccatcacagaggctccccaacttctgagtcgcccatctgttgctgtgggagtgtgaacggatcgctgaaggagagggagctttgctctctctaggtgggcaagtttcctgggctctctgtgttgcctccctctggcttcttcctcccgtgccctctccccgtgtgccccagggggatcagggatcctcaccctcctgaggcccagtggggaagaatgaacatggcttcatccaggttaactgatgctgccatttgcccagccttttccatcccagccctgtcagtgagcccaggtctggtgcaactgct

SEQ ID NO: 3168 - DNA, 484 bp, Homo sapiens
ttccgttgctgtcggatgaagcagagccatgactcaggacgcccataatgccttgagaagagtaattgagaaattcacagaaaataccacattctgcctcatttgtaactatctgtcaaagatcatccctgccttgcagtcccgctgcacgaggtttacgttcggtcccctgactcctgaactcatggatccccgcctggaacatgtcgtgcaagaagagaaagttgatataagtgaagatggaatgaacgcacttgtcactctttccagtggagacatgcgtagggctctgaacattttgcagagcaccaatatggtctttgagaaggtgacagaggagactgtctacacctgcaccgagcacccgttcaagtcagacattgccaacatactggactggatgttgaatcaagatttcaccacaccctacagaaatattacagagttgaaaactctgaaggggttggcactgcatgatatcctg

SEQ ID NO: 3169 - DNA, 506 bp, Homo sapiens
cgttgctgtcggggggcaagggagaagctgctggtcggactcacaatgaaaacgctccttcttttgctgctggtgctcctggagctgggagaggcccaaggatcccttcacagatggaatacttcggcactatctccattggctccccaccacagaacttcactgtcatcttcgacactggctcctccaacctctgggtcccctctgtgtactgcactagcccagcctgcagtggaaggactaaccgtggttggccagcagtttggagaaagtgtcacagagccaggccagacctttgtggatgcagagtttgatggaattctgggcctgggatacccctccttggctgtgggaggagtgactccagtatttgacaacatgatggctcagaacctggtggacttgccgatgttttctgtctacatgagcagtaacccagaaggtggtgcggggagcgagctgatttttggaggctacgaccactcccatttctctgggagcctgaa

SEQ ID NO: 3170 - DNA, 535 bp, Homo sapiens
cgttgctgtcgggcttgggcagcaacccctgcattcctttttttttaccgggctgacgagaatgatgaggtgaaaatcactgtcatctaaaagccggctactgtcagcaaagcctgaagaagtggggctggataccctgcccccaccatatccctaccatcccttctcagacaaccctttacccttacagtagcaagcatagacccctgtctaacgggggtagacaggtgcagatgaggtgaagatcactgtcatctaaaagctggccactaaattaaaaaaaaattaaaagttatgggattaaaaaaagttatgggataaaaaaggttatgggtaacttatggtataaaagttatgaaaaaaggccaggtgcagtggctcacgcctgtaatcccagcacttttgggaggctgaggttgggagttcaagaccagcctggtcaacatggtgaaactgtgtctctactaaaaatacaaaaattagccaggcatggtggcacgtgcctgtaatcccagctactcgggaggctgaggca

SEQ ID NO: 3171 - DNA, 606 bp, Homo sapiens
ttccgttgctgtcggtggtttatgcttaaatgtacattttcctgctggtaaaaggagaaactgagaggtgtcctgcagaccggctgaccactccttttggagacggcaggaggcctgagcgatccgtactcagaacgtccaggagagacgcatggcccgaagtcaaagtgctggaattttccaaaacagcctgttctctcctctctcctccccagagcaccccctgccatcaggggggttgaaatccctctcccccaggagccctgctgctttgcttggtggtagggcaggagagcaaacaaacagtcatggtctaaaacccacatagcactttgctcttagttacatgtaaaattttagatttctaaaacaggtgggcaatcattttgaatactgttctgtgaccctgactgctagttctgaggacactggtggctgtgctatgtgtggccatcctccatgtcccgtccctgtagctgctctgtttagacagcggacagacgctcacgcccaggggatgtcctcacgctgtcgccgcgcggtttcccttcgcagatgtgtatactcatgataggtcagaaagtgtatccgctacaataaagttct

SEQ ID NO: 3172 - DNA, 400 bp, Homo sapiens
cgttgctgtcgtcccttgttggagggaatagagtgggggtgggactctgcaggggtgtccttgtccactcgcacccctcgccgcccaccagggccatgctctgtgacttgggctgatccccaccctttctgggcctacagcaccacaggccgctgtacccccttagagctgcccctctctggcctggccggcagacgtcttcttaactcctctgtcctctatattcagcatgttccttgtcagctgctgggccggccctgccttgcgctagcagagcctctcctggcagcttctcaggtctccctaatggagacaccaggctactaggacactggctggggccaccccctcctgcctaatgcctcaccttacagctggggaaactgaggcctggaatggc

SEQ ID NO: 3173 - DNA, 618 bp, Homo sapiens
ccgttgctgtcggaacgcggagagcacgccatgaaggcctcgggcacgctacgagagtacaaggtagtgggtcgctgcctgcccacccccaaatgccacacgccgcccctctaccgcatgcgaatctttgcgcctaatcatgtcgtcgccaagtcccgcttctggtactttgtatctcagttaaagaagatgaagaagtcttcaggggagattgtctactgtgggcaggtgtttgagaagtcccccctgcgggtgaagaacttcgggatctggctgcgctatgactcccggagcggcacccacaacatgtaccgggaataccgggacctgaccaccgcaggcgctgtcacccagtgctaccgagacatgggtgcccggcaccgcgcccgagcccactccattcagatcatgaaggtggaggagatcgcggccagcaagtgccgccggccggctgtcaagcagttccacgactccaagatcaagttcccgctgccccaccgggtcctgcgccgtcagcacaagccacgcttcaccaccaagaggcccaacaccttcttctaggtgcagggccctcgtccgggtgtgccccaaataaactcaggaacgccccggtgaaaa

SEQ ID NO: 3174 - DNA, 480 bp, Homo sapiens
acccaggttcttctgtcagaccctgtgacctgcgagctgctactactgtaaggagggaaatggatgaatctggctcgttttaaaatcacgttttctgacgaatcctttgccccttcacctttaccccgcccgcacccctaggccctctcagccttcctatcatcccacgtgtctacccagacccttgtgcggcccatgccctgggggcggcgtcctgtccctgagctgggaggcggctttggatggtccgggcgtcaagagcaggggtgggccggggaggggtcctttgcggtgagctatgtttacatgacacagtgtgccaaagtgacttactgcggttgcgttagtttctagtcatcaggactatctcaccctcccactcctgtttttaaaactcagaattctttcctaagagcccttcgagcaaagcgtgccgaagttagttgtcttctctgtgctggtcctttcttatgtcctcat

SEQ ID NO: 3175 - DNA, 528 bp, Homo sapiens
taacattgcagcaaagagggatgttcctgccctggacaggtactgggaacaggtgcttgccttgctatggccacggtttgaactgatcctggagatgaatgttcagagcgtccgaagcactgacccccagcgcctaggggggttggatactcggccccactatatcacacgccgctatgcagagttctcctccgctcttgtcagtatcaaccagacaattcctaatgaacggaccatgcaattgctgggacagctgcaggtggaggtggagaattttgtcctccgagtggcagctgagttctcctcaaggaaggagcagcttgtgtttctgatcaacaactatgacatgatgctgggtgtgctgatggagcgggctgcagatgacagcaaagaggttgagagcttccagcagctgctcaatgctcggacacaggaattcattgaagagttgctgtctcccccttttgggggtttagtggcatttgtgaaggaggctgaggctttgattgagcgtggacaggctgagcg

SEQ ID NO: 3176 - DNA, 459 bp, Homo sapiens
gccaaggcccgagggggtgggcgtggcggccgccgaaacacaaccccctctgttccctctcttcgcggagcggcgccgcgtagcttccatccgccagctgccatgagcgagcgcctccgtcccagtcttcaggcagtgacagtggtgggagcagcagcagcagcagcagcagcatcaatagcccggacagggccagcgggccggaaggcagcttgagccagaccatggccggatccagccctaacacgcctcagcccgtgcccgagcagtccgcgctgtgccaaggcctctacttccacatcaaccagaccctgagggaggcccacttccacagcctacagcaccgagggcggcctctgacatgatgtgccggcagtttcttgccttctgtgaagggacagcgctgtgcagatttgatatttcaacttacaacttgttttaaaagaaaaattgcacacg

SEQ ID NO: 3177 - DNA, 281 bp, Homo sapiens
tcggggcaatcgtgggggcaatgtaggaggcaagagaaaggcagatgggtacaaccagcctgattccaagcgtcgtcagaccaacaaccaacagaactggggttcccaacccatcgctcagcagccgcttcagcaaggtggtgactattctggtaactatggttacaataatgacaaccaggaattttatcaggatacttatgggcaacagtggaagtagacaagtaagggcttgaaaatgatactggcaagatacgattggctctagatctacattcttc

SEQ ID NO: 3178 - DNA, 514 bp, Homo sapiens
tcggtgttgaggcccctggacaagctgcccggcctgaacacggccaccatcttgctggtgggcacggaggatgctcttctgcagcagctggcggactcgatgctcaaagaggactgcgcctccgagctgaaggtccacttggcaaagtccctccctttgccctccagtgtgaatcggccccgaattgacctgatcgtgtttgtggttaatcttcacagcaaatacagtctccagaacacagaggagtccctgcgccatgtggatgccagcttcttcttggggaaggtgtgtttcctcgccacaggtgctgggcgggagagccactgcagcattcaccggcacaccgtggtgaagctggcccacacctatcaaagccccctgctctactgtgacctggaggtggaaggctttagggccaccatggcgcagcgcctggtgcgcgtgctgcagatctgtgctggccacgtgcccggtgtctcagctctgaacctgctgtccctgctgagaagctctg

SEQ ID NO: 3179 - DNA, 564 bp, Homo sapiens
ccagcaggtccctttgccggcccctacggctggggtggcccctcctgtcctcagggatcagactcccagactggttagttctgcatgtttccatcaaattaaaggttattccctggccgcctcctggagaaaaccaaccccaccctgccagctgggggcaatggggcagggattttggcctctcagaacagctcctagaggctgctcatgactgaatgttttcccaaatcacctaaatatcggtttgctttttgttttgggggagaggatttagcctcttacttccctgatggattcaaagttttatctatctccttatctcctgccctgtcttggcacaactctggatagattgcaggtgtggaatttgctggagtttggtgacttcgtcaaattcctttggattctgttccgccaaatcagcagtctcgtcctgtggatgcagtgactggaatttcccatctgcaaagcatctctgtagcccagattttgtggagccttaagacactccctcaatgccaccctgaccccacggctggagaaccctgtgcttatgtggtgggc

SEQ ID NO: 3180 - DNA, 604 bp, Homo sapiens
ttcatcagccgtccagtaaagcaacccaggaaactgactgggtctctttgcctaccgtattaacattaaacattgatgttctgtattctgtactttactgcacccagcagactttcaacaactcattgatccaaagatacatgcacagtctgagcaccagctatggtgctcataacttctttaagacttgaaccctttcaatctgtgtgattcattaaattggaccattgatgataagaatacacattgtatgtttctgtgcacatgacagtgtgtgtgtgtgcacgtacatactgtatagtcttaaaaatagcattatactggccaggggtggtggctaacgcctgtaatcccagcactttgggaggccgaggcgggtggatcaactgtggtcaggagtttgagatcagccaggccaacctggtgaaaccccgtctctactaaaaatacaaaaattagctgggcgtgatggtgggcgcctgtaatcccagctacttgggaggctgaggcaggagaatcacttgaacccgggaggcggaggttgcagtgagccgagatcgcaccattgcactccagtctgggcaacagagtgagattccgtctc

SEQ ID NO: 3181 - DNA, 475 bp, Homo sapiens
gtcgcgtatgtttacattttttattttttccatagggtacttattctcaatttttttggtctcagattcactcttaaaatgaagaccccaaaggtttcttttatttctattattagatatattaaaaattaaagctttagccaggtatagtggcgtgcacctgtagtcccagctattcaagaggctgaggtggggctgggcatggtggcttacacctgtaatcccagcactttgggaggccaaggcaggtggatcacttgaagtcaggattttgagaccaccctggccaacgtggtgaaaccccatctctactaaaaaaattaaaaagtagccaggcatggtggcatgtacctgtagccccagttactcaggaggctgaggcaggaaaatcacttgaacctgggaggcagaggttgcagtgagcccagatcactccactgcactccagcctgggcgacaaagtgagacttgtctc

SEQ ID NO: 3182 - DNA, 658 bp, Homo sapiens
  misc_feature 2, 3, 5, 11, 13, 15, 16, 18, 20, 23, 25, 64, 414, 526, 608: n = A,T,C or G
gnngntttttntncnngngnttnangagatgtttaaaaaaattgttgcatgtttttgatgcagnttgggaaattgtttacttcacaatgtaaaggttcataaaaaaattcatgaaaatactgaacatatgtttgaggatttttcttttcctttttaaatttttttattttttctgagacggagatctgctcttacgcccaggctagagtgaagtggcgcgatcttggcttactgcaacctccaccccccaggttcaagcgattctcctgcctcagcctccggagtagctgggattacaggcgcccgccaccacgtccggctaatttttgtattttcagtagagacggggttttgctatgttggccaggctggtctcaaactcctgacctcaagtgatccacctgcctcggcctnccaaagtgttaggataacaggtgtgagccaccgtgcccggctgaagatttttcttaattgcaataaatattcagcattttttctaatgaaaatgaatttgtttaccagtaanaagtatgcatttttaaaagacttttcagatttatgctttttacgtgaagctgctaaactaaaagtaaatggaagaaaccaantctaagtagggttttttctttttttttgtggggggtgggatgggggaggc

SEQ ID NO: 3183 - DNA, 452 bp, Homo sapiens
tgtcctttgtgaatgatcttacagtcactcaggatgggaggaagatttatttcaccgattctagcagcaaatggcaaagacgagactacctgcttctggtgatggagggcacagatgacgggcgcctgctggagtatgatactgtgaccagggaagtaaaagttttattggaccagctgcggttcccgaatggagtccagctgtctcctgcagaagactttgtcctggtggcagaaacaaccatggccaggatacgaagagtctacgtttctggcctgatgaagggcggggctgatctgtttgtggagaacatgcctggatttccagacaacatccggcccagcagctctggggggtactgggtgggcatgtcgaccatccgccctaaccctgggtttttcatgctggatttcttatctgagagaccctggattaaaaggatgatttttaag

SEQ ID NO: 3184 - DNA, 463 bp, Homo sapiens
tccgttgctgtcgagtaaatgattttatcatcaaggcagcagctgttacccttaaacaaatgccagatgttaatgtaagctgggatggagagggcccaaagcaactgccatttattgacatttcagtggctgtggcaacagataaaggcttacttactccaatcataaaagatgctgctgctaaaggtatccaggaaattgctgactctgtaaaggctctatcaaagaaagcaagagatggaaaattgttgcctgaagaataccaaggaggatcttttagtatttccaacttggggatgtttggcatcgacgaatttactgcagtgattaaccctcctcaggcctgcattttggcggttgggaggttccgacctgtgctgaagctcactgaggatgaagagggaaatgccaaactgcagcagcgccagctcataacagtcacaatgtcaagtgacagtcgagt

SEQ ID NO: 3185 - DNA, 532 bp, Homo sapiens
attccgttgctgtcgaagaattcgcggccgcgaattcttccggaagccgcggttcctaccaaccgttcttattgctggcggcctgaggagcccatcatggcgacgccccctaagcggcgggcggtggaggccacgggggagaaagtgctgcgctacgagaccttcatcagtgacgtgctgcagcgggacttgcgaaaggtgctggaccatcgagacaaggtatatgagcagctggccaaataccttcaactgagaaatgtcattgagcgactccaggaagctaagcactcggagttatatatgcaggtggatttgggctgtaacttcttcgttgacacagtggtgtgagtgtctacccgcccctctgagcccacagggttcagcttaccccttccctcatgcaacttatatttttttgagtatcttctatgtaccaggcactatgcgaggttttatatcccagtaggatataagctaggtgctggggatgtgacagtgaataaaataggacaaaatccctgccttcccagag

SEQ ID NO: 3186 - DNA, 551 bp, Homo sapiens
cagccgttggcagatacgcctgtgcagggtggggtatggagaatcaagtggcaccctttccaccaccacctgctcctggccgcctgcatgcacagtggctttaagatcctcaactgccaaaaggcaatggaggagaggcaggaggcgacggtcctgacatctcacacattgcccgactcgctggtgtatggagccgactggtcctggctgctcttccgttctctgcagcgggccccctcgtggtcctttcctagcaacctaggaaccaagacggcagacctgaagggtgcaagcgagttgccaacaccctgtcatgaatgcagagaggataacgatggggagggccatgccagaccccagagtggaatgaagccactcacagagggcatgaggaagaatggcacctggctgcaggctacagcagccaccacacgtgactgtggcgtgaacccagaagaagcagactcagccttcagcctcctggccacctgctccttctatgaccatgcgctccacctctgggagtgggaggggaactgagcttgaaatca

SEQ ID NO: 3187 - DNA, 518 bp, Homo sapiens
ttccgttgctgtcggtataatcatatcgtcggaggttaagattatgaaattttagaatctctattcaagatgatgttcactccaaatacactacagaatttagtcaacattttatataatgtttcaataaatgtttctttcaataaagatactatgtgcccttcatagtaataaaatctcaatcttaaagcatgaatctaaaacataaatatttatattacagactcaattttacaaaattactaattgctctagtgcatatttgaactacaagcaactttttaggaatacctctttatacgtctacatattttagtatataaaaatagataatgctcttggacacattttgtattattcatgatctgaatagtagttagttaaaagatcatttgtaatattatgatcaactgttataaattaaggtcttaataccttttctgctctttcaaataactctaatgaatattcaagatattttagccttttaaaaagttgagatttagctcatggatata

SEQ ID NO: 3188 - DNA, 539 bp, Homo sapiens
gtcgcaaaaaaattggataaaaccaccatcatgggttcgggtcccatagaccccaaagaacttctcaagggcctggacagcttccttaaccgagatggggaagtcaaaagtgtggatgggatttccaagatcttcagtttgatgaaggaagcacgaaagatggtgagtcgatgcacttacttgaacattctcctgcagacccgttcaccagaaatattggtcaaatttattgacgttggcggctacaaacttcttaacaattggctgacgtattcaaagacaaccaacaacattcccctcctccagcaaattctactgaccctgcagcatctaccgctcactgtagaccatctcaagcagaacaacacagctaaactggtgaagcagctgagcaagtcaagtgaggatgaagagctccggaaattggcctcagtccttgtcagcgactggatggctgtcatccgctctcagagcagtacccagcctgctgagaaagataagaagaaacgtaaagatgaaggaaaaagtcgaactaccct

SEQ ID NO: 3189 - DNA, 436 bp, Homo sapiens
gtggtcatggctgccagagcgctctgcatgctggggctggtcctggccttgctgtcctccagctctgctgaggagtacgtgggcctgtctgcaaaccagtgtgccgtgccagccaaggacagggtggactgcggctacccccatgtcacccccaaggagtgcaacaaccggggctgctgctttgactccaggatccctggagtgccttggtgtttcaagcccctgcaggaagcagaatgcaccttctgaggcacctccagctgcccccggccgggggatgcgaggctcggagcacccttgcccggctgtgattgctgccaggcactgttcatctcagcttttctgtccctttgctcccggcaagcgcttctgctgaaagttcatatctggagcctgatgtcttaacgaataaaggtcccatgctccacccgaggac

SEQ ID NO: 3190 - DNA, 524 bp, Homo sapiens
caagctctctccaacggcacgtggactccctttaatccagtgactgtcaggtcgatcatatccatgtttgaccgtgagaacaaggccggcgtgaacttcagcgagttcacgggtgtgtggaagtacatcacggactggcagaacgtcttccgcacgtacgaccgggacaactccgggatgatcgataagaacgagctgaagcaggccctctcaggtttcggctaccggctctctgaccagttccacgacatcctcattcgaaagtttgacaggcagggacgggggcagatcgccttcgacgacttcatccagggctgcatcgtcctgcagaggttgacggatatattcagacgttacgacacggatcaggacggctggattcaggtgtcgtacgaacagtacctgtccatggtcttcagtatcgtatgaccctggcctctcgtgaagagcagcacaacatggaaagagccaaaatgtcacagttcctatctgtgagggaatggagcacaggtgcagttagatgc

SEQ ID NO: 3191 - DNA, 367 bp, Homo sapiens
cgccgcgggaccggggccgctggggtctggacgggggtcgccatgatccgctttatcctcatccagaaccgggcaggcaagacgcgcctggccaagtggtacatgcagtttgatgatgatgagaaacagaagctgatcgaggaggtgcatgccgtggtcaccgtccgagacgccaaacacaccaactttgtggagttccggaactttaagatcatttaccgccgctatgctggcctctacttctgcatctgtgtggatgtcaatgacaacaacctggcttacctggaggccattcacaacttcgtggaggtcttaaacgaatatttccacaatgtctgtgaactggacctggtgttcaacttctaca

SEQ ID NO: 3192 - DNA, 572 bp, Homo sapiens
tgttttagttttgcagaagacactgttgtagtttagaaggcttttcataaatcccctcataggcaaagatgaaaacttcccactatttttttcccctcttaggaagacatactggaaagaaaatgtttagcatcttagtgtagtatagctattgtaaacagttcatgactagattttgattcggaaatctatactgaccaaggattaatcttaaggattgtataattcattaaagctgtggtctttccatgtggagactgatagaaaataattttgtcccaagtcttatttgctgactttttctgtcatgagtgagattgttgaacaaactgaatatatgggctatagcaagtagctttacagtacagatcttacaattaagttttgcttttgttaaagtgtgtaccattttttctgtttggagtaagacaaaaattgttttgacataggttccctagggtacacttgctctagcatactttaaaggccactgttgcaaagtctacattttatgctgaatctgcattctgtcaggcacccgtagaaagacctcagtacatgctttgcactct

SEQ ID NO: 3193 - DNA, 570 bp, Homo sapiens
tcttaaggagctttccgacttcctccgagtccagcagtccctgggcaccaggaaggaactgcagaaggagctccaggagcgtctttctcaggaatgcccgatcaaggaggtggtgctttatgtcaaagaagaaatgaagaggaatgatcttccagaaacagcagtgattggtcttctgtggacatgtataatgaacgctgttgagtggaacaagaaggaagaacttgttgcagagcaggctctgaagcacctgaagcaatatgctcccctgctggccgtgttcagctcccaaggccagtcagagctgatcctcctccagaaggttcaggaatactgctacgacaacatccatttcatgaaagcctttcagaagattgtggttctcttttataaagctgatgttctgagcgaagaagcaatactgaaatggtataaggaagcacatgttgctaaaggcaaaagtgtttttcttgaccagatgaagaaatttgttgagtggttacaaaatgcagaagaagaatccgaatcggaaggtgaggaaaattaaatggctcaacaagcacaatacct

SEQ ID NO: 3194 - DNA, 530 bp, Homo sapiens
cgttgctgtcgcttttttatgttttttaattaatcagtcacttgtaaaagcaaacaagcggtccatccccttttcaaggtcacttttttgatggtaccgaagatcccatggacattaagggacagctaactgtggccagactcagccccatgtccttggccaggcccaaggagaggactcggccccatggggtgtgccagtcttgcagtccgccccagctgagtagcgtgagccagatgaccccacagagacccgcctcttccctgaacgcgggtcggtgtggagtcagtgactgctgactcagggagctccttggccccgtgggcactgtgccagggctggggccttctgctgctgccacacccagctcaggcctgggccagcccctgcccccagcccactgagggggtgggcttactccctgggcagtcttgggggccagagctgaggccagtccatattacagtggctgggctgtttttttcaggagcccctagcattggctgggattcctgttcctgggtgcgcct

SEQ ID NO: 3195 - DNA, 256 bp, Homo sapiens; identical to SEQ ID NO: 463

SEQ ID NO: 3196 - DNA, 343 bp, Homo sapiens
cgcggccgcaggagttttttttttttttttttttaaaaacccaaaaattttttttttaaattcccgggttttaattggaaatcccccttctttaggggccccccttgaaattaaaaatttcttaaaaaggcccttcaaaccccaaaaaaaggggggaaccgggccccatttgggggtttggaaggcttttgccccttcaaaatatttttggaaagggggcccccttttaaggttttttttggaaaagtttttttttccgcccttttttttaaaggttttttttgaccaagggggggttttttttccccccctggggggggggggaccaaaactttttttaaaa

SEQ ID NO: 3197 - DNA, 614 bp, Homo sapiens
ccgttgctgtcgcaatgctgcaccaccacctgtgacttaccagggaaacttatacaggccgcttttgagaggacaagcccagattccaaaacttatgtcaaatatgaggccccaggattcctggcgaggtcctcctccccttttccagcagcaaaggtttgacagaggcgttggggctgaacctctgctcccatggaaccggatgctgcaaacccagaatgcagccttccagccaaaccagtaccagatgctagctgggcctggtgggtatccacccagacgagatgatcgtggagggagacagggatatcccagagaaggaaggaaataccctttgccaccaccctcaggaagatacaattggaattaagcttttgtaaagctttcccaaatcctttcatcattctacagttttatgctatttgtggaaagatttctttctcaagtagtagtttttaataaaactacagtactttgtgtatttcttttaactgtgtatatttctactgatctgatctcactgtttatgttgctttccaaagatgtatgttgcataatacagtggatctgaatttattattgcttataaaacacatttgatggaataggagtac

SEQ ID NO: 3198 - DNA, 519 bp, Homo sapiens
gtcgacaagtcaaagctttcagatctctctggcccagtgatatctttggcagttgtgaagatgaccctgtacagacactgttacatatatatttccatcatcagacgctgggccagacaggaagctttgcagttataggctctaacctggacatgtcagaagccaactacaaactgatggaacttaatctggaaataagagagtctctacgcatggtgcaatcataccaacttctagcacaggccaaaccaatgggaaatatggtgagcactggattctgagacacttcaggcctttaggaaagaaactaaactgaagatgatgaagaatattaaccaagcaccttttatggacccttgcattcactgataactttctggcagcatctactttttagtgtaactaatgtcaaactgtatcatcaaaaacaaagatctgaaagaaaaaaacatctgatattttaacagctgccaatatctcccacaataactgcgtgaagaaagaattttttaattactt

SEQ ID NO: 3199 - DNA, 709 bp, Homo sapiens
  misc_feature 34, 503, 508, 519, 616, 631, 678, 680, 684: n = A,T,C or G
ggcacgagaaaaagcaagccaaaaggaatgctgntttttaaatttcttgccaaatttagtaatatttctccagagaaccacatttctttaacaaatgtagtaggacattctttaggatgtacttggcattccttgaggaattctcctggtgaaaagatcaacttactgaaaagaagcctccttagtattccaaatacagattacatccagctgcttagtgaaattgccaaggaacaaggttttaatataacatatttggatatagatgaactgagcgccaatggacaatatcaatgtcttgctgaactgtccaccagccccatcacagtctgtcatggctccggtatctcctgtggcaatgcacaaagtgatgcagctcacaatgctttgcagtatttaaagataatagcagaaagaaagtaaatctggagcaacttaaaaaatctttcagtagcacataaaaagttcccctctggccccttcccaagtaaaacttttaccgnagtgnttatgtcttgnttctaaatctcttcatagattccatcaacactccagatttaattatctcctcatagttggtattaagctctttttaatggcttcaactttgtatcantatactggatttatnaactttgtacccacaaggagagaagtgtagcacccattttacagtgncntgcncatcaagagaaagaaactgcatgtt

SEQ ID NO: 3200 - DNA, 450 bp, Homo sapiens
  misc_feature 4, 7, 8, 10, 11, 36, 56, 104, 120, 123, 137, 287, 296, 311,326, 404, 405, 406, 407, 410, 412, 414, 423, 431, 436, 437,442: n = A,T,C or G
gttnccnntnngtgaaactcactgtaaaaccctacngaaaacccttgagcccatcnattcgtttttttttttttttttttgcctctgccctgatcatcattttnctcaaggaaccaccantanacagaaagaaacanaaaaacattaaacacagtgggaatatcacttttgatgagattgtcaacattgctcgacagatgcgggaccgatccttagccagagaactctctggaaccattaaagagatcctggggactgcccagtcagcgggctgtaatggtgatggncgccatccncatgacatcatcgangacatcaacaggggngctggggaatgcccagccaggtaagcacaaaggaaaacatttcaataaaggatcatttgacaactggtgaaaaaaaannnnaanananaatgggganaggcaatnaaaanngcctngccctcta

SEQ ID NO: 3201 - DNA, 540 bp, Homo sapiens
ggcctcgcgcccaccttgctgttcagcctgctggctggcccccaaaagattgcagccaaatgtggtctcatccttgcctgccccaaaggattcaaatgctgtggtgacagctgctgccaggagaacgagctcttccctggccccgtgaggatcttcgtcatcatcttcctggtcatcctgtccgtcttttgcatctgtggcctggctaagtgcttctgtcgcaactgcagagagccggagccagacagcccagtggattgccgggggcccctggaactgccctccatcatccccccagagagggtcagagtatccctttctgcgcccccacccccctacagtgaggtgattctgaagcccagcctgggcccaactcccacagagccaccccctccctacagcttcaggcctgaagaatataccggggatcagaggggcattgacaacccggccttctgagtcacctcctgcctggaatcttgccatcagcaacctcctccccagtgcctcctggatcaagctagagactgctggcacccc

SEQ ID NO: 3202 - DNA, 749 bp, Homo sapiens
  misc_feature 1, 2, 7, 17, 35, 38, 40, 49, 52, 54, 62, 81, 106, 107, 121,154, 155, 162, 163, 645, 675: n = A,T,C or G
nntctanaatacaaacnacctactcgttctgcagngancnatcccatcnatncnaattccgnaccagagaaatcgcaagcngtatatgtaacagtaatatctgctnnaaatacagaatcanctacttttatacaacttaacaggcaaacatgtnnttttggnnttgttgtttggaaattagcattgggaaaagctatataacagaggaaattccaagtaaaatcaaacagtgttcactcttaactctaaacacagtgctcccactactggttctgcattgaggcggaggggaaggccagaggcaggcttagcttcgggcggcagcggtctggggctgctcggactggagctgcttgccaaggtattcccagttgtgcaccatgagcttctgcacggccagcagagcattatagcggacctgctggtcttcatgatgcatgtggttcatgaccagctgcttcccaccgagctgctcgatgacccgtttgcctcgtggataatgccgcacatattctccaacatcgtgagcagcaacagctaagacttggggatcatctgacacttccaaaagttttgtcaagattttcaagagttcataattcttctcatttaacctcacagcattctctcttcaaaatttctcanatttgtgcacaggactccattccaaccttncagatttaagttctgaactgtattcatcaaatgaactaaggtcctggacactctctccaagttttttcaaaaag

SEQ ID NO: 3203 - DNA, 609 bp, Homo sapiens
ccatgctgggtcttggtgccagtgactttgaatttggagtagatcccagtgctgatcctgagctggccttggcccttcgtgtatctatggaagagcagcggcagcggcaggaggaggaggcccggcgggcagctgcagcttctgctgctgaggccgggattgctacgactgggactgaagactcagacgatgccctgctgaagatgaccatcagccagcaagagtttggccgcactgggcttcctgacctaagcagtatgactgaggaagagcagattgcttatgccatgcagatgtccctgcagggagcagagtttggccaggcggaatcagcagacattgatgccagctcagctatggacacatctgagccagccaaggaggaggatgattacgacgtgatgcaggaccccgagttccttcagagtgtcctagagaacctcccaggtgtggatcccaacaatgaagccattcgaaatgctatgggctccctggcctcccaggccaccaaggacggcaagaaggacaagaaggaggaagaccagaagtgagactggagggaaagggtagctgagtctgcttaggggactgcatgggaagcacggatat

SEQ ID NO: 3204 - DNA, 536 bp, Homo sapiens
ctacgcaagcagtttggagcccaggccaatgtcatcgggccctggatccagaccaagatggaggagatcgggaggatctccattgagatgcatgggaccctggaggaccagctcagccacctgcggcagtatgagaagagcatcgtcaactacaagccaaagattgatcagctggagggcgaccaccagctcatccaggaggcgctcatcttcgacaacaagcacaccaactacaccatggagcacatccgtgtgggctgggagcagctgctcaccaccatcgccaggaccatcaatgaggtagagaaccagatcctgacccgggatgccaagggcatcagccaggagcagatgaatgagttccgggcctccttcaaccactttgaccgggatcactccggcacactgggtcccgaggagttcaaagcctgcctcatcagcttgggttatgatattggcaacgacccccagggagaagcagaatttgcccgcatcatgagcattgtggaccccaaccgcctgggggtagtgacatt

SEQ ID NO: 3205 - DNA, 559 bp, Homo sapiens
cagaacgtgccaactctatgggcctgtttctgcagaaaacaaacatcatccgtgactatctggaagaccagcaaggaggaagagagttctggcctcaagaggtttggagcaggtatgttaagaagttaggggattttgctaagccggagaatattgacttggccgtgcagtgcctgaatgaacttataaccaatgcactgcaccacatcccagatgtcatcacctacctttcgagactcagaaaccagagtgtgtttaacttctgtgctattccacaggtgatggccattgccactttggctgcctgttataataaccagcaggtgttcaaaggggcagtgaagattcggaaagggcaagcagtgaccctcatgatggatgccaccaatatgccagctgtcaaagccatcatatatcagtatatggaagagatttatcatagaatccccgactcagacccatcttctagcaaaacaaggcagatcatctccaccatccggacgcagaatcttcccaactgtcagctgatttcccgaagccactactcccccatctacct

SEQ ID NO: 3206 - DNA, 529 bp, Homo sapiens
gctttaaggaagcagcggagaagtttcgaatggaatctggaatcgaacctagtgtggatctggaaacacttgatgaacgaatcaagatccgggagatgatactgaaaggtcagattcaggaggccatcgccttgatcaacagcctccacccagagctcttggacacaaaccggtatctttacttccatttgcagcaacagcatttgatcgagctgatccgccagcgggagacagaggcggcgctggagtttgcacagactcagctggcggagcagggcgaggagagccgagagtgcctcacagagatggagcgtaccctggcactgctggcctttgacagtcccgaggagtcgcccttcggagacctcctccacaccatgcagaggcagaaggtgtggagtgaagttaaccaagctgtgctagattatgaaaatcgcgagtcaacacccaaactggcaaaattactgaaactactactttgggctcagaacgagctggaccagaagaaagtaaaatattccaaaatgac

SEQ ID NO: 3207 - DNA, 546 bp, Homo sapiens
  misc_feature 457: n = A,T,C or G
ttttatttcctgattttaaaaatcgtcaccatcatagacctcctggcttctcttgtatctgtgttctaatggctcccagcagtgccttcacacagcccctttattccccttcttgtgcctgcccatgagcctgagtgtgacagatcaattagctttgtccctccaaactgtgggagcaggactagactcttctggcaggcagagagctcctcctcggccagtgttcgagcctggtccaccactcctcagttcttcttgctcttggcttttgtggccttggcatccagcgtgctctgggcatgagtgaggtgcttcacagcatcaagcacaaggactccaggcagcaccagccacagggcattcatgaagacaaagtaaaaccagaagtagagagggtggcccagctctccgtgctggaatccgtcgcggtgctctgtcaggaagtagagcacatccncatagatctggcccacagagaccacaagctgtagaatgaagcggaggggatgctggcggagaaaggcgatcaccacccacaggctgagt

SEQ ID NO: 3208 - DNA, 421 bp, Homo sapiens
tggcagccatctccttctcggcatcatggccgccctcagaccccttgtgaagcccaagatcgtcaaaaagagaaccaagaagttcatccggcaccagtcagaccgatatgtcaaaattaagcgtaactggcggaaacccagaggcattgacaacagggttcgtagaagattcaagggccagatcttgatgcccaacattggttatggaagcaacaaaaaaacaaagcacatgctgcccagtggcttccggaagttcctggtccacaacgtcaaggagctggaagtgctgctgatgtgcaacaaatcttactgtgccgagatcgctcacaatgtttcctccaagaaccgcaaagccatcgtggaaagagctgcccaactggccatcagagtcaccaaccccaatgccaggctgcgcagtgaa

SEQ ID NO: 3209 - DNA, 512 bp, Homo sapiens
tgcaataatccagaatggctactctgatctatgttgataaggaaaatggagaaccaggcacccgtgtggttgctaaggatgggctgaagctggggtctggaccttcaatcaaagccttagatgggagatctcaagtttcaacaccacgttttggcaaaacgttcgatgccccaccagccttacctaaagctactagaaaggctttgggaactgtcaacagagctacagaaaagtctgtaaagaccaagggacccctcaaacaaaaacagccaagcttttctgccaaaaagatgactgagaagactgttaaagcaaaaagctctgttcctgcctcagatgatgcctatccagaaatagaaaaattctttcccttcaatcctctagactttgagagttttgacctgcctgaagagcaccagattgcgcacctccccttgagtggagtgcctctcatgatccttgacgaggagagagagcttgaaaagctgtttcagctgggccccccttcacct

SEQ ID NO: 3210 - DNA, 505 bp, Homo sapiens
  misc_feature 40, 47: n = A,T,C or G
tctgacagctggtgcgcctgcccgggaacatcctcctggnttttttnatggcttgtggtctggtcgccagcaacctgaatctcaaacctggagagtgccttcgagtgcgaggcgaggtggctcctgacgctaagagcttcgtgctgaacctgggcaaagacagcaacaacctgtgcctgcacttcaaccctcgcttcaacgcccacggcgacgccaacaccatcgtgtgcaacagcaaggacggcggggcctgggggaccgagcagcgggaggctgtctttcccttccagcctggaagtgttgcagaggtgtgcatcaccttcgaccaggccaacctgaccgtcaagctgccagatggatacgaattcaagttccccaaccgcctcaacctggaggccatcaactacatggcagctgacggtgacttcaagatcaaatgtgtggcctttgactgaaatcagccagcccatggcccccaataaaggcagctgcctctgctcctctg

SEQ ID NO: 3211 - DNA, 249 bp, Homo sapiens
tagattgacaagaaagagcccacctgaatgaccttgaaaatattattccatttcttggaattggcatcctgtattccttgagtggtcccgacccctctacagccatcctgcacttcagactatttgtcggagcacggatctaccacaccattgcatatttgacaccccttccccagccaaatagagctttgagtttttttgttggatatggagttactctttccatggcttacaggttgctgaaaagta

SEQ ID NO: 3212 - DNA, 573 bp, Homo sapiens
ttccgttgctgtcgcgtcgctcaaatgtagcaccgtcgtctgcgtgatctgcttggagaagcccaaataccgctgtccagcctgccgcgtgccctactgctcggtagtctgcttccggaagcacaaagaacagtgcaaccctgaaactcgtcctgttgagaaaaaaataagatcagctcttcctaccaaaaccgtaaagcctgtggaaaacaaagatgatgatgactctatagctgattttctcaatagtgatgaggaagaagacagagtttctttgcagaatttaaagaatttaggggaatctgcaacattaagaagcttattgctcaatccacacctcaggcagttgatggtcaacctcgatcagggagaagacaaagcaaagctcatgagagcttacatgcaagagcctttgtttgtggagtttgcagactgctgtttaggaattgtggagccatcccagaatgaggagtcttaagatggattattgtgctgcttgctcaagcgtgtgcttgactcctggaacctgcctgctccctctcccagaccagctagtttggggctggggagctc

SEQ ID NO: 3213 - DNA, 354 bp, Homo sapiens
gctgtcgggtttctgtagaggaatgtcttccaggtgggagaacaatggctttcatttttaacaaccacacactataaacaaagcatcccgagagcacgggtacctagcagaagaagaacgaagtagccaggaaacaagttgcttttcagcatccccactgaaatgatagggtactttataaagcgggtggtggcattctttccacaagtacagcaagtgtcactgtggggtcttaattctctcgaatctgcctttagaaggcagaaggcagaatgatcagctctgctctgaatgtgtttgccatttgattgacgtcggaaacatgatgtcacttctgcaaacacccacgtgaga

SEQ ID NO: 3214 - DNA, 523 bp, Homo sapiens
agtgggagccagcgaagccacgctgctgaacatgctcaacatctcccccttctcctttgggctggtcatccagcaggtgttcgacaatggcagcatctacaaccctgaagtgcttgatatcacagaggaaactctgcattctcgcttcctggagggtgtccgcaatgttgccagtgtctgtctgcagattggctacccaactgttgcatcagtaccccattctatcatcaacgggtacaaacgagtcctggccttgtctgtggagacggattacaccttcccacttgctgaaaaggtcaaggccttcttggctgatccatctgcctttgtggctgctgcccctgtggctgctgccaccacagctgctcctgctgctgctgcagccccagctaaggttgaagccaaggaagagtcggaggagtcggacgaggatatgggatttggtctctttgactaatcaccaaaaagcaaccaacttagccagttttatttgcaaaacaaggaaataaaggcttacttcttt

SEQ ID NO: 3215 - DNA, 539 bp, Homo sapiens
ttccgttgctgtcgggactacaaaggcatttcttcctgcaatgacgaagaataaccatggccatattgtcactgtggcttcggcagctggacatgtctcggtccccttcttactggcttactgttcaagcaagtttgctgctgttggatttcataaaactttgacagatgaactggctgccttacaaataactggagtcaaaacaacatgtctgtgtcctaatttcgtaaacactggcttcatcaaaaatccaagtacaagtttgggacccactctggaacctgaggaagtggtaaacaggctgatgcatgggattctgactgagcagaagatgatttttattccatcttctatagcttttttaacaacattggaaaggatccttcctgagcgtttcctggcagttttaaaacgaaaaatcagtgttaagtttgatgcagttattggatataaaatgaaagcgcaataagcacctagttttctgaaaactgatttaccaggtttaggttgatgtcatctaatagtgccagaattttaat

SEQ ID NO: 3216 - DNA, 471 bp, Homo sapiens
attccgttgctgtcgagaaactaaagatttttttaggagactatattcaagcttgtatcattagttcatcagacgtttatggaccacccaccgtccgtgcactcacggggcttgcagtctatctggctgaatcactttggcagccagtgtgaggagggcacagaaaggagaccaggtgagaaagccagcctgaccaaagaagatgtggcaactgatgggattggaggaggcggacaatgtcctccagacagctggactggctctctatatatttatttatctcttctacacctccagcccccaccttcacactcactaactggactcaactagtgggggcaaaggacagactagattttagtgaaatggaatttctacctccagcggcccctggaacagtagcacacaacgatctaacaactgcttgtatgattggatggtgtaagtgcggacagaattagggaatttggg

SEQ ID NO: 3217 - DNA, 531 bp, Homo sapiens
cgttgctgtcgaaaggatcaggatgatggtagaacggagatctgggtttcagagctttcccatttaagaaaaatagatcttgagattctgattcttttccaaacagtcccctgctttcatgtacagctttttctttaccttacccaaaattctggccttgaagcagttttcctctatggctttgcctttctgattttctcagaggctcgagtctttaatataaccccaaatgaaagaaccaaggggaggggtgggatggcacttttttttgttggtcttgttttgttttgttttttggttggttggttcgttattttttaagattagccattctctgctgctatttccctacataatgtcaatttttaaccataattttgacatgattgagatgtacttgaggcttttttgttttaattgagaaaagactttgcaattttttttttaggatgagcctctcctagacttgacctagaatattacatattcctccagtaatactgaagagcaaaagagaggcaggattggggt

SEQ ID NO: 3218 - DNA, 499 bp, Homo sapiens
ttccgttgctgtcgggtgaggcggcccgaaatcgtaggacttccgaaagcagcggtggcgtttgcttcactgcttggaagtgtgagtgcgcgaagatgcgaaaggtggttttgatcaccggggctagcagtggcattggcctggccctctgtaagcggctgctggcggaagatgatgagcttcatctgtgtttggcgtgcaggaacatgagcaaggcagaagctgtctgtgctgctctgctggcctctcaccccactgctgaggtcaccattgtccaggtggatgtcagcaacctgcagtcggtcttccgggcctccaaggaacttaagcaaaggtttcagagattagactgtatatatctaaatgctgggatcatgcctaatccacaactaaatatcaaagcacttttctttggcctcttttcaagaaaagtgattcatatgttctccacagctgaaggcctgctgacccagggtgataagatcactgctgatggact

SEQ ID NO: 3219 - DNA, 400 bp, Homo sapiens
gctgtcggtgaggctctggcctgcactcgcgccgccatggacgctgcgagtcgaattcctcccgagaaggactggttaccattatccccaacttcagtctggacaagatctacctcatcgggggggacctggggccttttaaccctggtttacccgtggaagtgcccctgtggctggcgattaacctgaaacaaagacagaaatgtcgcctgctccctccagagtggatggatgtagaaaagttggagaagatgagggatcatgaacgaaaggaagaaacttttaccccaatgcccagcccttactacatggaacttacgaagctcctggtaaatcatgcttcagacaacatcccgaaggcagacgaaatccggaccctggtcaaggatatgtgggacac

SEQ ID NO: 3220 - DNA, 660 bp, Homo sapiens
attccgttgctgtcgagcctctcccgcgcacgttgcctggcctccagcacctacttggtcccgcgcgctccctcgtgtcgcccctcggagcagcagccgccgcggtcgccgctacccggaaagaagtcagagacgccgcgaggtcgccgccaccgccatgcccaagaataaaggtaaaggaggtaaaaacagacgcaggggtaagaatgagaatgaatctgaaaaaagagaactggtattcaaagaggatggtcaggagtatgctcaggtaatcaaaatgttgggaaatggacggctagaagcaatgtgtttcgatggtgtaaagaggttatgtcacatcagaggaaaattgagaaaaaaggtttggataaatacctcggacattattttggttggtctccgagactaccaggataacaaagctgatgtaattttaaaatacaatgcagacgaagctagaagtctgaaggcatacggcgagcttccagagcatgctaaaatcaatgaaactgatacatttggtcctggagatgatgatgaaattcagtttgatgacattggagatgatgatgaagatattgatgacatctaaattgaactcaacattttacattccatcttttctgaagattgtcctacaatttggattttgatcatgac

SEQ ID NO: 3221 - DNA, 533 bp, Homo sapiens
tccaaaaagtccaaaccaaaggacagcgataaagaaggaacttcaaattccacctctgaagatgggccaggggatggattcaccattctgtcttctaagagccttgttctgggacagaagctgtccttaacccagagtgacatcagccatattggctccatgagagtggagggcattgtccacccaaccacagccgaaattgacctcaaagaagatatagccgccgtcagccaatccagtggactcgcagccaaatttgtcatccactgtcacatccctcagtggggctccgacaaatgtgaagaacagcttgaagagaccatcaaaaactgcctgtcagcggcggaggacaagaagctaaagtccgtcgcgttcccgcctttccccagcggcagaaactgctttcccaaacagactgcggcccaggtgaccctcaaagccatctcagcccactttgatgactcgagcgcgtcctcgctgaagaacgtgtacttcctgctcttcgacagcgagagcatcggcatctacgtgca

SEQ ID NO: 3222 - DNA, 542 bp, Homo sapiens
ttggcatctgcccctcctcaagagcaaaagcaaatgttgggtgaacggctgtttcctcttattcaagccatgcaccctactcttgctggtaaaatcactggcatgttgttggagattgataattcagaacttcttcatatgctcgagtctccagagtcactccgttctaaggttgatgaagctgtagctgtactacaagcccaccaagctaaagaggctgcccagaaagcagttaacagtgccaccggtgttccaactgtttaaaattgatcagggaccatgaaaagaaacttgtgcttcaccgaagaaaaatatctaaacatcgaaaaacttaaatattatggaaaaaaaacattgcaaaatataaaataaataaaaaaaggaaaggaaactttgaaccttatgtaccgagcaaatgccaggtctagcaaacataatgctagtcctagattacttattgatttaaaaacaaaaaaacacaaaaaaatagtaaaatataaaaacaaattaatgttttatagaccctgggaaaaagaattttc

SEQ ID NO: 3223 - DNA, 582 bp, Homo sapiens
ctccctcccgcctcagtggatcatgcccagggcggcagcggcggcggttgcgggggggaagtgactgggcggtgccggcgccggagacgatgccgtttccagttacaacacagggatcacaacaaacacaaccgccacagaagcactatggcattacttctcctatcagcttagcagcccccaaggagactgactgcgtacttacacagaaactaattgagacattgaaaccctttggggtttttgaagaggaagaggaactgcagcgcaggattttaattttgggaaaactaaataacctggtaaaagagtggatacgagaaatcagtgaaagcaagaatcttccacaatctgtaattgaaaatgttggaggaaaaatttttacatttggatcttacagattaggagtgcatacaaaaggtgctgatattgatgcgttgtgtgttgcaccaagacatgttgatcgaagtgactttttcacctcattctatgataagttgaaattacaggaagaagtaaaagatttaagagctgttgaagaggcattcgtaccagttattaaactctgttttgatgggatag

SEQ ID NO: 3224 - DNA, 436 bp, Homo sapiens
agtccttcctttccgacttagtcctcgggaagaagtttcagactacaaggtatcattggaacatttcaagatcatcaaatcaaattccacagggattggtgaccaaccagaaggctcagacatctgattgctgacctgtccagacatcatctggtctccctgaacctgaaatcacaccatggatgattttgagcgtcgcagagaacttataaggcaaaagagggaggagatgcgactcgaagcagaaagaatcgcctaccagaggaatgacgatgatgaagaggaggcagcccgggaacggcgccgtcgagcccgacaggaacagctgcggcagaagcatgaggaagaatccttgggacaggtgaccgaccaggtggaggtgaatgcccacaacagtgtgcctgacgaggaggccaagacaaccaccacaaacact

SEQ ID NO: 3225 - DNA, 291 bp, Homo sapiens
attccgttgctgtcgcgaaatcaagcctttggtcaagctgctggaggacatgccacagatctttggtgagcaggtgtctcggaagcagttttttgctgcaagtgccgggctacagcgagaacctggagctcatggtgcgcctggcacgtgcagaagccataacagcacggaagtccagcgtgcttgtgtgcctggtggaaactgaggagcaggatgcatattattcagaggtcctgtgttttctgcaggataagaagatgttcaagtctgttgtcaagtttgggccctgga

SEQ ID NO: 3226 - DNA, 477 bp, Homo sapiens
cttagactgaaatgctaggtatatgtattggcttcagtgtatgacccttcattgttaagctatgaaagtaaaactctgtatttaactggcaatgaggaaaaaaaaattttgtagagaagtgttggtctgtatagttctttatattaagtgggattcattgtaatgcctctgcatttattctgttgcctcagctgttacttgaagatggcgtaatatataatttatcctgtggtatcagtgataaaaatgatacctttctgtaggaggggtttatcataatatgctgcttcttgaaggcttgcacttccagaattgtgtttccttctgctgtgccattcatatatatatacatatatatatataatcttgaccagtcctggtcatttgctcccctccttgtctgtggaccatgataagcccaagtagtgacttcagagctgggtaacagaaattaaagtgaaaagacctttacgtgga

SEQ ID NO: 3227 - DNA, 53 bp, Homo sapiens
tactattgatcctgtctttcttttgcaaaaaatgggagtatgcaaacttgaga

SEQ ID NO: 3228 - DNA, 414 bp, Homo sapiens
cacacggcttctcctcccgcctgggcaagcgggtctctgacatcctccgatacctatttcccgtgcccaaagatgacagccaccggggcatcaccttcgcagaccaagacgactacctatcattccggcaccatgtgtctaagatgacagaccaccgcaacgtggagctcactgacgtcgggccccgctttgagctgaagctgtacatgatccgtctgggcacgctggagcaggaggccacatcagacgtggagtggcgctggcacccttacaccaataccgaacgcaagagagtcttcctgagcaccgagtgagcacactcaccactcagctcagacatggacttggaactcatgatggggctgtcatagacagacccaccagtaggaactgtcacagaatggcctgctgaac

SEQ ID NO: 3229 - DNA, 671 bp, Homo sapiens
tgtggttccgggcagcggtcattgccgtgcccattgctggagggctgattttagtgttgcttattatgttggccctgaggatgcttcgaagtgaaaataagaggctgcaggatcagcggcaacagatgctctcccgtttgcactacagctttcacggacaccattccaaaaaggggcaggttgcaaagttagacttggaatgcatggtgccggtcagtgggcacgagaactgctgtctgacctgtgataaaatgagacaagcagacctcagcaacgataagatcctctcgcttgttcactggggcatgtacagtgggcacgggaagctggaattcgtatgacggagtcttatctgaactacacttactgaacagcttgaaggccttttgagttctgctggacaggagcactttatctgaagacaaactcatttaatcatctttgagagacaaaatgacctctgcaaacagaatcttggatatttcttctgaaggattatttgcacagacttaaatacagttaaatgtgttatttgcttttaaaattataaaaagcaaagagaagactttgtacacactgtcaccagggttatttgcatccaagggagctggaattgagtacctaaataaacaaaaatgtgccctatgtaagcttctacatcttgatttatt

SEQ ID NO: 3230 - DNA, 320 bp, Homo sapiens
tccgttgctgtcggtggagggccgcccgaaggcactctcggacattaacccgcattctggtgggtctagaggaaattgggggacgaagagtggcagcactgacctggtctgggacgtggggagaagggtgcgctacctgggtttcaggtgggagggcgttcggtcgggcctccagggggatagcgggggtgcttgagtcgcgggtgctgagtcgggagtgctgagtgagttgcgggtgctgagttgaggctgtgccctttcccactataatacgccaagcgtgcgttctgccgttccctccgacacgcgcgacgccacct

SEQ ID NO: 3231 - DNA, 542 bp, Homo sapiens
tccgttgctgtcgagcccctgtttgggaatttgagattctgtgtcatgctggttttcctttcagaattgcttgaaatcgagttctcttagccactggacacctagttttcaggagaatgtcccaagattgtttatatatacaaaatggcaaaagtactgtttttcgaattgataattcaagcaaaggcttctctttactgtcactgatttttttttgtttttattttgtttccttgtttctatttccttgaagctttgaagggaggagaagcagaaaattttgtttatgtttgttaaaaatcagaactacttaatgctttttgccacagcatatttccttgcctgttggagccgttaggaagattacctatgtcctaatcttcaacctgagaagatttttgactcttgtgtctactgttgattgtttgcttgagttctcaaagacctgtggccaggtattttaaaaagtcgtctatttctttctagttgcatcaacttgcacactggtgtctaactatatgtggtattcggaacttgtaatt

SEQ ID NO: 3232 - DNA, 550 bp, Homo sapiens; identical to SEQ ID NO: 495

SEQ ID NO: 3233 - DNA, 572 bp, Homo sapiens
  misc_feature 427: n = A,T,C or G
ccttataagctgagggagtggagaggcccggggccaggaaagcagagacagacaaagcgttaggagaagaagagaggcagggaagacaagccaggcacgatggccaccttcccaccagcaaccagcgccccccagcagcccccaggcccggaggacgaggactccagcctggatgaatctgacctctatagcctggcccattcctacctcggaggtggaggccggaaaggtcgcaccaagagagaagctgctgccaacaccaaccgccccagccctggcgggcacgagaggaaactggtgaccaagctgcagaattcagagaggaagaagcgaggggcacggcgctgagacagagctggagatgaggccagaccatggacactacacccagcaatagagacgggactgcggaggaaggaggacccangacaggatccaggccggcttgccacaccccccacccctaggacttattcccgctgactgagtctctgaggggctaccaggaaagcgcctccaaccctagcaaaagtgcaagatggggagtgagaggctgggaatggaggggcaga

SEQ ID NO: 3234 - DNA, 509 bp, Homo sapiens
  misc_feature 311: n = A,T,C or G
ggtctcaaggcttcaaacagcgcagataaatgcaggcaagaaaagatgccgccgttgctgccgtcaccgcctcctgggtcgtccgccacgggttgcactgccgtggcagacagctggacttgagcagagggaacgacctgacttacttgcactgtgatcccccttgctccgcccactgtgaccttgaaccccatgcactgtgacctccccccttctcccccttcccactgtgattggcacatcgacaagggctgtcccaagtcaatggaaagggaaagggtgggggttaggggaaggttggggggacccancaaggactcagagagtcagacagtgccacttggccacttggggtaaagccagtgccagcaataacagtttatcatgctcattaatttgggatttcaaaacacaaatgaaaactcacacccacccacccccaagtgcatgtctccatcacttaaaaagtaagttccatttgaaaatatcctttcaaatggactacctct

SEQ ID NO: 3235 - DNA, 653 bp, Homo sapiens
tccggggagtcagccaggagcttggggaagggaagcgcgcccccggggccggtcccggagggctcgatccgcatctacagcatgaggttctgcccgtttgctgagaggacgcgtctagtcctgaaggccaagggaatcaggcatgaagtcatcaatatcaacctgaaaaataagcctgagtggttctttaagaaaaatccctttggtctggtgccagttctggaaaacagtcagggtcagctgatctacgagtctgccatcacctgtgagtacctggatgaagcatacccagggaagaagctgttgccggatgacccctatgagaaagcttgccagaagatgatcttagagttgttttctaaggtgccatccttggtaggaagctttattagaagccaaaataaagaagactatgctggcctaaaagaagaatttcgtaaagaatttaccaagctagaggttctgactaataagaagacgaccttctttggtggcaattctatctctatgattgattacctcatctggccctggtttgaacggctggaagcaatgaagttaaatgagtgtgtagaccacactccaaaactgaaactgtggatggcagccatgaagaaagatcccacagtctcagccctgcttactagtgagaa

SEQ ID NO: 3236 - DNA, 586 bp, Homo sapiens
  misc_feature 522: n = A,T,C or G
caatttgttctgcttagtcattacttttaattcttttcttactaaaattttatggtggttgggggaagggagttagcatcactaacctgacagttgttgccaggaatttgctttgtttactgctagtatattagaaatcctagatctcagaatcacaatagtaataaacaacaggggtcattttttcctaacttactctgtgttcaggtgtggaatttctgtctcccaagaggaaatgtgacttcactttggtgccaatggacagaaaattctacctgtgctacataggagaagtttggaatgcacttaatagctggtttttacaccttgatttcgaggtggaaagaaattgatcatgaatctctaataaatttaaatctcttaaaccagtaggtgcttaatattttttgatttgattaatgcccatttaaatctcatgggttctattaaaaatatatatatatagggccccaatccattgccatcaaattgcccttggacttttccaaggtatattacggngttttatgcaaaattccaagctaccatgtaactttttttaaccatttaacaaggagggggaact

SEQ ID NO: 3237 - DNA, 130 bp, Homo sapiens
ttccgttgctgtcggtcttgaactcctgacctcgtgatccacccgccttggctccccaaagtgctggattacagacatgagccactgtactcagccaaagtctttttatataggaatacttttttttttt

SEQ ID NO: 3238 - DNA, 385 bp, Homo sapiens
gggaaagatgccaccaatgtgggggatgaaggcgggtttgctcccaacatcctggagaataaagaaggcctggagctgctgaagactgctattgggaaagctggctacactgataaggtggtcatcggcatggacgtagcggcctccgagttcttcaggtctgggaagtatgacctggacttcaagtctcccgatgaccccagcaggtacatctcgcctgaccagctggctgacctgtacaagtccttcatcaaggactacccagtggtgtctatcgaagatccctttgaccaggatgactggggagcttggcagaagttcacagccagtgcaggaatccaggtagtgggggatgatctcacagtgaccaacccaaagaggatcg

SEQ ID NO: 3239 - DNA, 560 bp, Homo sapiens
ccgttgctgtcgcttctggttatctgaagactgtcctgaaggaagacataagtgttgtgattagtagaagctttctggtagaccatatttcttctggattgtaataaaattgttagtagctccttttactttgttcctgtctctggaaagccatttttgaattgctgattactttggctttaatcagtggtcacctagaaaaagctttgtaatcataacacaatgagtaattcttgataaaagttcagatacaaaaggagcactgtaaaactggtaggagctatggtttaagagcattggaagtagttacaactcaaggattttggtagaaaggtatgagtttggtcgaaaaattaaaatagtggcaaaataagatttagttgtgttttctcagagccgccacaagattgaacaaaatgttttctgtttgggcatcctgaggaagttgtattagctgttaatgctctgtgagtttagaaaaagtcttgatagtaaatctagtttttgacacagtgcatgaactaagtagttaaatatttacatattcagaaaggaatagt

SEQ ID NO: 3240 - DNA, 626 bp, Homo sapiens
ccgttgctgtcgcttctggttatctgaagactgtcctgaaaggaagacataagtgttgtgattagtagaagctttctggtagaccatatttcttctggattgtaataaaattgttagtagctccttttactttgttcctgtctctggaaagccatttttgaattgctgattactttggctttaatcagtggtcacctagaaaaagctttgtaatcataacacaatgagtaattcttgataaaagttcagatacaaaaggagcactgtaaaactggtaggagctatggtttaagagcattggaagtagttacaactcaaggattttggtagaaaggtatgagtttggtcgaaaaattaaaatagtggcaaaataagatttagttgtgttttctcagagccgccacaagattgaacaaaatgttttctgtttgggcatcctgaggaagttgtattagctgttaatgctctgtgagtttagaaaaagtcttgatagtaaatctagtttttgacacagtgcatgaactaagtagttaaatatttacatattcagaaaggaatagtggaaaaggtatcttggttatgacaaagtcattacaaatgtgactaagtcattacaaatgtgactg

SEQ ID NO: 3241 - DNA, 434 bp, Homo sapiens
catcaacatttggcgtgatgtgggcctttgtggggtgctaaatgaaattgcaaactcagaagaagaggtgtttgagtgggtgaagacggcatccggctgggccctggcactctgtcgatgggcctcttccctccatgggtccctgttcccccatctgtctctcaggagcgaagatctgatcgctgaatttgcccaagtcacaaattggtccagctgctgcttgcgtgtctttgcatggcacccccacaccaacaagtttgcagtggccctgctagatgactcagtccgtgtgtataatgccagcagcaccatagtcccctccctgaagcaccggctgcagcgaaatgtggcgtctctggcctggaagccccttagtgcctctgtcttggctgtggcctgccagagctgcattcttatctggaccctggacccta

SEQ ID NO: 3242 - DNA, 361 bp, Homo sapiens
gcccttagcgtggtcgcggccgaggtacttcttttgaataattcagtattttaaaaatgcaagccaggcacagtggctcacgcctgtaatccagcactttggaaggccgaggtggggggatcacgaggtcaggagttcaagaccagcctggccaacatggtgaaacctcatctctactaaaaatacaaaaactagctgggcatggtggcgggcacctgtaaccccagctacttggagggctgaaggagaattgcttgaatccgggaggcagaagttgcagtgagctgagatggcgcccttgcactccagcctggccaacaagagtgaaactccgtctcaaaaacaaacaagcaaacaaaca

SEQ ID NO: 3243 - DNA, 699 bp, Homo sapiens
  misc_feature 583, 651: n = A,T,C or G
ggtaccatgctgacttcttggtatcttttaaggcctaattttcccttccttgagattactgtagtgtgttccagctaatttctatttggaaacgagttggaacagctgaaaactaggtattattgaaggcaaagtagcctcacgtcagttttttatcagctcatttgggaagttttttttttttttttttttttttttaattaattagaaagtaggctgggtacggtggctcatgcctataatcccagcacttggggaggccgaggatctcctctctggtggatcacttgagggcaggagttaagagaccatcctggccaacatgatgaaaccctgtctctactaaaaatacaaaaagtagctgggcgtggtggcatactcttacaatcccagctacttgggaggctgaggcaggagaatcacttgaacctaggaagcagaggttgcagtgggccaagatcacaccactatactctagcctgggcggcagaggtggggaaaaaagtaggacccctgtcctatattcaggtttttctcacatatatgaacccatctaaattctacgttgttaaaggtagcttangttaattagtctatacttatttaagaccaatatggggtgagatggatttttttttaaaaatcctacantaaggctttctactttccttctaatgaggaaaaaagtggcaaaaattt

SEQ ID NO: 3244 - DNA, 394 bp, Homo sapiens
aggtacactgaaatcaggtaacaaaggcatcttactataacttctttaataaagaagtagagagttaccagtgtaattcaggacaacctactcatttaagtttaaagttttttctttacatcatgcaatatttgacttcaaaaaacattttccattctgtcttctcttatatataaacattaagagctattacaaagttctttcctctaagtaaaaaacccactagaaaaagatatttgtaaaaatcattgcagggttactgatactgaatgaagcacaggggtactaaatttctgaggaattaatactgatgggaaggatgcagtaaagagtaaaaacgggggcattgtggtttatacctgtaatcccaccactttgggaggctggggctgga

SEQ ID NO: 3245 - DNA, 104 bp, Homo sapiens
gcccttagcgtggtcgcggccgaggtacaatcttggctcactgcaacctccacctcccgggttcaagcaatactcctggctcaacctcctgagagctgggacta

SEQ ID NO: 3246 - DNA, 265 bp, Homo sapiens
gcccttagcgtggtcgcggccgaggtacatggaggcctggactgtaaagagactacggaaggggcagcatgtgtgttttgcttctcagattcattgtcactcacgttgcataaagtcctcagttgtttttaagtaattgttttactatggatatattaaacatacagaataaaaaagggaataaacatacaatttggcaaaccccctactgagcctttaaaaatattagaaggttggtattaaaccaggtaacttacggatttgg

SEQ ID NO: 3247 - DNA, 532 bp, Homo sapiens
tcctgggcaaagaatggacaatcagtttccttcctgtgtcgatgtcgatgttgtctgtgcaggagatgcagtttttgtgtagagaatgtaaattttctgtaaccttttgaaatctagttactaataagcactactgtaatttagcacagtttaactccaccctcatttaaacttcctttgattctttccgaccatgaaatagtgcatagtttgcctggagaatccactcacgttcataaagagaatgttgatggcgccgtgtagaagccgctctgtatccatccacgcgtgcagagctgccagcagggagctcacagaaggggagggagcaccaggccagctgagctgcacccacagtcccgagactgggatcccccaccccaacagtgattttggaaaaaaaatgaaagttctgttcgtttatccattgcgatctggggagccccatctcgatatttccaatcctggctacttttcttagagaaaataagtcctttttttctggccttgctaatggcaacagaagaaaggg

SEQ ID NO: 3248 - DNA, 398 bp, Homo sapiens
ttccgttgctgtcgcatgttcctggggctcttccctctctttgctgtatttgaaggtctccatttgtccacatctgagaaaatcttccgtttccaggacacagggctgctcctgcgggtacttgggagcctcttccttggcgggattctcgcctttggtttgggcttctctgagttcctcctggtctccagaacctccagcctcactctctccattgccggcatttttaaggaagtctgcactttgctgttggcagctcatctgctgggcgatcagatcagcctcctgaactggctgggcttcgccctctgcctctcgggaatatccctccacgttgccctcaaagccctgcattccagaggtgatggtggccccaaggccttgaaggggctgggctc

SEQ ID NO: 3249 - DNA, 483 bp, Homo sapiens
ttccgttgctgtcgggaaactgaagctgggggagaccaagtgaccttcccaaggtcataaaatggagtgatgaactcggaaatgcattgcacaggtgaccccgatctggtgtccgagggccgcaaaagcttccccagcatccattcctcctttgccttttcgggccttggcttcacgacgttctacttggcgggcaagctgcactgcttcaccgagagtgggcggggaaagagctggcggctctgtgctgccatcctgcccttgtactgcgccatgatgattgccctgtcccgcatgtgcgactacaagcatcactggcaagattcctttgtgggtggagtcatcggcctcatttttgcatacatttgctacagacagcactatcctcctctggccaacacagcttgccataaaccctacgttagtctgcgagtcccagcctcactgaagaaagaggagaggcccacagctgacagcgcaccc

SEQ ID NO: 3250 - DNA, 371 bp, Homo sapiens
attccgttgctgtcgaaatttacagattgaagattctgaaatgtctcgtgtaattcgagtcagtgaattatctttatgtgatcttgctggttcagaacgaactatgaagacacagaatgaaggtgaaaggttaagagagactgggaatatcaacacttctttattgactctgggaaagtgtattaacgtcttgaagaatagtgaaaagtcaaagtttcaacagcatgtgcctttccgggaaagtaaactgactcactattttcaaagtttttttaatggtaaagggaaaatttgtatgattgtcaatatcagccaatgttatttagcctatgatgaaacactcaatgtattgaagttctccgccattgcac

SEQ ID NO: 3251 - DNA, 327 bp, Homo sapiens
agcaggcgcagcccagcctcgaaatgcagaacgacgccggcgagttcgtggacctgtacgtgccgcggaaatgctccgctagcaatcgcatcatcggtgccaaggaccacgcatccatccagatgaacgtggccgaggttgacaaggtcacaggcaggtttaatggccagtttaaaacttatgctatctgcggggccattcgtaggatgggtgagtcagatgattccattctccgattggccaaggccgatggcatcgtctcaaagaacttttgactggagagaatcacagatgtggaatatttgtcataaataaataatgaaaacc

SEQ ID NO: 3252 - DNA, 261 bp, Homo sapiens
gtcgtaacaggtccttaggagaccatcagaaagaggaagggcctggtacaaaggttctccaaaacatcctatcggaaaaactcaattactaccaacaagtaaacctgtagatttgtaattggtaaatgttatacttgtcattaatgtaaataaagtgagtaattggtatgacttgcaggatgatgtacatgttagtttgtagctcaggatgattgttaagcaatagatttgctctattgaaaatgtttcatttttttcact

SEQ ID NO: 3253 - DNA, 487 bp, Homo sapiens
gtcggtggggcacagggggcaccagctggccttgccctctctggtctgggctgtctaccttcctcactgtatctttgcccagacccacctgggccagtaggcccctgtccccagccacacaccttagatgctggcatgccttactccaggtgcctgtgtttggccgaggcctgtgtgattcccggtctgcaccacatggcggggttgggggccgctggaggccacctgccaaggcgtgggatgggatggtcctgctggtttaggccgtgattctggaaaaccttggatgggccttcgtcctatgtcagccttccctctgatcctcaggccctacctgtagagacctccactcctagagccagtctcagggtctgggatttccctgcaggagctcagccaccactgtgccatggtgacacaggccaaggcagacattggccctcccttctcccagcccccagaggcctggccttgggttcgtcagcat

SEQ ID NO: 3254 - DNA, 439 bp, Homo sapiens
aacggagtcccaggacagtgctgagccttctggctcagaggaagagtctgaccctgtttccttggagagggaggacaaagtccctggccctctagagatccccagtgggatggaggatgcaggcccaggggcagacatcattggtgtgtaatggccagggtcccaacttggaggggaagtcacagcatgtgaatgggggagtgatgaacgggctggagcagtctgaggaagtggggcaaggaatgccgctagtctctgagggagaccgagggagcccctttcaggaggaggaggggagtgctctgaaaacctcttgggcaggggctcctgttcacctgggccagggtcagttcctgaagttcactcagagggaaggagatagagagtcctggtcctcaggggaggactaggaaaagaccatctgcccggcactggggac

SEQ ID NO: 3255 - DNA, 479 bp, Homo sapiens
  misc_feature 113: n = A,T,C or G
ccgttgctgtcgcaagtttgaaaagtgatgacggttgacgtttgctgatttttgactttgcttgtagctgctccccgaactcgccgtcttcctgtcggcggccggcactgtangtgagcgcgagaggacggaggaaggaagcctgcagacagacgccttctccatcccaaggcgcgggcaggtgccgggacgctgggcctggcggtgttttcgtcgtgctcagcggtgggaggaggcggaagaaaccagagcctgggagattaacaggaaacttccaagatggaaactttgtctttccccagatataatgtagctgagattgtgattcatattcgcaataagatcttaacaggagctgatggtaaaaacctcaccaagaatgatctttatccaaatccaaagcctgaagtcttgcacatgatctacatgagagccttacaaatagtatatggaattcgactggaacatttttacatgat

SEQ ID NO: 3256 - DNA, 419 bp, Homo sapiens; identical to SEQ ID NO: 2661

SEQ ID NO: 3257 - DNA, 443 bp, Homo sapiens
gcctgtgcttaagtaagaatcaggccttattggagacattcaagcaaaggttggacaactacttttccagaacagaaaggaaactcatgcatcagaaaaggtgactaataaaggtaccagaagaatatggctgcacaaataccagaatctgatcagataaaacagtttaaggaatttctggggacctacaataaacttacagagacctgctttttggactgtgttaaagacttcacaacaagagaagtaaaacctgaagagaccacctgttcagaacattgcttacagaaatatttaaaaatgacacaaagaatatccatgagatttcaggaatatcatattcagcagaatgaagccctggcagccaaagcaggactccttggccaaccacgatagagaagtcctgatggatgaacttttgatgaaagattgccaacagctgc

SEQ ID NO: 3258 - DNA, 585 bp, Homo sapiens
tccatttaaacatacggttgatgatggtctggatattagaaaggcagcatttgagtgtatgtacacacttctagacagttgtcttgatagacttgatatctttgaatttctaaatcatgttgaagatggtttgaaggaccattatgatattaagatgctgacatttttaatgttggtgagactgtctaccctttgtccaagtgcagtactgcagaggttggaccgacttgttgagccattacgtgcaacatgtacaactaaggtaaaggcaaactcagtaaagcaggagtttgaaaaacaagatgaattaaagcgatctgccatgagagcagtagcagcactgctaaccattccagaagcagagaagagtccactgatgagtgaattccagtcacagatcagttctaaccctgagctggcggctatctttgaaagtatccagaaagattcatcatctactaacttggaatcaatggacactagttagatgtttgttcaccatggggaccattacatatgaccatacaatgcactgaattgacaggttaatcataagacatggaaagagaagtgtctaaaagcttc

SEQ ID NO: 3259 - DNA, 363 bp, Homo sapiens
gactaaagtcccagccagagcccctagtggtcaagggaaaacgggtggctggaggccctcagatgatccagctcagcctggatgggaagcgcctctacatcaccacgtcgctgtacagtgcctgggacaagcagttttaccctgatctcatcagggaaggctctgtgatgctgcaggttgatgtagacacagtaaaaggagggctgaagttgaaccccaacttcctggtggacttcgggaaggagccccttggcccagcccttgcccatgagctccgctaccctgggggcgattgtagctctgacatctggatttgaactccaccctcatcacccacactccctattttgggccctccttctt

SEQ ID NO: 3260 - DNA, 608 bp, Homo sapiens
tgtgctgtgctcaccagacactttgatcttggacttctcagcctccagaactatggggttctgctcttgtcacccagactggagtgaagtggcacaatctcggctcactgcaacctccgcctcccgggttcaagcgattcccctgcctcagcctccagagtagctggactgcaggcgcacgccaccactcctggctaatttttgtatttttagtagagacggggtttcaccatgttggccaagatgttcttgatcttctcaccttgtgatccgcccacctcaacctcccaaagtgctgagagactaagacacctttctagacagagaggaggccgatggcagacattctcagataggtttgtagctattgacctggctgcatcaaaggagatgaaatcccttagaaattgacagcttctatgaaatttacaatcaagaaggcataagaacaactgctgcagcttcagaactatgcagaaaataaaatgtcaacagctgggagaaaaaattctaagtgagcaacagagccagtgaaaaatatcaccagtagagcaggcacctgagacagggaaatggcacccactaagtgcaggtctacaggggctgac

SEQ ID NO: 3261 - DNA, 455 bp, Homo sapiens
tctcgctccgtggccttagctgtgctcgcgctactctctctttctggcctggaggctatccagcgtactccaaagattcaggtttactcacgtcatccagcagagaatggaaagtcaaatttcctgaattgctatgtgtctgggtttcatccatccgacattgaagttgacttactgaagaatggagagagaattgaaaaagtggagcattcagacttgtctttcagcaaggactggtctttctatctcttgtactacactgaattcacccccactgaaaaagatgagtatgcctgccgtgtgaaccatgtgactttgtcacagcccaagatagttaagtgggatcgagacatgtaagcagcatcatggaggtttgaagatgccgcatttggattggatgaattccaaattctgcttgcttgctttttaatattgatatgcttatacacttacac

SEQ ID NO: 3262 - DNA, 455 bp, Homo sapiens
gtaagcaggccgtttcagcatcaggcaagtggctggatggtattcgaaaatggtattacaatgctgcaggattcaataaactggggttaatgcgagatgatacaatatacgaggatgaagatgtaaaagaagccataagaagacttcctgagaacctttataatgacaggatgtttcgcattaagagggcactggacctgaacttgaagcatcagatcttgcctaaagagcagtggaccaaatatgaagaggaaaatttctaccttgaaccgtatctgaaagaggttattcgggaaagaaaagaaagagaagaatgggcaaagaagtaatcatgtagttgaagtctgtggatgcagctgttatgaagatggttaaacttgaaacaaacaattttaagaattatttggtctgaagatgttttactttaaataaatgtctattgtaatggctggaag

SEQ ID NO: 3263 - DNA, 403 bp, Homo sapiens
ttaggaatctcttcactaccctgattcttgattcctggctctaccctgtctgtcccttttctttgaccagatctttctcttccctgaacgttttcttctttccctggacaggcagcctcctttgtgtgtattcagaggcagtgatgacttgctgtccaggcagctccctcctgcacacagaatgctcagggtcactgaaccactgcttctcttttgaaagtagagctagctgccactttcacgtggcctccgcagtgtctccacctacacccctgtgctcccctgccacactgatggctcaagacaaggctggcaaaccctcccagaaacatctctggcccagaaagcctctctctccctccctctctcatgaggcacagccaagccaagcgctcatgttgag

SEQ ID NO: 3264 - DNA, 212 bp, Homo sapiens
gggggaaaggacctataaactttttaaggtaaaatcaaatatagctactgcataagagaatcgagaaatttgatagaggtaacttgtttaatgtaaatctaatagtacttgtaatttctttctgcttagaatctaaagatgtgtttagaacctcttgtttaaaaataatagactgcttatcataaaatcacatctcacacatttgaggcagt

SEQ ID NO: 3265 - DNA, 546 bp, Homo sapiens
tagctcaaacaaccatgagatcagagctcggcaaactctctctggacaaagtcttccgggaacgggagtccctgaatgccagcattgtggatgccatcaaccaagctgctgactgctggggtatccgctgcctccgttatgagatcaaggatatccatgtgccaccccgggtgaaagagtctatgcagatgcaggtggaggcagagcggcggaaacgggccacagttctagagtctgaggggacccgagagtcggccatcaatgtggcagaagggaagaaacaggcccagatcctggcctccgaagcagaaaaggctgaacagataaatcaggcagcaggagaggccagtgcagttctggcgaaggccaaggctaaagctgaagctattcgaatcctggctgcagctctgacacaacataatggagatgcagcagcttcactgactgtggccgagcagtatgtcagcgcgttctccaaactggccaaggactccaacactatcctactgccctccaaccctggcgatgtcaccagcatggtggctc

SEQ ID NO: 3266 - DNA, 276 bp, Homo sapiens
tggggctcgccctcctgtgcatcgcggctaatattttgctttactttcccaatggggaaacaaagtatgcctccgaaaaccacctcagccgcttcgtgtggttcttttctggcatcgcaagaggtggcctgctgatgctcctgccagcatttgtcttcattgggctggaacaggatgactgctgtggctgctgtggccatgaaaactgtggcaaacgatgtgcgatgctttcttctgtattggctgctctcattggaattgcaggatctggctact

SEQ ID NO: 3267 - DNA, 306 bp, Homo sapiens
acattgtattaataccaaagtgtttggtcattttaagaatctggaatgcttgctgtaatgtatatggctttactcaagcagatctcatctcatgacaggcagccacgtctcaacatgggtaaggggtgggggtggaggggagtgtgtgcaacgtttttacctaggcaccatcatttaatgtgacagtgttcagtaaacaaatcagttggcaggcaccagaagaagaatggattgtatgtcaagattttacttggcattgagtagtttttttcaatagtaggtaattccttagagatacagtatacc

SEQ ID NO: 3268 - DNA, 538 bp, Homo sapiens; identical to SEQ ID NO: 515

SEQ ID NO: 3269 - DNA, 529 bp, Homo sapiens
attccgttgctgtcgcgagttcatccatcaatttcctgactcgagttagtggcattggtccatctgctgcaaggaagtttgtagatgaaggaattaaaacactagaaggctcacagctggattcatgcccagtaaagggacacctgaatggaactgagtcacttttagacttaatatgggatgttatgacaattcttaagttaaaaaatgcagatctcagaaaaaatgaagataaattgaaccatcatcagcgaattgggctgaaatattttggggactttgaaaaaagaattcctcgtgaagagatgttacaaatgcaagatattgtactaaatgaagttaaaaaagtggattctgaatacattgctacagtctgtggcagtttcagaagaggtgcagagtccagtggtgacatggatgttctcctgacccatcccagcttcacttcagaatcaaccaaacagccaaaactgttacatcaggttgtggagcagttacaaaaggttcattttatcacagataccctgtc

SEQ ID NO: 3270 - DNA, 447 bp, Homo sapiens
ttgctgtcggtgaacacacccagcccccgcctcgccgccatgatgctgctgcagctgctggaaggcgtggaccatctggttcaacagggcatcgcgcacagagacctgaaatccgacaacatccttgtggagctggacccagacggctgcccctggctggtgatcgcagattttggctgctgcctggctgatgagagcatcggcctgcagttgcccttcagcagctggtacgtggatcggggcggaaacggctgtctgatggccccagaggtgtccacggcccgtcctggccccagggcagtgattgactacagcaaggctgatgcctgggcagtgggagccatcgcctatgaaatcttcgggcttgtcaatcccttctacggccagggcaaggcccaccttgaaagccgcagctaccaagaggctcagctacctgcactgcccgag

SEQ ID NO: 3271 - DNA, 528 bp, Homo sapiens
ttccgttgctgtcgggcatttcttgatattctgagtgaattttcttctaaactacttcgacaagacaaaagaacagtgtatgtttacttggaaaagttcatgacctttcagatgtcactccgaagagaggatgtgtggcttccactgatgtcttaccgaaattctttgctagctggtggtgatgatgacaccatgtcagtcattagtggaatcagcagccgggggtcaacagtacggagtaaaaaatcaaaaccatctacaggaaaacggaaagtggttgagggcatgcagctttcactcactgaagaaagtagtagtagtgacagtatgtggttaagcagagaacaaacactgcacacccctgttatgatgcagacaccacaactcacctccactattatgagagagcccaaaagattacggcctgaggatagcttcatgagtgtttatccaatgcagactgaacatcatcaaacacctcttgattataatcggcgtggcacaagcctaatggaagatgatgaagag

SEQ ID NO: 3272 - DNA, 422 bp, Homo sapiens
ggtgcccccatccgcacactgtcctttggccaccggacatcatgcctcccaagaaggatgttcccgtgaagaaaccagcagggccctccatctccaaacctgctgctaagccagcagcagcaggggctcctccagccaagaccaaagctgagccagctgtcccccaggcccctcagaaaacccaggagcctccagtcgatctctccaaagtggtgatcgagtttaacaaggaccagctggaggagttcaaggaggccttcgagctgtttgaccgagtgggggatggcaagatcctgtacagccagtgtggggacgtgatgagggccctgggccagaaccccaccaacgccgaggtgctcaaggtcctggggaaccccaagagtgatgagctgaagtcgcggcgtgtggactttgagactttc

SEQ ID NO: 3273 - DNA, 527 bp, Homo sapiens
aagcctggcgctgctgctgccgcccgtcaccctggcagccctggtggacagctggctccgagaggactgcccagggctcaactacgcagccttggtcagcggggcaggcccctcgcaggcggcgctgtgggccaaatcccctggggtactggcagggcagcctttcttcgatgccatatttacccaactcaactgccaagtctcctggttcctccccgagggatcgaagctggtgccggtggccagagtggccgaggcggtgcgggcggccagacaggcggctgacttcgctctgaaggtggaagtggaatgcagcagcctgcaggaggccgtgcaggcagctgaagctggtgccgaccttgtcctgctggacaacttcaagccagaggagctgcaccccacggccaccgtgctgaaggcccagttcccgagtgtggctgtggaagccagtgggggcatcaccctggacaacctcccccagttctgcgggccgcacatagacgtcatctccatggggatgctgaccc

SEQ ID NO: 3274 - DNA, 685 bp, Homo sapiens
ctgtcctggctgccgcccccgacagcctgtcctggtgccccggctccctgccccgcgcccagtcatgaccctgcgcccctcactcctcccgctccatctgctgctgctgctgctgctcagtgcggcggtgtgccgggctgaggctgggctcgaaaccgaaagtcccgtccggaccctccaagtggagaccctggcggagcccccagaaccatgtgccgagcccgctgcttttggagacacgcttcacatacactacacgggaagcttggtagatggacgtattattgacacctccctgaccagagaccctctggttatagaacttggccaaaagcaggtgattccaggtctggagcagagtcttctcgacatgtgtgtgggagagaagcgaagggcaatcattccttctcacttggcctatggaaaacggggatttccaccatctgtcccagcggatgcagtggtgcagtatgacgtggagctgattgcactaatccgagccaactactggctaaagctggtgaagggcattttgcctctggtagggatggccatggtgccagccctcctgggcctcattgggtatcacctatacagaaaggccaatagacccaaagtctccaaaaagaagctcaaggaagagaaacgaaacaagagcaaaaagaaataataaataataaatttt

SEQ ID NO: 3275 - DNA, 255 bp, Homo sapiens
cccaagtagctgggaccacaggcgcccaccaccacgccccagcttaaatttttttgtatttttagtagagatggggtttcacttggtgttagccaggatggtctcgatttcctgacctcgtgatctgcctgcctcggcctcccaaagtgctgggatacaggcgtgagccactgtgcccggcccgtaattattcttttcgtgttaagcaatggtaaaagaactgactgaaaataagaatattaaaaagtttctctg

SEQ ID NO: 3276 - DNA, 503 bp, Homo sapiens
tttctcactggcgactcccctgcgtgctggtgaagaaggcagccacagtcggaagtcgctgtgcagaagcagagaggaggccccgcctggggaccggggtgcaccgcttagctcggcccccatcctagggggctggtttggcaggggctgcacaaaacgcacaaaaaggaagaaagtgacgtaatcacgtgctcgatgaagaacagttggcactttgcagatggccagtgtcacggtgaaggctgggttgcccccacgggtctagggagaacgaactctttggggatgacattttcaccgtgacatttttagccatttgtccttgaggaagccccttgcactgctgcggttgtaccctgatacggcctggccatcgaggacacctgcccatccggcctctgtgtcaagaggtggcagccgcacctttctgtgagaacggaactcgggttatttcagccccggcctgcagagtggaagcgcccagcggcctttcctcgctcacc

SEQ ID NO: 3277 - DNA, 315 bp, Homo sapiens
gtcgggtaaacacccgaactggtcaactctcaagagaccatctggttcaggttcctgactgggccagcgagtgaggatggccaggcctctggagcaggcggtagctgccatcgtgtgcaccttccaggaatacgcagggcgctgtggggacaaatacaagctctgccaggcggagctcaaggagctgctgcagaaggagctggccacctggaccccgactgagtttcgggaatgtgactacaacaaattcatgagtgttctggacaccaacaaggactgcgaggtggactttgtggagtatgtgcgctcacttgc

SEQ ID NO: 3278 - DNA, 482 bp, Homo sapiens
ttccgttgctgtcggcactttaaagtctgagcctttagaggtgattcctcaagaccctgcttaatcctaacaattttcctcattagtaaaagtcagcccaaactgggggcttgttaagatccttaccagccacatccatctgaaattatgaatttcaaagtatcttacaaatttggtgccacattatcttttttaagtttgttttgttttgtttttttgagacagagtctcgctctgtcacccaggctggagtgcagtggcgcgatctcagctcactgcaagctccgcctcctgggttcacaccattctcttgccctcagcctcccaagtatctgggactacagtcgcccgccaccacgcccgggtaatttttttgtatttttaatagagacggggtttcactttgttagccaggatggtctcaatctcctgacctcatgatccacctgcctcggcctcccaaagtgctgggattacaggca

SEQ ID NO: 3279 - DNA, 227 bp, Homo sapiens
caagatcaccatgattgctgagcctcttgagaagggcctggcagaggacatagagaatgaggtggtccagattacgtggaacaggaagaagctgggagagttcttccagaccaagtacgattgggatctgctggctgtccgttccatctgggcttttggccctgatgcgactggccccaacattctggtggatgatactctgccctctgaggtggacaaggctcttc

SEQ ID NO: 3280 - DNA, 417 bp, Homo sapiens
atgtgcatttgtgctgattttgagaaggttttctctattggaccagtattcagagcggaagactctaatacccatagacatctaactgagtttgttggtttggacattgaaatggcttttaattaccattaccacgaagttatggaagaaattgctgacaccatggtacaaatattcaaaggacttcaagaaaggtttcagactgaaattcaaacagtgaataaacagttcccatgtgagccattcaaatttttggagccaactctaagactagaatattgtgaagcattggctatgcttagggaagctggagtcgaaatgggagatgaagacgatctgagcacaccaaatgaaaagctgttgggtcatttggtaaaggaaaagtatgatacagatttttatattcttgataaatat

SEQ ID NO: 3281 - DNA, 519 bp, Homo sapiens
aagcttacattatgaagagcagcatattacagccgtatgggtctacttgacagtaaaatttgaagagcattggaagcctgttgatgtagaggtcgagtttagatgcaagttcaaggagcgaaaggtggatgggtaggttatatagggatatagcacagagatatatagcaaagagatacttttgagcaatgtttgtggaagcggtattcgcaatattttagtagctcgttacagtccggtgcgtttttggttttttgaaagtgcgtcttcagagcgcttttggttttcaaaagcgctctgaagttcctatactttctagagaataggaacttcggaataggaacttcaaagcgtttccgaaaacgagcgcttccgaaaatgcaacgcgagctgcgcacatacagctcactgttcacgtcgcacctatatctgcgtgttgcctgtatatatatatacatgagaagaacggcatagtgcgtgtttatgcttaaatgcgtacttatatgcgtctatttatgt

SEQ ID NO: 3282 - DNA, 511 bp, Homo sapiens
tccgttgctgtcgggaaagtgtctttaaaaacaaaaacaaaccctgaaatgtatatttgggattatgataaggcaactaaagacatgaaacctcaggtatcctgctttaagttgataactccctctgggagctggagaatcgctctggtggatgggtgtacagatttgtatataatgtcatttttacggaaaccctttcggcgtgcataaggaatcactgtgtacaaactggccaagtgcttctgtagataacgtcagtggagtaaatattcgacaggccataacttgagtctattgccttgcctttattacatgtacattttgaattctgtgaccagtgatttgggttttattttgtatttgcagggtttgtcattaataattaatgcccctctcttacagaacactcctatttgtacctcaacaaatgcaaattttccccgtttgccctacgccccttttggtacacctagaggttgatttcctttttcatcgatggtactatttctta

SEQ ID NO: 3283 - DNA, 500 bp, Homo sapiens
ttccgttgctgtcgggaggcccggctgggacagactccttttcctgatgtgatggagcaggtattccatgaagtgggtattggcagtgtgctctccctccagaagttctggcagcaccgcatcaaggactatcacagttacatgctacagattagtaagcaactctctgaagaatatgaaaggattgtcaatcctgagaaggccacagaggacgctaaacctgtgaagatcaaggaggaacctgtgagcgacatcacttttcctgtcagtgaggagctggaggctgaccttgcttctggagaccagtcactgcctatgggagtgcttggggctcaaagcgaacgcttcccatctaacctggaggttgaagcttcaccacaggcttcaagtgcagaggtaaatgcttctcctctttggaatctggcccatgtgaaaatggagcctcaagaaagtgaagaaggcaatgtctctgggcatggtgtgctgggcagtgatgtctt

SEQ ID NO: 3284 - DNA, 503 bp, Homo sapiens
cgttgctgtcggttgtgctcataattgtccttgcctttccagcttaattattttaaggaacaaatgaaaactctgggctgggtggagtggctcatacctgtaatcccagcactttgggaggctacggtgggcagatcatctgaggccaggagttcgagacctgcctggccaacatggcaacaccccgtctctaataaaaatataaaaattagcctggcatggtagcatgcgcctatagtcccagctgctcaggaggctgaggcatgagaatcgcttgaacctaggaggtggaggttgcattcaactgagatcataccacttcattccagcctgggtgacagagcaagactctgtctcagcctcctgagcagcatgcgcctatagtcccagctgctcaggaggctgaggcatgagaatcgcttgaacctacgaggtggaggttgcattcaactgagatcataccacttcattccagcctgggtgacagagcaagactctgtctc

SEQ ID NO: 3285 - DNA, 591 bp, Homo sapiens
ttccgttgctgtcggcgttttggggacgggggctggtgaggctcacgttggagggcttcgcgtctgcttcggagaccgtaaggatattgatgaccatgagatccctgctcagaacccccttcctgtgtggcctgctctgggccttttgtgccccaggcgccagggctgaggagcctgcagccagcttctcccaacccggcagcatgggcctggataagaacacagtgcacgaccaagagcatatcatggagcatctagaaggtgtcatcaacaaaccagaggcggagatgtcgccacaagaattgcagctccattacttcaaaatgcatgattatgatggcaataatttgcttgatggcttagaactctccacagccatcactcatgtccataaggaggaagggagtgaacaggcaccactaatgagtgaagatgaactgattaacataatagatggtgttttgagagatgatgacaagaacaatgatggatacattgactatgctgaatttgcaaaatcactgcagtagatgttatttggccatctcctggttatatacaaatgtgacccgtgataatgtgattgaacac

SEQ ID NO: 3286 - DNA, 358 bp, Homo sapiens
tgtcttaatgctctctatgtgagacagaaatagacgtgaccattagtaatgcaactatttttgtcaaatttagtgggattttttggttgttgtttgttttcttgggttttttttttttaaatgacaaactctaaaaatgtcccaatgtgaaaaaacactttcctgaatgccattactcatgccctcaaagctttcatatttgtagcctactcctgtaaagggtttctcctgtttctagtttctagttggcaaaggtatgccaacaaatctggcaacctggtttttgttactaaaacagcatgtgttttcaggtttcttttttattgtacctaaagcagtctaaattaaaacttattaa

SEQ ID NO: 3287 - DNA, 460 bp, Homo sapiens
ggtgccgattcctgccctgccccgaccgccagcgcgaccatgtcccatcactgggggtacggcaaacacaacggacctgagcactggcataaggacttccccattgccaagggagagcgccagtcccctgttgacatcgacactcatacagccaagtatgacccttccctgaagcccctgtctgtttcctatgatcaagcaacttccctgaggatcctcaacaatggtcatgctttcaacgtggagtttgatgactctcaggacaaagcagtgctcaagggaggacccctggatggcacttacagattgattcagtttcactttcactggggttcacttgatggacaaggttcagagcatactgtggataaaaagaaatatgctgcagaacttcacttggttcactggaacaccaaatatggggattttgggaaagctgtgcagcaacctgatggactgg

SEQ ID NO: 3288 - DNA, 480 bp, Homo sapiens
ttcgtcgtggcaacgttgctggtgacagcaaaaatgacccaccaatggaagcagctggcttcactgctcaggtgattatcctgaaccatccaggccaaataagcgccggctatgcccctgtattggattgccacacggctcacattgcatgcaagtttgctgagctgaaggaaaagattgatcgccgttctggtaaaaagctggaagatggccctaaattcttgaagtctggtgatgctgccattgttgatatggttcctggcaagcccatgtgtgttgagagcttctcagactatccacctttgggtcgctttgctgttcgtgatatgagacagacagttgcggtgggtgtcatcaaagcagtggacaagaaggctgctggagctggcaaggtcaccaagtctgcccagaaagctcagaaggctaaatgaatattatccctaatacctgccaccccactcttaatcagtggtggaagaa

SEQ ID NO: 3289 - DNA, 580 bp, Homo sapiens
atgaccttgacattatgcttggcaataaaaagaagaaaaagaagaatgttaagttcccagatgaggatgaaatactagagaaagatgaagctctagaagatgaagacaacaaaaaagatgatggtatctcattcagtaatcagacaggccctgcttgggcaggctcagaaagagactacacatacgaggagctgctgaatcgagtgttcaacatcatgagggaaaagaatccagatatggttgctggggagaaaaggaaatttgtcatgaaacctccacaagtcgtccgagtaggaaccaagaaaacttcttttgtcaactttacagatatctgtaaactattacatcgtcagcccaaacatctccttgcatttttgttggctgaattgggtacaagtggttctatagatggtaataaccaacttgtaatcaaaggaagattccaacagaaacagatagaaaatgtcttgagaagatatatcaaggaatatgtcacttgtcacacatgccgatcaccggacacaatcctgcagaaggacacacgactctatttcctacagtgcgaaacttgtcattctag

SEQ ID NO: 3290 - DNA, 499 bp, Homo sapiens
atggggattatgcatctttgatgatgtcatagaacactgtagtccagcctcatttaaatacgcagaatatttcttaagaccaatgctccaatatgtatgtgacaacagcccagaagtcaggcaagcagctgcatatggcctgggagtcatggcacagtacggtggagataattatcgccctttttgtacagaagcacttcccctgctggtaagagttattcagtctgcggattctaagaccaaagaaaatgtcaatgctacagagaactgcatctcagcagtagggaaaatcatgaagttcaagcctgactgtgtaaacgttgaagaggtccttccacactggttgtcttggcttccactacatgaagataaagaagaagctgttcagactttcaattatctgtgtgacctgattgaaagtaatcatccaattgttcttggcccaaacaataccaatctgcccaaaatatttagtataattgcggaaggagaaatgcac

SEQ ID NO: 3291 - DNA, 512 bp, Homo sapiens
ttccgttgctgtcggaagagggggaaaaccggataagggttttccccttttggggatcacctctctgtatcccccacccactatcccatttgccctcctcctcagctagggccacgcggccccacattgcacttctggggggtgaccgacttcgtacacgggtttaaagtttatttttatggtttagtcattgcagagttcttattttggggggagggaaagggggctagtccccttcttttggccctccgcccccgcaggcttctgtgtgctgctaactgtatttattgtgatgccttggtcagggcccctctacccacttctcccagtcagttgtggccccagcccctctccctgtgctgtgtggagtggacaccctgaccccccaagcggggagggccgctgtggccttcttcacagccgcgcagtgcccatggaggcgctgctgccaccttcctctcccaagttctttctccatccctctcctcttcccgccgcgccgctagcccgcc

SEQ ID NO: 3292 - DNA, 269 bp, Homo sapiens
ttcgttgctgtcgggcagtatatgcaaaaatgtttgcttagaaaggattcagttttgcttattgtgtgttgattgtataaatgcaataagaaaatgtaaaggtttttgtctatgaatatgatccctaatgtgtttcttttgacaccttagttccttactgtttacagtttaggagtactgataggggttcatgcttaataaacatgtcacaatacagtaagtaaagtggttttgtttgtttctttgagatggagtcttgctctgtcacc

SEQ ID NO: 3293 - DNA, 356 bp, Homo sapiens
gcccttagcgtggtcgcggccgaggtacttcaaccacccctcctacaaaactctatacccttgtcatattaaaattgtatgttatgccaggcttccctaatacaacaaaatctctgaataaaacctattaaatatacaatttctatcaacatgcctgccacacatgcttaataattgcttagtgaatacaagattaatgcatgagtgcctaagttacttcatctagtataacaaatgacaatatctcatttgtttcccgaagtatccttattccattcaagctctgaagaaagtattaatgatattcgtccttaagtaattttttctgcattcaaatctcaccattcaaatgattt

SEQ ID NO: 3294 - DNA, 399 bp, Homo sapiens
ccagaaggacatcctggagcaggcgcgggccgcggtggacacctactgcagacacaactacggggttgtggagagcttcacagtgcagcggcgagtccaacctaaggtgactgtatatccttcaaagacccagcccctgcagcaccacaacctcctggtctgctctgtgagtggtttctatccaggcagcattgaagtcaggtggttcctgaacggccaggaagagaaggctgggatggtgtccacaggcctgatccagaatggagactggaccttccagaccctggtgatgctggaaacagttcctcgaagtggagaggtttacacctgccaagtggagcacccaagcgtgacaagccctctcacagtggaatggagagcacggtctgaatctgcaca

SEQ ID NO: 3295 - DNA, 522 bp, Homo sapiens
tttctgaatgtaaatgccgttggttgggatttggggacctggaagggaccaaggaccacctgaccccaagctgtcctgcctagcgtccagcgtcttctaggagggtggggtctgcctgtcctggtgtggttggtttggccctgtttgctgtgactaccccccccgctccccgaaccgagggacggctgcctttgtctctgcctcagatgccacctgccccgcccatgctccccatcagcagcatccagactttcaggaagggcagggccagccagtccagaaccgcatccctcagcagggactgataagccatctctcggagggccccctaatacccagtggagtctggttcacaccctggggggtgtgtcactgtgatgggacacgtaggagtccacccttaaaaccagcaccctgtccctcgaggctgccgagtgggtgtgtggactggggtgccttcccacaaaactagcctccggctctgggcccgagacagccgcaggccccagccactgaatgata

SEQ ID NO: 3296 - DNA, 300 bp, Homo sapiens
  misc_feature 283: n = A,T,C or G
ctaatgaaaaatcatatagagatgaacttggttttgaaatataatgagtagatacttgcttggctgggatggcaaacaagaaaatgaggagcgactttttgggagccaggaaatcatgactgagaaagatatggaattatttcgtgatatccaagaacaagcactgcaggtaaagttggatattcaggttagacaatcaagcaacttgttcatggctgagaaacagcagattaattacattgtgggttaagcagtaacagcagtttgcctaatctcagaatanttgtggtttgtgtgtat

SEQ ID NO: 3297 - DNA, 363 bp, Homo sapiens
ttccgttgctgtcgattttgctaaatcttgtgtcatgtgtaggctgtaatatgtgtacattgtgtttaagagaaaaatgaaacccacatgccgccattttcctgaatcaaattctgcagtggaatggagaggaaaatacttctaggcaagcagctagactggtgaattgggggaaatagaaggaactagtaactgagactcctccagcctcctccctattggaatcccaatggctcctggagtaggaaaaaagtttaaactacattcatgttcttgttctgtgtcactcggccctgggtagtctaccatttacttcaccccaagtcctgctgcccatccagttgggaagccatgattttccta

SEQ ID NO: 3298 - DNA, 383 bp, Homo sapiens
tacgatgaccagtgtggttaagacagtgtatagcctgcagcccccctctgcgctgagcggcggccagccggcagacacacaaactcgggccacttctaagagtctcttacctgttaggtccaaagaagtcgatgtttccaaacaggttgattcaggaggtccagagaatgatgttacaaaaatcaccaaactgagacgagagaatgggcaaatgaaagctactgacactgccaccagaaggaatgtcagaaaaggctacaaaccactgagtaagcaaaaatcagaggaagagctcaaggacaagaaccagctgttagaagccgtcaacaagcagttgcaccagaagttgactgaaactcagggagagctgaaggacctgaccc

SEQ ID NO: 3299 - DNA, 382 bp, Homo sapiens
gagtgccctgctctggcctcgcttgttgctcttcggggactccatcacccagttttccttccagcagggtggatggggagcatcgctggctgacaggctggtcagaaaatgtgatgttctgaatcgtggagggtcaggttacaataccaggtgggccaaaattatccttccaagattaatcaggaaaggaaacagtttggacatcccagtagcagttacaattttctttggggccaatgacagtgcactaaaagatgagaatcccaagcagcacattcccctggaggagtacgctgcgaacctaaagagcatggtgcagtacctgaagtccgtggacatccctgagaatcgagtcattctcatcacgccgaccccactttgt

SEQ ID NO: 3300 - DNA, 356 bp, Homo sapiens
ttttgcttaagcccctttggaatctcccatttggaggggatttgtaaaggacactcagtccttgaacaggggaatgtggcctcaagtgcacagactagccttagtcatctccagttgaggctgggtatgaggggtacatacttggccctcacaccaggtaggttctgagacacttgaagaagcttgtggctcccaagccacaagtagtcattcttagccttgcttttgtaaagttacgtgacaagttattccatgtgatgcttgtgataattgacaacatatgcatggaaatatccacatgaatttcttacacagattcttaccggatgcctaaattgcatcctgtaacttctgtc

SEQ ID NO: 3301 - DNA, 511 bp, Homo sapiens
gatggattacggtgccgaggcaacagatcccctgtcccggatgttgaggatcccgcaaccgaggagcctggggagagcttttgtgacaaggtcatgagatggttccaggccatgctgcagcggctgcagacctggtggcacggggttctggcctgggtgaaggagaaggtggtggccctggtccatgcagtgcaggccctctggaaacagttccagagtttctgctgctctctgtcagagctcttcatgtcctctttccagtcctacggagccccacggggggacaaggaggagctgacaccccagaagtgctctgaaccccaatcctcaaaatgaagatactgacaccacctttgccctccccgtcaccgcgcacccaccctgacccctccctcagctgtcctgtgccccgccctctcccgcacactcagtccccctgcctggcgttcctgccgcagctctgacctggtgctgtcgccctggcatcttaataaaacctgcttatacttcc

SEQ ID NO: 3302 - DNA, 563 bp, Homo sapiens
tccgttgctgtcgggagcagggttgagcaactggtgcagacagcctagctggactgtgggtgaggcggttcacccatgaggctggctgtgcttttctcgggggccctgctggggctactggcagcccaggggacagggaatgactgtcctcacaaaaaatcagctactttgctgccatccttcacggtgacacccacggttacagagagcactggaacaaccagccacaggactaccaagagccacaaaaccaccactcacaggacaaccaccacaggcaccaccagccacggacccacgactgccactcacaaccccaccacaaccagccatggaaacgtcacagttcatccaacaagcaatagcactgccaccagccagggaccctcaactgccactcacagtcctgccaccactagtcatggaaatgccacggttcatccaacaagcaacagcactgccaccagcccaggattcaccagttctgcccacccagaaccacctccaccctctccgagtcctagcccaacctccaaggagaccattggagactacacgtggac

SEQ ID NO: 3303 - DNA, 533 bp, Homo sapiens
cagcagcctcccccttgagccccctcgcttcccgacgttccgttcccccctgcccgccttctcccgccaccgccgccgccgccttccgcaggccgtttccaccgaggaaaaggaatcgtatcgtatgtccgctatccagaacctccactctttcgacccctttgctgatgcaagtaagggtgatgacctgcttcctgctggcactgaggattatatccatataagaattcaacagagaaacggcaggaagacccttactactgtccaagggatcgctgatgattacgataaaaagaaactagtgaaggcgtttaagaaaaagtttgcctgcaatggtactgtaattgagcatccggaatatggagaagtaattcagctacagggtgaccaacgcaagaacatatgccagttcctcgtagagattggactggctaaggacgatcagctgaaggttcatgggttttaagtgcttgtggctcactgaagcttaagtgaggatttccttgcaatgagtagaatttcccttctctccc

SEQ ID NO: 3304 - DNA, 536 bp, Homo sapiens
gttgtttgagtttcttcacacggagatggtggctgagctgtgggctcacgaccccgaccccggcccgggggtgagcgccgggctccgtggggaggaagcgggggccaccaagggacagaagatgagcctgtcggtcctggagggtatggggttccgtgtgggccaggctctaggcgagaggctgccccgggagacgctggccttcagggaggagctggatgtcctcaagttcttgtgcaaagacctgtgggtggcggtgttccagaagcagatggacagcctgcgcaccaatcaccaggggacctacgtcctgcaagacaacagcttccccctcctcctcccgatggcctctggcctgcagtatctggaggaagcacccaagttcctggccttcacctgcggcctcctgcgcggcgccctctataccctgggcattgagagcgtggtcaccgcctccgtggcagccctgcccgtctgtaagttccaggtggtgattccgaaatcctaagcctgcctcgcacctgctgagccgcact

SEQ ID NO: 3305 - DNA, 572 bp, Homo sapiens; identical to SEQ ID NO: 2538

SEQ ID NO: 3306 - DNA, 534 bp, Homo sapiens; identical to SEQ ID NO: 537

SEQ ID NO: 3307 - DNA, 346 bp, Homo sapiens
tgaaaacaacttaaatttttagacaaatgattttagtatataaatttgcttttgtttttatacagaatataaagatttccctcattaatcttccatgtgaagggtattacaagcctggaggaagatactttctgcacacaagtatgtatcttatgtgtgcagtattggaaaccaatggtgtagtgctcctacacataaatggggtcaagtgacatcacaaattaaaagggggaaagagaaatattctagttaatcagatgcaagaagcaaacaagacgcaaaaactgtgcaaataagaccaagccagtaactttagttacgacactgcagattacactggaataac

SEQ ID NO: 3308 - DNA, 485 bp, Homo sapiens
acagcttgactacatgtcatttttaccaatgattttcaggtgacctgggctaagtcatttaaactgggtctttataaaagtaaaaggccaacatttaattattttgcaaagcaacctaagagctaaagatgtaatttttcttgcaattgtaaatcttttgtgtctcctgaagacttcccttaaaattagctctgagtgaaaaatcaaaagagacaaaagacatcttcgaatccatatttcaagcctggtagaattggcttttctagcagaacctttccaaaagttttatattgagattcataacaacaccaagaattgattttgtagccaacattcattcaatactgttatatcagaggagtaggagagaggaaacatttgacttatctggaaaagcaaaatgtacttaagaataagaataacatggtccattcacctttatgttatagatatgtctttgtgtaaatcatttgttttgagttttc

SEQ ID NO: 3309 - DNA, 586 bp, Homo sapiens
atggctcagcggatggtctgggtggacctggagatgacaggattggacattgagaaggaccagattattgagatggcctgtctgataactgactctgatctcaacattttggctgaaggtcctaacctgattataaaacaaccagatgagttgctggacagcatgtcagattggtgtaaggagcatcacgggaagtctggccttaccaaggcagtgaaggagagtacaattacattgcagcaggcagagtatgaatttctgtcctttgtacgacagcagactcctccagggctctgtccacttgcaggaaattcagttcatgaagataagaagtttcttgacaaatacatgccccagttcatgaaacatcttcattatagaataattgatgtgagcactgttaaagaactgtgcagacgctggtatccagaagaatatgaatttgcaccaaagaaggctgcttctcatagggcacttgatgacattagtgaaagcatcaaagagcttcagttttaccgaaataacatcttcaagaaaaaaatagatgaaaagaagaggaaaattatagaaaatggggaaaatgaga

SEQ ID NO: 3310 - DNA, 583 bp, Homo sapiens
tctcagcataggtatgcttactatgaccttccaagtttgacttgtataacatcactgtcaaactttgtcaccctaacttcgtattttttgatacgcactttgcaggatgacctcagggctatgtggattgagtaatgggattcgaatcaatgtattaatatctccatagctgggaaacgtgggttcaatttgccattggtttctgaaagtattcacatcatttgggataccagatagctcaatactctctgagtacattgtgcccttgatttttatctccaagtggcagtttttaaaattggccttttacctggatataaattaattgtgcctgccaccaccatccaacagacctggtgctctaatgccaagttatacacgggacagttgctggcatgtcttcattggctatataaaatgtggccaagaagataggctctcagtaagaagtctgatggtgagcagtaactgtccctgctttctggtataaagctctcaaatgtgaccatgtgaatctgggtgggataatggactcagctctgtctgctcaatgccattgtgcagagaagcaccctaatgcata

SEQ ID NO: 3311 - DNA, 523 bp, Homo sapiens
  misc_feature 519, 520, 521, 523: n = A,T,C or G
ggcacgaggtgcagaaatggcacctcgaaaggggaaggaaaagaaggaagaacaggtcatcagcctcggacctcaggtggctgaaggagagaatgtatttggtgtctgccatatctttgcatccttcaatgacacttttgtccatgtcactgatctttctggcaaagaaaccatctgccgtgtgactggtgggatgaaggtaaaggcagaccgagatgaatcctcaccatatgctgctatgttggctgcccaggatgtggcccagaggtgcaaggagctgggtatcaccgccctacacatcaaactccgggccacaggaggaaataggaccaagacccctggacctggggcccagtcggccctcagagcccttgcccgctcgggtatgaagatcgggcggattgaggatgtcacccccatcccctctgacagcactcgcaggaaggggggtcgccgtggtcgccgtctgtgaacaagattcctcaaaatattttctgttaataaattgccttcatgttnnnan

SEQ ID NO: 3312 - DNA, 622 bp, Homo sapiens
tgttccctgcctaaacttattgctgttcccacaaaggactaagcctgttcataagttaccaaagttgccattttggagatggaaattgacgaggagggaaggtcttttattggagagtatacagtacaagcagatcattctgccttagaggtgctaattcccgaaattagaagaccctttcttttccagtaacgaagttataaatatcagcttgttcatccaagccactggctgaggtgttaggaagaggaagagggtggtagaggaggtaagacagtagggaaagacaagggcccatgctcttagtggggaaaactcttggagccgtttactttgagctttgaacactgaaaccattgttggcagggttcagtcactgacagcacaagtttcactgaattgatccaagagtttagtgatttcaaaagccttggtctcaggagaagattaaactttcatattgggcagtggttcactttaaaacacacacatacacacacaaaacaattttttaagacatcctaataagtaacatacccaaaatgctctgtcttgagtcatgagaaccatcagttcttgatattgtctagacttgcatctagagctacgttgtaaaattctt

SEQ ID NO: 3313 - DNA, 211 bp, Homo sapiens; identical to SEQ ID NO: 540

SEQ ID NO: 3314 - DNA, 500 bp, Homo sapiens
ggcacgagaggaaactctggtggaggtccgtagcggtcctgacgtgcaaatcggtcgtccgacctgggtataggggcgaaagactaatcgaaccatctagtagctggttccctccgaagtttccctcaggatagctggcgctctcgcagacccgacgcacccccgccacgcagttttatccggtaaagcgaatgattagaggtcttggggccgaaacgatctcaacctattctcaaactttaaatgggtaagaagcccggctcgctggcgtggagccgggcgtggaatgcgagtgcctagtgggccacttttggtaagcagaactggcgctgcgggatgaaccgaacgccgggttaaggcgcccgatgccgacgctcatcagaccccagaaaaggtgttggttgatatagacagcaggacggtagccaaggaagccgcagaacaggatgttgaaaagaaaaaataaagccctcctggggacttggaatcaaaaaaaaaaa

SEQ ID NO: 3315 - DNA, 425 bp, Homo sapiens
ggcacgaggcagcgtccaaggcttcctgaatttcaggtgataaacttgtagtagttgacttctcagccacgtggtgtgggccttgcaaaatgatcaagcctttctttcattccctctctgaaaagtattccaacgtgatattccttgaagtagatgtggatgactgtcaggatgttgcttcagagtgtgaagtcaaatgcatgccaacattccagttttttaagaagggacaaaaggtgggtgaattttctggagccaataaggaaaagcttgaagccaccattaatgaattagtctaatcatgttttctgaaaatataaccagccattggctatttaaaacttgtaatttttttaatttacaaaaatataaaatatgaagacataaacccagttgccatctgcgtgacaataaaacattaatgc

SEQ ID NO: 3316 - DNA, 504 bp, Homo sapiens; identical to SEQ ID NO: 542

SEQ ID NO: 3317 - DNA, 300 bp, Homo sapiens
aacattgccttaattgacaggcatcgtgacccagatagttcttaatcattgaaacctgtttctctcctccttatccactggctgcctgggatttgttacctgggaagcagactaccatagcagttaagagcatgagcctaggagtcagacagaccttactttaaagccaggctcttggccaggcacggtggctcatgcttgtaatgccagcactttggaaggccgaggcaggtggatcatgaggtcaggagttcaagaccagcctggccagcatggtgaaatcctatctctaccaaaaat

SEQ ID NO: 3318 - DNA, 284 bp, Homo sapiens
  misc_feature 52: n = A,T,C or G
aatttttgccatcatggctcggttctatacttacatcaacccagcggagatncgaagctcaatttgatgaggatgaaaagaaaaacagactggaaaagagtaacccatatttcatgtcaggggccaattcacagaaacagatgtgaaggtcaggaggcaagtggaggatggactgggcccgcagatgccctgacctctgcccccaggtagcaggacactccattggatggcccctgatgaggaagacttcagaattgggaactaaaccatgaatgctattttct

SEQ ID NO: 3319 - DNA, 422 bp, Homo sapiens
acacacccatcctggtagacggcaaggatgtgatgccaggagtcaacaaggttctggacaacatgaagtctttctgccagcgtgtccggagcggtgactggaaggggtacacaggcaagaccatcacggacgtcatcaacattggcattggcggctccgacctgggacccctcatggtgactgaagcccttaaggcgtactcttcaggaggtccccgcgtctggtatgtctccaacattgatggaactcacattgccaaaaccctggcccagctgaaccccgagtcctccctgttcatcattgcctccaagacctttactacccaggagaccatcacgaatgcagagacggcgaaggagtggtttctccaggcggccaaggatccttctgcagtggcgaagcactttgttgccctgtctact

SEQ ID NO: 3320 - DNA, 575 bp, Homo sapiens; identical to SEQ ID NO: 550

SEQ ID NO: 3321 - DNA, 596 bp, Homo sapiens
ctgggcagccatggcgtcctatttcgatgaacacgactgcgagccgtcggaccctgagcaggagacgcgaaccaacatgctgctggagctcgcaaggtcacttttcaataggatggactttgaagacttggggttggtagtagattgggaccaccacctgcctccaccagctgccaagactgtggttgagaacctccccaggacagtcatcagaggctctcaggctgagctcaagtgccccgtgtgtcttttggaatttgaggaggaggagactgccattgagatgccttgccatcaccttttccattccagctgcattctgccctggctaagcaagacaaattcctgtcccttgtgccgctatgagctgcccactgatgacgacacttatgaggagcacagacgagataaggctcgaaaacagcagcagcaacaccgactggagaacctccatggagccatgtacacgtgaggaggttggggctgagtgctggccctctgcgtcttccttattaaccttgaatcctcattaaaggtttctttacccaccctgaggctgtattgatcacagacctggccaggggctctgcatcctc

SEQ ID NO: 3322 - DNA, 664 bp, Homo sapiens; identical to SEQ ID NO: 551

SEQ ID NO: 3323 - DNA, 529 bp, Homo sapiens
ttatgatcactacctcccgagaccccagttcccgcctcaagatgtttgcaaaggagctgaagctggtgttcccgggcgcccagcgaatgaaccgaggtcgacatgaagtgggggcactggtgcgagcctgcaaagccaacggcgtcaccgatctgctggtcgttcacgagcatcggggcacacctgtggggctcatcgtcagccacctgccctttggtcctactgcctacttcacgctgtgcaatgtggtcatgcggcatgacatcccagacctgggcaccatgtcggaggccaagccccacctcatcacacacggcttctcctcccgcctgggcaagcgggtctctgacatcctccgatacctatttcccgtgcccaaagatgacagccaccgggtcatcaccttcgcaaaccaggacgactacatatcattccggcaccatgtgtataagaagacagaccaccgcaacgtggagctcactgaggtcgggccccgctttgagctgaagctgtacatgatccgtctggg

SEQ ID NO: 3324 - DNA, 553 bp, Homo sapiens; identical to SEQ ID NO: 553

SEQ ID NO: 3325 - DNA, 570 bp, Homo sapiens; identical to SEQ ID NO: 2871

SEQ ID NO: 3326 - DNA, 447 bp, Homo sapiens
tcggctcgagggggcatcggcgtgagcccctgccaacaggctggggttgggaggcctctctgggcctggaggtgggggtgggggcagccaagtccagccactcttcacctggctccctgctctgggccctgcaccagagctgccaccctcttctttctccccagccttctcatttccgcctctccagacactgcgccctccaccctcactctgccattgttccacctcctgacctgctccatctgagctctccagctggcccccaattgctcctctctctctttgctctctttctccctcccctaccagcctcattcttcctccggtagcctctcccacctaacctctgcatcccccagcctcatgtcctgccccatccctatcctgcctgatccctggatctccctcagatcccctcttctcagacagcgccaggccggggtgggg

SEQ ID NO: 3327 - DNA, 377 bp, Homo sapiens
atgtcagacttcgagaactccagggaatttggagccaatgacaacatgggagcctcttcgatcactcaggagacatccctcggaggaaaagaagagtttgttgccaccactgagagcaccacagagaccaaagaacccaagaaggcaaaaaggtcatccaaggaggaagccgagatggcctacaaagacttcctgctccagtccagcaccgtggccgccgaggcccaggacggcccccaggaagcctagacggtgtcgccgcctgctccctgcacccatgacaatcaccttcagaatcatgtcgatcctggggccctcagctcctggggaccccactccctgctctaacacctgcctaggtttttcctactgtcctc

SEQ ID NO: 3328 - DNA, 550 bp, Homo sapiens
taccacgaagttatggaagaattgctgacaccatggtacaaatattcaaaggacttcaagaaaaggtttcagactgaaattcaaacagtgaataaacagttcccatgtgagccattcaaatttttggagccaactctaagactagaatattgtgaagcattggctatgcttagggaagctggagtcgaaatgggagatgaagacgatctgagcacaccaaatgaaaagctgttgggtcatttggtaaaggaaaagtatgatacagatttttatattcttgataaatatccattggctgtaagacctttctataccatgcctgacccaagaaatcccaaacagtccaactcttacgatatgttcatgagaggagaagaaatattgtcaggagctcaaagaatacatgatcctcaactgctaacagagagagctttacatcatggaattgatttggagaaaattaaggcttacattgattccttccgctttggagcccctcctcatgctggtggaggcattggattggaacgagttactatgctgtttctgg

SEQ ID NO: 3329 - DNA, 481 bp, Homo sapiens; identical to SEQ ID NO: 558

SEQ ID NO: 3330 - DNA, 509 bp, Homo sapiens
aacccttttccattgaggaggtggaggttgcacctcctaaggcccatgaagttcgtattaagatggtggctgtaggaatctgtggcacagatgaccacgtggttagtggtaccatggtgaccccacttcctgtgattttaggccatgaggcagccggcatcgtggagagtgttggagaaggggtgactacagtcaaaccaggtgataaagtcatcccactcgctattcctcagtgtggaaaatgcagaatttgtaaaaacccggagagcaactactgcttgaaaaacgatgtaagcaatcctcaggggaccctgcaggatggcaccagcaggttcacctgcaggaggaagcccatccaccacttccttggcatcagcaccttctcacagtacacagtggtggatgaaaatgcagtagccaaaattgatgcagcctcgcctctagagaaagtctgtctcattggctgtggattttcaactggttatgggtctgcagtcattgttgccaag

SEQ ID NO: 3331 - DNA, 593 bp, Homo sapiens
gtgaggtcagcttcacattctcaggaactctccttctttgggccacggaattaacccgagcaggcatggaggcctctgctctcacctcatcagcagtgaccagtgtggccaaagtggtcagggtggcctctggctctgccgtagttttgcccctggccaggattgctacagttgtgattggaggagttgtggctgtgcccatggtgctcagtgccatgggcttcactgcggcgggaatcgcctcgtcctccatagcagccaagatgatgtccgcggcggccattgccaatgggggtggagttgcctcgggcagccttgtggctactctgcagtcactgggagcaactggactctccggattgaccaagttcatcctgggctccattgggtctgccattgcggctgtcattgcgaggttctactagctccctgcccctcgccctgcagagaagagaaccatgccaggggagaaggcacccagccatcctgacccagcgaggagccaactatcccaaatatacctggggtgaaatataccaaattctgcatctccagaggaaaataagaaataaagatgaattgttgcaactctt

SEQ ID NO: 3332 - DNA, 537 bp, Homo sapiens
ggcattcccttcaccctcctgttcctgacggctgtggtccagcgcatcaccgtgcacgtcacccgcaggccggtcctctacttccacatccgctggggcttctccaagcaggtggtggccatcgtccatgccgtgctccttgggtttgtcactgtgtcctgcttcttcttcatcccggccgctgtcttctcagtcctggaggatgactggaacttcctggaatccttttatttttgttttatttccctgagcaccattggcctgggggattatgtgcctggggaaggctacaatcaaaaattcagagagctctataagattgggatcacgtgttacctgctacttggccttattgccatgttggtagttctggaaaccttctgtgaactccatgagctgaaaaaattcagaaaaatgttctatgtgaagaaggacaaggacgaggatcaggtgcacatcatagagcatgaccaactgtccttctcctcgatcacagaccaggcagctggcatgaaagaggaccagaagcaaaatgag

SEQ ID NO: 3333 - DNA, 547 bp, Homo sapiens
  misc_feature 123: n = A,T,C or G
ctggtgtcgccatgggccgccgccccgcccgttgttaccggtattgtaagaacaagccgtacccaaagtctcgcttctgccgaggtgtccctgatgccaagattcgcatttttgacctggggncggaaaaaggcaaaagtggatgagtttccgctttgtggccacatggtgtcagatgaatatgagcagctgtcctctgaagccctggaggctgcccgaatttgtgccaataagtacatggtaaaaagttgtggcaaagatggcttccatatccgggtgcggctccaccccttccacgtcatccgcatcaacaagatgttgtcctgtgctggggctgacaggctccaaacaggcatgcgaggtgcctttggaaagccccagggcactgtggccagggttcacattggccaagttatcatgtccatccgcaccaagctgcagaacaaggagcatgtgattgaggccctgcgcagggccaagttcaagtttcctggccgccagaagatccacatctcaaagaaatggggcttcaccaagttcaatgctg

SEQ ID NO: 3334 - DNA, 273 bp, Homo sapiens
tcctctcaagtgctgtacgcgagctcggcgccacctccgcctccctttcagagcctgctccccgccctctctgctcgctgcattgtggtgttctcttctcaaggctttgaaatctccccttgcactgagattagtcgtcagatctctccccgtctccctcccaacttatacgacctgatttccttaggacggaaccgcaggcacctgcgccgggcgtcttactcccgctgcttgttctgtcccctccctcggaccaaacagtgctcatgcttc

SEQ ID NO: 3335 - DNA, 408 bp, Homo sapiens; identical to SEQ ID NO: 2663

SEQ ID NO: 3336 - DNA, 562 bp, Homo sapiens
gtgcagaccctgtctctaaaagatgggcttattcccttggagatccgcttcctgcacaacccagacgctgcccaaggctttgtgggctgcgcactcagctccaccatccagcgcttctacaagaacgagggaggtacatggtcagtggagaaggtgatccaggtgccccccaagaaagtgaagggctggctgctgcccgaaatgccaggcctgatcaccgacatcctgctctccctggacgaccgcttcctctacttcagcaactggctgcatggggacctgaggcagtatgacatctctgacccacagagaccccgcctcacaggacagctcttcctcggaggcagcattgttaagggaggccctgtgcaagtgctggaggacgaggaactaaagtcccagccagagcccctagtggtcaagggaaaacgggtggctggaggccctcagatgatccagctcagcctggatgggaagcgcctctacatcaccacgtcgctgtacagtgcctgggacaagcagttttaccctgatctcatcagggaaggctctgtgatgctgc

SEQ ID NO: 3337 - DNA, 513 bp, Homo sapiens
ccttctgacccgttggatgacacttgtgatctctttgcccccctagtccaggagactaataagcagcccccccagacggtgaacccaattggccatctcccagaaagtttaacaaaacccgaccaggttgcccccttcaccttcttacaacctcttcccctttccccaggggtcctgtcctccactccagatcattcctttagtttagagctgggcagtgaagtggatatcactgaaggagataggaagccagactacactgcttacgttgccatgatccctcagtgcataaaggaggaagacaccccttcagataatgatagtggcatctgtatgagcccagagtcctatctggggtctcctcagcacagcccctctaccaggggctctccaaataggagcctcccatctccaggtgttctctgtgggtctgcccgtcccaaaccttacgatcctcctggagagaagatggtagcagcaaaagtaaagggtgagaaactggataagaagctg

SEQ ID NO: 3338 - DNA, 456 bp, Homo sapiens
tggttgctggggaagaaaaggaaatttgtcatgaaacctccacaagtcgtccgagtaggaaccaagaaaacttcttttgtcaactttacagatatctgtaaactattacatcgtcagcccaaacatctccttgcatttttgttggctgaattgggtacaagtggttctatagatggtaataaccaacttgtaatcaaaggaagattccaacagaaacagatagaaaatgtcttgagaagatatatcaaggaatatgtcacttgtcacacatgccgatcaccggacacaatcctgcagaaggacacacgactctatttcctacagtgcgaaacttgtcattctagatgttctgttgccagtatcaaaaccggcttccaggctgtcacgggcaagcgagcacagctccgtgccaaagctaactaatttgctaatcactgattttgcaaagcttgttgt

SEQ ID NO: 3339 - DNA, 507 bp, Homo sapiens
  misc_feature 352: n = A,T,C or G
tgcccagtgtatcttggatgctgctttcctgcctcatgctgctgtctcaggttcaaggtgaagaaccccagagggaactgccctctgcacggatccgctgtcccaaaggctccaaggcctatggctcccactgctatgccttgtttttgtcaccaaaatcctggacagatgcagatctggcctgccagaagcggccctctggaaacctggtgtctgtgctcagtggggctgagggatccttcgtgtcctccctggtgaagagcattggtaacagctactcatacgtctggattgggctccatgaccccacacagggcaccgagcccaatggagaaggttgggagtggagtancagtgatgtgatgaattactttgcatgggagagaaatccctccaccatctcaagccccggccactgtgcgagcctgtcgagaagcacagcatttctgaggtggaaagattataactgtaatgtgaggttaccctatgtctgcaagttcactgact

SEQ ID NO: 3340 - DNA, 509 bp, Homo sapiens
tcggctcgagggaggctctcgtgaactagaccgggcatccgaggtggagagctctttctgacagtgctgcttaatccgatcagcatctttatgacccatctgtccaattatggaaatgaccggctgggctatacacctttgagagcttggtgctcttcctccagtgttggacacggctgcgcctacagacccttcctcctgtcccacttgcacagaagtactttgaacttttccctcaggagcgaccgccctttggcagaatccctgtgatgacaagaggcacaaagatatctggtccaaggagaaaacctgtgatcgtctcccgaagttcctcattgtgggaccccagaaaacagggactacagctattcacttcttcctgagcctgcacccagctgtaactagcagcttccctagccccagcacatttgaggagattcagttcttcaacagccctaattaccacaaggggatgtgactggcacatggatttcttccctgttccttcc

SEQ ID NO: 3341 - DNA, 359 bp, Homo sapiens
cggcagggggaacccagggagcgcgatgggctgcagggctgcgtcagggctcctgccaggagtggccgtggtcctcctgctgctgctgcagagcacacagtcagtctacatccagtaccaaggcttccgggtccagctggaatccatgaagaagctgagtgacctggaggcacagtgggcacccagcccccgcctgcaggcccagagcctcctgcccgccgtgtgccaccaccctgctctgcctcaggaccttcagcctgtctgcgcctcgcaggaggcttccagcatcttcaagaccctgaggaccatcgctaacgacgactgtgagctgtgtgtgaacgttgcgtgtaccggctgcc

SEQ ID NO: 3342 - DNA, 310 bp, Homo sapiens
ggtggcgctgagcaaccgcatgcccatgacaggcctcctgctcatgatcctgagcctcatctacctgaagggccgcggcgccagagagagcgccgtctggaacgtgctgcgcatcctggggctgcggccctggaagaagcactccaccttcggggacgtgcggaagctcatcactgaggagttcgtccaaatgaattacctgaagtaccagcgcgtcccatacgtggagccgcccgaatactagttcttttggggctcccgggccagccgcgaaatcaccaagatgcaaatcatggagttcctggccagg

SEQ ID NO: 3343 - DNA, 509 bp, Homo sapiens
aaattccttggagatatcgaagtatgggatcaagctgagaaacaacttgaaaacagtctgaatgaatttggtgaaaagtgggagttaaactctggagatggagctttctatggcccaaagattgacatacagattaaagatgcgattgggcggtaccaccagtgtgcaaccatccagctggatttccagttgcccatcagatttaatcttacttatgtaagccatgatggtgatgataagaaaaggccagtgattgttcatcgagccatcttgggatcagtggaaagaatgattgctatcctcacagaaaactatgggggcaaatggcccttttggctgtcccctcgccaggtaatggtagttccagtgggaccaacctgtgatgaatatgcccaaaaggtacgacaacaattccacgatgccaaattcatggcagacattgatctggatccaggctgtacattgaataaaaagattcgaaatgcacagttagcacagtataacttcat

SEQ ID NO: 3344 - DNA, 535 bp, Homo sapiens
tgctgtgtgccaaaatgttttctgtgtggactgtgatgtttttgttcatgattctctacactgttgccctggctgtattcataagattccagctccttcaggtgtttgattccagcatgtagtatacattgtatgtgttaaaaagaaatttgcaactgtgaataaaaggacttctttagaagaagcttcatttaaaacatgaaaggataatctgacttaagaaactttttgctaagaaaaggtaatattttattaaattttaaatttgtgttgtcacagaaatacctgaaattcagtagtacttcattcaattaattttgttttctattattttgagttatactgttttcaaagtcattatgcagtatgtataaacttataagaattaaattgatgtgataattttatgtttttataattaaatatagaatctttatgatttatgttaattcattaatttagtgtaagaagaaagttaagtctgaaatgtaattcagtgtaagatgaaaatttatcaatacttatgaaattaggc

SEQ ID NO: 3345 - DNA, 434 bp, Homo sapiens
agctgaaaaagatggaatgcttgcagagcatgacctgaggagggaggaacgtggtcaactcacacctgcctcttcctgcagcctcacctctacctgcccccatcataagggcactgagcccttcccaggctggatactaagcacaaagcccatagcactgggctctgatggctgctccactgggttacagaatcacagccctcatgatcattctcagtgagggctctggattgagagggaggccctgggaggagagaagggggcagagtcttccctaccaggtttctacacccccgccaggctgcccatcagggcccagggagcccccagaggactttattcggaccaagcagagctcacagctggacaggtgttgatatagagtggaatctcttggatgcagcttcaagaataaatttttcttctcttttcag

SEQ ID NO: 3346 - DNA, 596 bp, Homo sapiens; identical to SEQ ID NO: 567

SEQ ID NO: 3347 - DNA, 599 bp, Homo sapiens; identical to SEQ ID NO: 569

SEQ ID NO: 3348 - DNA, 494 bp, Homo sapiens
ttagcgaaacctgtctacctgctatagcacactctccgatttgggccatttatgcaccccgcaacctgggatctcaaggagctttaaagtcttaatgggaacttggcattttcctgatgatctttaaaatgtggtcactaaactcaggattggcgtgtgcttttagaacactggagtagcccttgttttagaggctgtgcattgagtatcgaccgtattttgtaaaaggcaagatatcctcccttccaggctggtaacgggtttcaaggggactcttgaggaagtgccccctaaaatagaacacagcaataactgggcttcctgtccccacccccaccccagcagtgctctctggcactgggaactctgctagggagtggtggaagtaggaaggatttgtgtgcaaaggaaaatcgtggttgagtttcactgcagcaggctgacgttgcctgatgtgagagcaagtggccgactggggtgcgggtgcacaggtc

SEQ ID NO: 3349 - DNA, 509 bp, Homo sapiens; identical to SEQ ID NO: 570

SEQ ID NO: 3350 - DNA, 251 bp, Homo sapiens
accatctcaaaaaaataaaataaaataaaatggaagagattccaagattcacctcatttagggatggagctattattataatcagatttctgaaatgagtgctgacttcctctcacatttcacaggaagctagacttcttaaagcttgaagtctccttggtgggttttatttaaattgaattaaaataattattttacagggaaaaatttcaaaacactttgcaactttggggtaaaagttaaataaaaca

SEQ ID NO: 3351 - DNA, 284 bp, Homo sapiens
  misc_feature 97: n = A,T,C or G
cgccgagcgatgggcatctctcgggacaactggcacaagcgccgcaaaaccgggggcaagagaaagccctaccacaagaagcggaagtatgagttgnggcgcccagctgccaacaccaagattggcccccgccgcatccacacagtccgtgtgcggggaggtaacaagaaataccgtgccctgaggttggacgtggggaatttctcctggggctcagagtgttgtactcgtaaaacaaggatcatcgatgttgtctacaatgcatctaataacgagctggttcg

SEQ ID NO: 3352 - DNA, 513 bp, Homo sapiens
cccctcctggtcagtacatggattcttcacttgttaagagttatttataccaaatcctacaggggattgtgttttgtcactctagaagagttcttcacagagacttaaaacctcaaaatctcttgattgatgacaaaggaacaattaaactggctgattttggccttgccagagcttttggaatacctatcagagtatatacacatgaggtagtaacactctggtacagatctccagaagtattgctggggtcagctcgttactcaactccagttgacatttggagtataggcaccatatttgctgaactagcaactaagaaaccacttttccatggggattcagaaattgatcaactcttcaagattttcagagctttgggcactcccaataatgaagtgtggccagaagtggaatctttacaggactataagaatacatttcccaaatggaaaccaagaagcctagcatcccatgtcaaaaacttggatgaaaatggcttggatttgctct

SEQ ID NO: 3353 - DNA, 467 bp, Homo sapiens
gactacactgcatacccctggtttgcaggtaacatggagaggcagcagacggacaacctgctcaagtcccacgccagcgggacctacctgatcagggagcggcctgccgaggctgagcgctttgcaataagcatcaagttcaatgatgaggtgaagcacatcaaggtggtggagaaggacaactggatccacatcacagaggccaagaaattcgacagcctcctggagttggtggagtactaccagtgccactcactgaaggagagcttcaagcagctggacaccacactcaagtacccctacaagtcccgggaacgttcggcctccagggcctccagccggtccccagtgttcacgccccgcgtcatcggcacagctgtggccaggtataactttgccgcccgagatatgagggagctttcgctgcgggagggtgacgtggtgaggatctacagccgcatcggcgg

SEQ ID NO: 3354 - DNA, 497 bp, Homo sapiens
gcaccagctgaagatgcacctgctgacgcacagcagcagccagggccagaggcccttcaaatgccccctgggtggctgcggctggaccttcaccacctcttacaagctcaagaggcacctgcagtcgcacgataaactgcggcccttcggctgccctgcggagggctgtggcaagagcttcaccaccgtgtacaacctcaaggcgcacatgaagggccatgagcaggagaactcgttcaaatgtgaggtgtgcgaggagagcttccccacgcaggccaaactcggcgcccaccagcgcagccacttcgaacccgagaggccttaccagtgcgcgttttctggctgcaagaagacatttatcacagtgagtgctctgttttcccataaccgcgcccatttcagggaacaggaactgttttcctgctctttccctggctgcagcaagcaatatgacaaggcttgtaggctgaaaattcacctgcggagtcacaccggcg

SEQ ID NO: 3355 - DNA, 541 bp, Homo sapiens; identical to SEQ ID NO: 575

SEQ ID NO: 3356 - DNA, 383 bp, Homo sapiens
gtcggtatgctctggcatcccatactcttttgggggcaggggtccatcctccaggcatccatgtccaccatagaatttggttacttggactatgcccagtctcggttccagttctacttccagcagaaggggcagctgaccagtgtccactcctcatcctgactccaccctcccactccttggatttctcctggagcctccagggcaggaccttggagggaggaacaactagcagaaggccctggcgactgggctgagcccccaagtgaaactgaagttcaggagaccggcctgttcctgagtttgactctattgccaccatcctcacgagactctggtgccccccatgctcccagacctttgagcaaccttcaccgcacaga

SEQ ID NO: 3357 - DNA, 552 bp, Homo sapiens
aagctcggaattcggctcgagcttgatcctcagaactcaaattccccactcacccatggctgcctggactctcttgcaagcacgacagacatctgccaagccaaacaggcccgaaaccactctggcaccaccatacccacattggaatgctgtcatgaagacatgtgcaattacagagggctgcacgatgttctctctcctcccaggggtgaggcctcaggacaaggaaacaggtatcagcatgatggtagcagaaaccttatcaccaaggtgcaggagctgacttcttccaaagagttgtggttccgggcagcggtcattgccgtgcccattgctggagggctgattttagtgttgcttattatgttggccctgaggatgcttcgaagtgaaaataagaggctgcaggatcagcggcaacagatgctctcccgtttgcactacagctttcacggacaccattccaaaaaggggcaggttgcaaagttagacttggaatgcatggtgccggtcagtgggcacgagaactgctgtctgacctgtgataaaatg

SEQ ID NO: 3358 - DNA, 561 bp, Homo sapiens; identical to SEQ ID NO: 576

SEQ ID NO: 3359 - DNA, 543 bp, Homo sapiens
taagctcggaattcggctcgagcagatgttccacaccagcgtccccatgctcaaccttcccccagacctgttccgtctgttcaggaccaagacctggaaggaccatgtggctgcatgggacgtgattttcagtaaagctgacatatacacccagaacttctactgggaattgagacgacgtccatgaccctgcagtggcacttgtatgagatggcacgcaacctgaaggtgcaggatatgctgcgggcagaggtcttggctgcgcggcaccaggcccagggagacatggccacgatgctacagctggtccccctcctcaaagccagcatcaaggagacactaagacttcaccccatctccgtgaccctgcagagatatcttgtaaatgacttggttcttcgagattacatgattcctgccaagacactggtgcaagtggccatctatgctctgggccgagagcccaccttcttcttcgacccggaaaattttgacccaacccgatggctgagcaaagacaagaacatcacctacttccggaac

SEQ ID NO: 3360 - DNA, 528 bp, Homo sapiens
tacatcggtctggccgggctcgccactgacgtccagacagttgcccagcgcctcaagttccggctgaacctgtatgagttgaaggaaggtcggcagatcaaaccttataccctcatgagcatggtggccaacctcttgtatgagaaacggtttggcccttactacactgagccagtcattgccgggttggacccgaagacctttaagcccttcatttgctctctagacctcatcggctgccccatggtgactgatgactttgtggtcagtggcacctgcgccgaacaaatgtacggaatgtgtgagtccctctgggagcccaacatggatccggatcacctgtttgaaaccatctcccaagccatgctgaatgctgtggaccgggatgcagtgtcaggcatgggagtcattgtccacatcatcgagaaggacaaaatcaccaccaggacactgaaggcccgaatggactaaccctgttcccagagcccacttttttttctttttttgaaataaaatagcctgtctttc

SEQ ID NO: 3361 - DNA, 485 bp, Homo sapiens
  misc_feature 84: n = A,T,C or G
tcccatgcttcctgcctctgtgtgcatgtccgttccgaggaatgggatttaatgacctttgatgccaacccatatgacagcgtngaaaaaaatcaaagaacatgtccggtctaagaccaaggttcctgtgcaggaccaggttcttttgctgggctccaagatcttaaagccacggagaagcctctcatcttatggcattgacaaagagaagaccatccaccttaccctgaaagtggtgaagcccagtgatgaggagctgcccttgtttcttgtggagtcaggtgatgaggcaaagaggcacctcctccaggtgcgaaggtccagctcagtggcacaagtgaaagcaatgatcgagactaagacgggtataatccctgagacccagattgtgacttgcaatggaaagagactggaagatgggaagatgatggcagattacggcatcagaaagggcaacttactcttcctggcatgttattgtattg

SEQ ID NO: 3362 - DNA, 593 bp, Homo sapiens; identical to SEQ ID NO: 583

SEQ ID NO: 3363 - DNA, 311 bp, Homo sapiens
taagctcgggattcggctcgaaattaagctcgtgtaacggcggcggtgtcggcagctgctgtagcgaagagagtttggcgcgatgtctcacaccattttgctggtacagcctaccaagaggccagaaggcagaacttatgctgactacgaatctgtgaatgaatgcatggaaggtgtttgtaaaatgtatgaagaacatctgaaaagaatgaatcccaacagtccctctatcacatatgacatcagtcagttgtttgatttcatcgatgatctggcagacctcagctgcctggtttaccgagctgataccc

SEQ ID NO: 3364 - DNA, 559 bp, Homo sapiens
cgggaaatacaaggaatattttttaaagaggattctcataaggaaagcaatgactgttcttgcgggggataaaaaagggcttgggagattcatgcgatgtgtccaatcggagacaaaagcagtttctctccaactccctctgggaaggtgacctggccagagccaagaaacactttcagaaaaacaaatgtgaaggggagagacaggggccgcccttggctcctgtccctgctgctcctctaggcctcactcaacaaccaagcgcctggaggacgggacagatggacagacagccaccctgagaacccctctgggaaaatctattcctgccaccactgggcaaacagaagaatttttctgtctttggagagtattttagaaactccaatgaaagacactgtttctcctgttggctcacagggctgaaaggggctttttgtcctcctgggtcagggagaacgcggggaccccagaaaggtcagccttcctgaagatgggcaacccccaggtctgcagctccaggtacatatcacgcgcacagcctggcagcctggccctc

SEQ ID NO: 3365 - DNA, 586 bp, Homo sapiens
ggaattcgaattcccgatggaggtttcaaagatgtagctagcattttgaaaccatatgggcaaaacccggcaaccagaaggggacagataaggaccgttccagaaatcccaactctcacacccagcccaggctgcagtctccacaccaaacagtcaacaaaacacaaaccctgaaggaaaaccttttccatacacccaggctatgcattgaagagttttccactgtatacatttttatccagatgaaggtatttttatattttgacaataggaaacagtgaccattttcagagtaatcaaatctggaacaaatgaaacatcttttagccaccaccaccctgttgcaattaagacaaccgtgggggaacacaccactttttactgttgaaaccaacacaacgttgaaatccaggcttatacgcagactccgattcctagagaactaaatttggctttagtgtgacgggatttgattaagcacttagtatagtcttttgaacacggaaatcctgttgtacttaaagctagcggacccgtgaacaactttgtcaggttcacgtcctataacggttaaaaaacacacaca

SEQ ID NO: 3366 - DNA, 592 bp, Homo sapiens; identical to SEQ ID NO: 2633

SEQ ID NO: 3367 - DNA, 575 bp, Homo sapiens; identical to SEQ ID NO: 585

SEQ ID NO: 3368 - DNA, 590 bp, Homo sapiens; identical to SEQ ID NO: 586

SEQ ID NO: 3369 - DNA, 511 bp, Homo sapiens
agctcgggattcggctcgagccggcccatcgtgcgctgccccacggttcggtaccacacgaaggtgcgcgccggccgcggcttcagcctggaggagctcagggtggccggcattcacaagaaggtggcccggaccatcggcatttctgtggatccgaggaggcggaacaagtccacggagtccctgcaggccaacgtgcagcggctgaaggagtaccgctccaaactcatcctcttccccaggaagccctcggcccccaagaagggagacagttctgctgaagaactgaaactggccacccagctgaccggaccggtcatgcccgtccggaacgtctataagaaggagaaagctcgagtcatcactgaggaagagaagaatttcaaagccttcgctagtctccgtatggcccgtgccaacgcccggctcttcggcatacgggcaaaaagagccaaggaagccgcagaacaggatgttgaaaagaaaaaataaagccctcctggggacttgg

SEQ ID NO: 3370 - DNA, 525 bp, Homo sapiens; identical to SEQ ID NO: 2745

SEQ ID NO: 3371 - DNA, 553 bp, Homo sapiens
cgcacatgatgtctggcaccagactcgtcaggaccaactgcgggccctgaccaccgtcacagcacttgtgaggaagttcctggggccagtgccagtgtaccctgctgtgggtaaccatgaaagcacacctgtcaatagcttccctccccccttcattgagggcaaccactcctcccgctggctctatgaagcgatggccaaggcttgggagccctggctgcctgccgaagccctgcgcaccctcagaattggggggttctatgctctttccccataccccggtctccgcctcatctctctcaatatgaatttttgttcccgtgagaacttctggctcttgatcaactccacggatcccgcaagacagctccagtggctggtgggggagcttcaggctgctgaggatcgaggagacaaagtgcatataattggccacattcccccagggcactgtctgaagagctggagctggaattattaccgaattgtagccaggtatgagaacaccctggctgctcagttctttggccacactcatgtggatgaatttgag

SEQ ID NO: 3372 - DNA, 401 bp, Homo sapiens
ccgtgcgttgcgttccaggcatctgtgagcccgcggagtatacaccatgagcaaagctcaccctcccgagttgaaaaaatttatggacaagaagttatcattgaaattaaatggtggcagacatgtccaaggaatattgcggggatttgatccctttatgaaccttgtgatagatgaatgtgtggagatggcgactagtggacaacagaacaatattggaatggtggtaatacgaggaaatagtatcatcatgttagaagccttggaacgagtataaataatggctgttcagcagagaaacccatgtcctctctccatagggcctgttttactatgatgtaaaaattaggtcatgtacattttcatattagactttttgttaaataaacttttgtaatagt

SEQ ID NO: 3373 - DNA, 595 bp, Homo sapiens
taagctcgggattcggctcgagcagtgaccaggaggaccaccgttctgaagagaagagcaaggagcccctgcaggacaacgtgatcgccacctacgaggagcacgaggacagcgtctatgccgtggactggtcctcggctgacccgtggctgtttgcctccctgagctatgacgggaggctcgtgatcaacagggtgcccagggccctgaagtaccacatcctgctatgactcccgggcctgggttatccaggtcccattgagtggttttcctcttggcagattctcaaacagtcgcagctctttggaggtgactcgtgttccaggtggatccctctctgggagagccgctgttcccttcctgtagcagcagcatttatgaatggggtgaatggggctattgtcgacggcacagctaatgcccgaacccagcccctgtcggcagagacagagccccacattattatgtgaataacaatgttttctgttttaagggtgtcaggagtttcgctttttaaaaaaatgtctgttcctgcagtagtaactcttctttctcttgagagtaaaaaatgaaataaaataaatccacgctgcaa

SEQ ID NO: 3374 - DNA, 529 bp, Homo sapiens
ccgtggtggagatggatggtgatgagatgacccgtattatctggcagttcatcaaggagaagctcatcctgccccacgtggacatccagctaaagtattttgacctcgggctcccaaaccgtgaccagactgatgaccaggtcaccattgactctgcactggccacccagaagtacagtgtggctgtcaagtgtgccaccatcacccctgatgaggcccgtgtggaagagttcaagctgaagaagatgtggaaaagtcccaatggaactatccggaacatcctgggggggactgtcttccgggagcccatcatctgcaaaaacatcccacgcctagtccctggctggaccaagcccatcaccattggcaggcacgcccatggcgaccagtacaaggccacagactttgtggcagaccgggccggcactttcaaaatggtcttcaccccaaaagatggcagtggtgtcaaggagtgggaagtgtacaacttccccgcaggcggggtgggcatgggcatgtacaacaccga

SEQ ID NO: 3375 - DNA, 517 bp, Homo sapiens
ctacagtcactttcctgtgggggctgccctgctcacccaggaggggagaatcttcaaagggtgcaacatagaaaatgcctgctacccgctgggcatctgtgctgaacggaccgctatccagaaggccgtctcagaagggtacaaggatttcagggcaattgctatcgccagtgacatgcaagatgattttatctctccatgtggggcctgcaggcaagtcatgagagagtttggcaccaactggcccgtgtacatgaccaagccggatggtacgtatattgtcatgacggtccaggagctgctgccctcctcctttgggcctgaggacctgcagaagactcagtgacagccagagaatgcccactgcctgtaacagccacctggagaacttcataaagatgtctcacagccctggggacacctgcccagtgggccccagccctacagggactgggcaaagaatgatgtttccagattacactccagcctgagtcagcacccctcctagcaacctgcc

SEQ ID NO: 3376 - DNA, 644 bp, Homo sapiens
caaactatttaaattttaaaacagtaaaacaaaatgaaacttaatagctcacaaaattccagtccatgtttcatgacttattttagtcaatgaattttctatttatactaaacatatggacattttaaatgtgtttctaatatttttgattatctataatgtgcctgtcttcaattcacaagattgggttataacaattatttgccagattaacactagggaattatttgataaccagcttatcttatcagtagttttattgctgatcaggcaaaaatagttttccaaagttatttttaataaagtatatacaaaattcttatatattactagtcatgataaagtaaattaagcagtttttaaaacttagtgtgagtttgttcatcacaggtctgatatgagtttaagggatttcgcactccctgaatcagagaagtaagaccccttccttagattcctgttatacattttttaaaatgtagagtttgttttggagacattttcagtgcattgttattgccatatttatataatatgactattctaaaggctgtgaggccatggggtattggttaagttgcttgcttttgctttgtccattttcatcattttaaaatgggggataataacagaacttgtttcct

SEQ ID NO: 3377 - DNA, 559 bp, Homo sapiens
cgctgtggttgctgtccgcggagtggaagcgcgtgcttttgtttgtgtccctggccatggcgctgcagctctcccgggagcagggaatcaccctgcgcgggagcgccgaaatcgtggccgagttcttctcattcggcatcaacagcattttatatcagcgtggcatatatccatctgaaacctttactcgagtgcagaaatacggactcaccttgcttgtaactactgatcttgagctcataaaatacctaaataatgtggtggaacaactgaaagattggttatacaagtgttcagttcagaaactggttgtagttatctcaaatattgaaagtggtgaggtcctggaaagatggcagtttgatattgagtgtgacaagactgcaaaagatgacagtgcacccagagaaaagtctcagaaagctatccaggatgaaatccgttcagtgatcagacagatcacagctacggtgacatttctgccactgttggaagtttcttgttcatttgatctgctgatttatacagacaaagatttggttgtacctgaaaaatggga

SEQ ID NO: 3378 - DNA, 376 bp, Homo sapiens
ccgttcaccgcctccagctgctgctctcctcgacatggaccctgagacctgcccctgcccttctggtggctcctgcacctgcgcggactcctgcaagtgcgagggatgcaaatgcacctcctgcaagaagagctgctgctcctgctgccctgcggagtgtgagaagtgtgccaaggactgtgtgtgcaaaggcggagaggcagctgaggcagaagcagagaagtgcagctgctgccagtgagaaggcacccctccgtgtggagcacgtggagatagtgccaggtggctcagtgccacctatgcctgtggtgaagtgtggctggtgtccccttcccctgctgaccttggaggaatgacaataaatcccatgaacagc

SEQ ID NO: 3379 - DNA, 515 bp, Homo sapiens
tgccaagtggagcacccaagcgtaacgagccctctcacagtggaatggagtgcacggtctgaatctgcacagagcaagatgctgagtggagtcgggggctttgtgctgggcctgctcttccttggggccgggctgttcatctacttcaggaatcagaaaggacactctggacttcagccaacaggattcctgagctgaagtgcagatgacaatttaaggaagaatcttcttccccagctttgcaggatgaaaagctttcccgcctggctgttattcttccacgagagagggctttctcaggacctagttgctactggttcagcaactgcagaaaatgtcctcccttgtggcttcctcagttcctgcccttggcctgaagtcccagcattgatggcagcgcctcatcttcaacttttgtgctcccctttgcctaaaccctatggcctcctgtgcatctgtactcaccctgtaccacaaacacattacattattaaatgtttctcaaagatggaaaa

SEQ ID NO: 3380 - DNA, 320 bp, Homo sapiens; identical to SEQ ID NO: 597

SEQ ID NO: 3381 - DNA, 469 bp, Homo sapiens
gacactgactgggcccatcaggacagtgctcaggctggagaagtggatcacaccttgttgggacaatgcacaggtgccggctacttcatgcagttcagcaccagctcggggtccgcggaagaggcagccctactggagtctcggattctttacccaaagaggaagcagcagtgcctgcaatttttctataaaatgacgggaagtccttcagacagactcgttgtctgggtcaggagggatgacagcacaggcaatgttcgcaagttggtgaaggtgcagacttttcaaggagatgatgaccacaattggaaaattgcccatgtggtgctcaaagaggaacagaagtttcgctaccttttccagggcacaaaaggcgaccctcagaactcaactgggggaatttacctagatgacatcactctgacagaaaccccctgccccacaggggtctggacagtccggaatttct

SEQ ID NO: 3382 - DNA, 660 bp, Homo sapiens; identical to SEQ ID NO: 600

SEQ ID NO: 3383 - DNA, 494 bp, Homo sapiens; identical to SEQ ID NO: 601

SEQ ID NO: 3384 - DNA, 559 bp, Homo sapiens
  misc_feature 500: n = A,T,C or G
taagctcggaattcggctcgaggacagcttccctatcgccgggatctatgacacaaccacagacaacaagtgcagcatcaagacggccgtggccaagaacatgctggaccccatcactgggcagaagctactggaggcccaggcggccacagggggcatcgtggacctgctcagccgtgagcgctactctgtgcacaaggcgatggagaggggcctgatcgagaacacctccacacagaggctgcttaacgcccagaaggccttcaccggcatcgaggaccccgtcaccaagaagaggctctcggtgggcgaggccgtccagaagggctggatgccccgggagagcgtgctcccacacctgcaggtgcagcacctgaccggggggctcatcgaccccaagaggacaggccgcatccccatccagcaggccctcctctccgggatgatcagtgaagagctggcccagctcctgcaggacgagtccagctacgagaaggatntgacagaccccatctccaaggaacggctgagctacaaggaggccatgggccgctgccgc

SEQ ID NO: 3385 - DNA, 177 bp, Homo sapiens
aaagaagactgtggaatctgtttatcggtgcccattatatccttaagtttggatatttagctgaccttcgctttaacataggtctaatttatttgccgtgtcattttccatacaaatcagttgatttaaaaaagttcatttctcatactgtgcattaaaataaaaatttgaacactt

SEQ ID NO: 3386 - DNA, 505 bp, Homo sapiens
  misc_feature 379: n = A,T,C or G
gttgatttgcctcttaagcaagagattcattgcagctcagcatggctcagaccagctcatacttcatgctgatctcctgcctgatgtttctgtctcagagccaaggccaagaggcccagacagagttgcccaggcccggatcagctgcccagaaggcaccaatgcctatcgctcctactgctactactttaatgaagaccgtgagacctgggttgatgcagatctctattgccagaacatgaattcgggcaacctggtgtctgtgctcacccaggccgagggtgcctttgtggcctcactgattaaggagagtggcactgatgacttcaatgtctggattggcctccatgaccccaaaaagaaccgccgctggcctggnagccagtgggtcccctggtctcctacaagtcctgggggcattggagccccaagcagtgttaatcctggctactgtgtgagcctgacctcaagcacaggattccagaaatggaaaggatgtgccttg

SEQ ID NO: 3387 - DNA, 447 bp, Homo sapiens
gaaaaataactaaacatgggcaaaggagatcctaagaagccgagaggcaaaatgtcatcatatgcattttttgtgcaaacttgtcgggaggagcataagaagaagcacccagatgcttcagtcaacttctcagagttttctaagaagtgctcagagaggtggaagaccatgtctgctaaagagaaaggaaaatttgaagatatggcaaaagcggacaaggcccgttatgaaagagaaatgaaaacctatatccctcccaaaggggagacaaaaaagaagttcaaggatcccaatgcacccaagaggcctccttcggccttcttcctcttctgctctgagtatcgcccaaaaatcaaaggagaacatcctggcctgtccattggtgatgttgcgaagaaactgggagagatgtggaataacactgctgcagatgacaagcagccttat

SEQ ID NO: 3388 - DNA, 567 bp, Homo sapiens; identical to SEQ ID NO: 603

SEQ ID NO: 3389 - DNA, 567 bp, Homo sapiens
aggaggtccggaccctatttgtcagtggccttcctctggatatcaaacctcgggagctctatctgcttttcagaccatttaagggctatgagggttctcttataaagctcacatctaaacagcctgtaggttttgtcagttttgacagtcgctcagaagcagaggctgcaaagaatgctttgaatggcatccgcttcgatcctgaaattccgcaaacactacgactagagtttgctaaggcaaacacgaagatggccaagaacaaactcgtagggactccaaaccccagtactcctctgcccaacactgtacctcagttcattgccagagagccatatgagctcacagtgcctgcactttaccccagtagccctgaagtgtgggccccgtaccctctgtacccagcggagttagcgcctgctctacctcctcctgctttcacctatcccgcttcactgcatgcccagatgcgctggctccctccctccgaggctacttctcagggctggaagtcccgtcagttctgctgaatactatgtcccaggtgtgtgatggcggctgcaatct

SEQ ID NO: 3390 - DNA, 569 bp, Homo sapiens
  misc_feature 528: n = A,T,C or G
aactttgccgttgaagctgctaactaccaagacactattggccgcctgcaggatgagattcagaatatgaaggaggaaatggctcgtcaccttcgtgaataccaagacctgctcaatgttaagatggcccttgacattgagattgccacctacaggaagctgctggaaggcgaggagagcaggatttctctgcctcttccaaacttttcctccctgaacctgagggaaactaatctggattcactccctctggttgatacccactcaaaaaggacacttctgattaagacggttgaaactagagatggacaggttatcaacgaaacttctcagcatcacgatgaccttgaataaaaattgcacacactcagtgcagcaatatattaccagcaagaataaaaaagaaatccatatcttaaagaaacagctttcaagtgcctttctgcagtttttcaggagcgcaagatagatttggaataggaataagctctagttcttaacaaccgacactcctacaagatttagaanaaagtttacaacataatctagtttacagaaaaatcttgtgc

SEQ ID NO: 3391 - DNA, 501 bp, Homo sapiens
agtaattcctggggttctgtctttggtagcatcaccagggatatttgggtgggacagacagaagacacacagctgcctgttctctcctgcccatcatgtttggcccactagatgaagctgtactcagcaatttagggaatgtaacccttctcagaactggccattttcaggggaagcttgggagagcaatagtatggtgagccccttagagatgagcgcctactccttcttggcgaatgctgccttcagatgcttaccaagtggtcactgcatctagtaagattatatttccagtacacttccttagggcagaaacaccatcctatcaggtttggtcagtcccttcttcatgaagggagtcatggggaattcctgaaaattttcttccttctgcagacagttggatgagtcccttagagaaggcatccagagacataactaaactgaatatcatcccatattgattttaggaattgactctaaaactctgtgcagaatctt

SEQ ID NO: 3392 - DNA, 525 bp, Homo sapiens; identical to SEQ ID NO: 611

SEQ ID NO: 3393 - DNA, 73 bp, Homo sapiens
cctccacctgctgctgctgggggccgccctgccctgggcatccaagggggtcagtccgagtgcctcatcctgg

SEQ ID NO: 3394 - DNA, 570 bp, Homo sapiens; identical to SEQ ID NO: 2559

SEQ ID NO: 3395 - DNA, 476 bp, Homo sapiens; identical to SEQ ID NO: 613

SEQ ID NO: 3396 - DNA, 246 bp, Homo sapiens
ctgtactggagccacccgcgaaaattcggccagggttctcgctcttgtcgtgtctgttcaaaccggcacggtctgatccggaaatatggcctcaatatgtgccgccagtgtttccgtcagtacgcgaaggatatcggtttcattaagttggactaaatgctcttccttcagaggattatccggggcatctactcaatgaaaaaccatgataattctttgtatataaaataaacatttgaaaaaacc

SEQ ID NO: 3397 - DNA, 556 bp, Homo sapiens; identical to SEQ ID NO: 617

SEQ ID NO: 3398 - DNA, 470 bp, Homo sapiens; identical to SEQ ID NO: 622

SEQ ID NO: 3399 - DNA, 254 bp, Homo sapiens
cggctcgagctgtgatggataaagtcaaggagaaggccaaagaagaagaccgtgaaaagcttggtgaaaaagaagaaacaattcctcctgattatagattagaagaggtcaaggataaagatggaaagccactcctgccaaaagagtctaaggaacagcttccacccatgagtgaagacttccttctggatgctttgtctgaggacttctctggtccacaaaatgcttcatctcttaaatttgaagatgctaaa

SEQ ID NO: 3400 - DNA, 514 bp, Homo sapiens
ccattcaatgtccctgaaaaacagctgaatgatattgaagattgtgacctcaatgtggtgagactgtgttttcaagtttttctccctgatgaacatggtaatttgacgactgctcttcctcctgttgtctcgaacccaatttatgacaaccgtgctccaaatactgcagaattaaggatttgtcgtgtaaacaagaattgtggaagtgtcagaggaggagatgaaatatttctactttgtgacaaagttcagaaagatgacatagaagttcgttttgtgttgaacgattgggaagcaaaaggcatcttttcacaagctgatgtacaccgtcaagtagccattgttttcaaaactccaccatattgcaaagctatcacagaacccgtaacagtaaaaatgcagttgcggagaccttctgaccaggaagttagtgaatctatggattttagatatctgccagatgaaaaagatacttacggcaataaagcaaagaaacaaaagacaactctgcttt

SEQ ID NO: 3401 - DNA, 288 bp, Homo sapiens
gtgccggagggacaaaaagcaatgcaagagtcgctttgttacacctttcaagtgtctcgtgggtgaatttgtaagtgatgtcctgctagttccagaaaagtgccagtttttccacaaagagcggatggaggtgtgtgagaatcaccagcactggcacacggtagtcaaagaggcatgtctgactcagggaatgaccttatatagctacggcatgctgctcccatgtggggtagaccagttccatggcactgaatatgtgtgctgccctcagacaaagattattggatc

SEQ ID NO: 3402 - DNA, 521 bp, Homo sapiens; identical to SEQ ID NO: 624

SEQ ID NO: 3403 - DNA, 435 bp, Homo sapiens
gggttgaggacatccagaggccattgacctggcggagaagagcagcagccccgcccctgagttcctggccagcagcccccctgacaacaagtcccctgatgaagccaccgcggctgaccaggagtcataggatgacctgagcgcctcgcgcacatcgctggagcgccaggccccgcaccgcggcaacacaatggtgcacgtgtgctggcaccgcaacaccagcgtctccatggtggacttcagcatcgcagtggagaatcagttgtctggaaacctgctgaggaaattcaaaaacagcaacgggtggcataagctgtgggtggtgttcacaaacttctgcctgttcttctacaaatcacaccaggacaatcatccccttgccagcctgcctctgctcggctactcgctcaccatcccctctgagtccgagaacat

SEQ ID NO: 3404 - DNA, 509 bp, Homo sapiens
acgcagctgctgcatggaatcttttcatgtcccggccagaggataacttcttaattaaccttgaccatgtggaatttaagcatttccgtttccttgtcattgaagcaattttggccactgacctgaagaaacactttgacttcgtagccaaatttaatggcaaggtaaatgatgatgttggaatagattggaccaatgaaaatgatcgtctactggtttgtcaaatgtgtataaagttggctgatatcaatggtccagctaaatgtaaagaactccatcttcagtggacagatggtattgtcaatgaattttatgaacagggtgatgaagaggccagccttggattacccataagccccttcatggatcgttctgctcctcagctggccaaccttcaggaatccttcatctctcacattgtggggcctctgtgcaactcctatgattcagcaggactaatgcctggaaaatgggtggaagacagcgatgagtcaggagatactggtgac

SEQ ID NO: 3405 - DNA, 458 bp, Homo sapiens
ccgcatcgtggagaccgaggcatacctggggccagaggatgaagccgcccactcaaggggtggccggcagaccccccgcaaccgaggcatgttcatgaagccggggaccctgtacgtgtacatcatttacggcatgtacttctgcatgaacatctccagccagggggacggggcttgcgtcttgctgcgagcactggagcccctggaaggtctggagaccatgcgtcagcttcgcagcaccctccggaaaggcaccgccagccgtgtcctcaaggaccgcgagctctgcagtggcccctccaagctgtgccaggccctggccatcaacaagagctttgaccagagggacctggcacaggatgaagctgtatggctggagcgtggtcccctggagcccagtgagccggctgtagtggcagcagcccgggtgggcgtcggccatgcaggggagtgggccc

SEQ ID NO: 3406 - DNA, 580 bp, Homo sapiens; identical to SEQ ID NO: 628

SEQ ID NO: 3407 - DNA, 584 bp, Homo sapiens; identical to SEQ ID NO: 629

SEQ ID NO: 3408 - DNA, 477 bp, Homo sapiens; identical to SEQ ID NO: 633

SEQ ID NO: 3409 - DNA, 384 bp, Homo sapiens
taatttcaatctttttcttgaatatggcttgagaatgataatgtaaaaggaattcttctcttacttcaataaaatgggttttaacataactttaaattcagttaaatatacaatattgaatacctatagttgactttgggatggggactttttcaagtcattaagagtgtttgtttaaggtgatctcattgatggtagttctcagccgtctcaaaaactgcaagctaatcagtcagacattctttaatgaccccaattttttcactttaattgttaccatgttttctatttttactgatttttgctaaagcatgtaagagtgaatttattatagcagtaatcttgtgtttctcctgatgtgcaataaatcaataattcaccagc

SEQ ID NO: 3410 - DNA, 371 bp, Homo sapiens
gtaagctcgggaattcggctcgaggccgccgccatgatcatccctgtacgctgcttcacttgtggcaagatcgtcggcaacaagtgggaggcttacctggggctgctgcaggccgagtacaccgagggggacgcgctggatgccctgggcctgaagcgctactgctgccgccggatgctgctggcccacgtggacctgatcgagaagctgctcaattatgcacccctggagaagtgaccacgctgaaacccacccacccgctgtgctgaccatgggccctgagcgtcctaccccgaattcacgaggctgaggcatccgggagctggcgtaatgcctggccgcagtgtgtgtgtatcccataccccactctg

SEQ ID NO: 3411 - DNA, 501 bp, Homo sapiens
tccaaaacacagcattttgtcagtgcaaaaacaatgccagagctgtacgaccttgttaacagctataaacctgatctgatctggtctgatggggagtgggaatgtcctgatacttactggaactccacaaattttctttcatggctctacaatgacagccctgtcaaggatgaggtggtagtaaatgaccgatggggtcagaactgttcctgtcaccatggaggatactataactgtgaagataaattcaagccacagagcttgccagatcacaagtgggagatgtgcaccagcattgacaagttttcctggggctatcgtcgtgacatggcattgtctgatgttacagaagaatctgaaatcatttcggaactggttcagacagtaagtttgggaggcaactatcttctgaacattggaccaactaaagatggactgattgttcccatcttccaagaaaggcttcttgctgttgggaaatggctgagcatcaatggggag

SEQ ID NO: 3412 - DNA, 438 bp, Homo sapiens
ggcgctgtgaccggcgcggctcagggcataggcagagcctttgcagaggcgctgctgcttaagggcgccaaggtagcgctggtggattggaatcttgaagcaggtgtacagtgtaaagctgccctggatgagcagtttgaacctcagaagactctgttcatccagtgcgatgtggctgaccagcaacaactgagagacacttttagaaaagttgtagaccactttggaagactggacattttggtcaataatgctggagtgaataatgagaaaaactgggaaaaaactctgcaaattaatttggtttctgttatcagtggaacctatcttggtttggattacatgagtaagcaaaatggaggtgaaggcggcatcattatcaatatgtcatctttagcaggactcatgcccgttgcacagcagccggtttattgtgct

SEQ ID NO: 3413 - DNA, 438 bp, Homo sapiens
gagggggcagccatccttttctcagtgatcatcgtggtgttagtgactgcctttaatgattggagcaaagagaagcaattccgggggctgcagtgccgcattgaacaggagcaaaagttctccatcatccgaaacggtcaactcatccagctccctgtggctgagattgtggttggtgatattgcccaagtcaaatacggtgatctgctgcctgcagatggaatcctgatccaagggaatgatctgaagattgatgagagctctctgacaggggaatctgaccatgtcaagaagtccctggacaaagaccccatgttgctctcagggacccatgtcatggaaggttctggccggatggtggtgacagctgttggtgtcaactctcagactggaatcatccttactctcttgggggtcaatgaggatgacgaaggggag

SEQ ID NO: 3414 - DNA, 509 bp, Homo sapiens
taaatagagcaaatgtaaacaaaagtgcatttttgtattcttgttaattttagatgctttcctagcttacaaaaagttctatttttgggttaaaaatcaatcaactttctgatatttccccttctgcaatgttattgttcataagaaaacacgagctgaaaatggaaatctgcagttgtttcagttgtcttgaatttctttcagtggccacatcatttccacgttttccacatccgggaggaagcctggactgtgcagccttcgggcacccggcacagacactgtgctggcaggagcttcagacacgccaagtggatggatttggattgaacgcatatgaaacaggagacgggttctcatgtgagatcaaagctcctccaaagcctgttcaagctctaagcgattctcaaatgttaccatttattaaaggtaaactacacctgttgaaggccaagttcagggcagctgttgtgatctgtgtagttaatgtatttattaatgcttgactt

SEQ ID NO: 3415 - DNA, 562 bp, Homo sapiens; identical to SEQ ID NO: 634

SEQ ID NO: 3416 - DNA, 597 bp, Homo sapiens
gaatggaaggatggagcatcaacagcagggtgggcttgtggggcctgggaggggcaatcctcaaatgcggggtgggggcagcacaggagggcggcctccttctgagctcctgtcccctgctacacctattatcccagctgcctagattcagggaaagtgggacagcttgtaggggaggggctcctttccataaatccttgatgattgacaacacccatttttccttttgccgaccccaagagttttgggagttgtagttaatcatcaagagaatttggggcttccaagttgttcgggccaaggacctgagacctgaagggttgactttacccatttgggtgggagtgttgagcatctgtccccctttagatctctgaagccacaaataggatgcttgggaagactcctagctgtcctttttcctctccacacagtgctcaaggccagcttatagtcatatatatcacccagacataaaggaaaagacacattttttaggaaatgtttttaataaaagaaaattacaaaaaaaaaattttaaagacccctaaccctttgtgtgctctccattctgctccttccccatcgttgccccca

SEQ ID NO: 3417 - DNA, 425 bp, Homo sapiens
aagctcggaattcggctcgaggcttcccttccctctttctccttcttaaatctttttaaacttctttcacaggattgtttgagataacctagctctttatatcttcccttttaaatagaaacaactgtcttgagaagctcttcgaaacattttatggtaaggacttcacctatcattggtctttcctagctatatatcacattggtatcagatgatacttccaaattgccactcaaatccagcaattgcaagataaatcatatcagagaaagaacaacagacctggtctttctattttgtcaaattagtacgggccctttgtgtcctgtaactttttttacctatcaatatgagttgctgtgcttcagtgtgtgttttttaagttgctgggcattacacttaccaattaaagaattttggaaatt

SEQ ID NO: 3418 - DNA, 623 bp, Homo sapiens
taagctcgggattcggctcgagctgggtgacctctgcagccgacaggatctgtacccagctctgaaaggtgtaaacacagttttccactgtgcgtcacccccaccatccagtaacaacaaggagctcttttatagagtgaattacattggcaccaagaatgtcattgaaacttgcaaagaggctggggttcagaaactcattttaaccagcagtgccagtgtcatctttgagggcgtcgatatcaagaatggaactgaagaccttccctatgccatgaaacccattgactactacacagagactaagatcttacaggagagggcagttctgggcgccaacgatcctgagaagaatttcttaaccacagccatccgccctcatggcattttcggcccaagggacccgcagttggtacccatcctcatcgaggcagccaggaacggcaagatgaagttcgtgattggaaatgggaagaacttggtggacttcacctttgtggagaacgtggtccatggacacatcctggcggcagagcagctctcccgagactcgacactgggtgggaaggcatttcacatcaccaatgatgagcccatccctttctggacattcctgtctcgca

SEQ ID NO: 3419 - DNA, 516 bp, Homo sapiens
gtataaattccggacatggcggcagctgtggctgtggctggcggaggccgagcagacattgggtttgcctatcacagatgaacaaatccaggagatgaaatcaaacctggagaacatcgacttcaagatggcagctgaggaagagaaacgtttacgacatgatgtgatggctcacgtgcacacatttggccactgctgtccaaaagctgcaggcattattcaccttggtgctacttcttgctatgttggagacaatactgacttgattattcttagaaatgcacttgacctgcttttgccaaagcttgccagagtgatctctcggcttgccgactttgctaaggaacgagccagtctacccacattaggtttcacacatttccagcctgcacagctgaccacagttgggaaacgttgctgtctttggattcaggatctttgcatggatctccagaacttgaagcgtgtccgagatgacctgcgcttccggggagtaaagggtaccactggcactca

SEQ ID NO: 3420 - DNA, 507 bp, Homo sapiens; identical to SEQ ID NO: 645

SEQ ID NO: 3421 - DNA, 249 bp, Homo sapiens
aagctcgggaattcggctcgaaaaaggacttgtcctaactggtttgaggccttacagttttgtatctacatttttcccctcctggggtttgcggggacagggacagaactacaggagtcatgggaaagaaaattctggcttcactactgctcactgctcactttctgatcactctgatacttttttttttttttttttgccccccgaccccctaaaaaacctttttggggccccccttttgggccccgg

SEQ ID NO: 3422 - DNA, 475 bp, Homo sapiens; identical to SEQ ID NO: 653

SEQ ID NO: 3423 - DNA, 477 bp, Homo sapiens
gaatgcacaaaaataatacaaccttaaaaatcagactagaagatggaatataagtggtttccttgtaatttttttttaagcttggagaggtaataacacatctttgaattcaaactgaggactgctgcttaatggtgcttttacagggtggttctaaaatttttgagagtcaggtattgctttctctgactgtttaattcaccactggcacgtgtttcctatcctcaagcataagtttaaaagattacaaacctcatgctgctcagttttttctttccagtaaatcagatgcatggtttctctagatttacatatagaaaatcgagatgtggtgggtattagactaacacttcagtgataggaagaagagactgatttctcatatttgtgtaaaacattctcttacctaactaccatctggtccacattaatttcctctcatagccatagctttccattaccaatgagttttccatg

SEQ ID NO: 3424 - DNA, 607 bp, Homo sapiens
tcgactactgtgccctgcgacgctgcgctgatgaccagccgccatcaatcctggacccccccagaccaggtgcagtttgagaagtgtggcaagagggtggatcggctggatcagcgttgttccaagctgcgcgtggctgggggccatccgggcaactcaccctggacagtcagcttgcggaattggcagggccagcatttctgcggggggtctctagtgaaggagcagtggatactgactgcccggcagtgcttctcctcctgccatatgcctctcacgggctatgaggtatggttgggcaccctgttccagaacccacaacatggagagccaggcctacagcgggtcccagtagccaagatgctgtgtgggccctcaggctctcagcttgtcctgctcaagctggagagatctgtgaccctgaaccagcgtgtggccctgatctgcctgccgcctgaatgatatgtggtgcctccagggaccaagtgtgagattgcaggccggggtgagaccaaaggtacgggtaatgacacagtcctaaatgtggccttgctgaatgtcatctccaaccaggagtgtaacatcaagcaccgaggacatgtgcggg

SEQ ID NO: 3425 - DNA, 572 bp, Homo sapiens
tgaaaccagcaggaaggaagatgtctctcagaaacaaaggcaatgtgcagaatatacacaaggaagataaacctttaagtctgagtatgcctgtaattacagaagaagaagagaatgaaagtttgagtggaacagagttcactgcatccaagaagaggagaaaacactgaacaaagagcctggtgtagtttttaattttgagttttctgacagaagaaaagattgatattttgtgtattgaacaggaagactgccagtattaaaaaaatccttctgggaatctgtaggttatttcttggaaattgcaatacgtagttctagaataaaagtacaaaaaattagaataagaattctttaacattttctttaatgatttgcataaatggagataaaacttgtatttagtatgtaatagaaaaaattctgttattcgcagattgttactatttcctataaggttttgtgatactatactgtcctaatacagtctggtaatactattctattttatttaaaatattttttattgaaatattaatgtttattacatgcaaataactattttgtatcta

SEQ ID NO: 3426 - DNA, 357 bp, Homo sapiens
gacttattcaatgggataagctcctcctcactcatacggaaagggtggtcatctggccgttttcaaacaaaaactacatccatggtgagctttataagaatcgcgtcagcatatccaacaatgctgagcagtccgatgcctccatcaccattgatcagctgaccatggctgacaacggcacctacgagtgttctgtctcgctgatgtcagacctggagggcaacaccaagtcacgtgtccgcctgttggtcctcgtgccaccctccaaaccagaatgcggcatcgagggagagaccataattgggaacaacatccagctgacctgccaatcaaaggagggctcaccaacccctcagt

SEQ ID NO: 3427 - DNA, 574 bp, Homo sapiens
gaattcagctattcccgtgccaaagttaagtttaatgtgaaccgggtggacaatatgatcatccagtccattagcctcctggaccagctggataaggacatcaataccttctctatgcgtgtcagggagtggtacgggtatcactttccggagctggtgaagatcatcaacgacaatgccacatactgccgtcttgcccagtttattggaaaccgaagggaactgaatgaggacaagctggagaagctggaggagctgacaatggatggggccaaggctaaggctattctggatgcctcacggtcctccatgggcatggacatatctgccattgacttgataaacatcgagagcttctccagtcgtgtggtgtctttatctgaataccgccagagcctacacacttacctgcgctccaagatgagccaagtagcccccagcctgtcagccctaattggggaagcggtaggtgcacgtctcatcgcacatgctggcagcctcaccaacctggccaagtatccagcatccacagtgcagatccttggggctgaaaaggccctgttcagagccctga

SEQ ID NO: 3428 - DNA, 486 bp, Homo sapiens
ttattttatttttaagctcaaactgcttaagataccttaattccttaaagtgaaataattttttgcaaaggggtttcctcgatttggagctttttttttcttccaccgtcatttctaactcttaaaaccaactcagttccatcatggtgatgttcaagaagatcaagtcttttgaggtggtctttaacgaccctgaaaaggtgtacggcagtggcgagaaggtggctggccgggtgatagtggaggtgtgtgaagttactcgtgtcaaagccgttaggatcctggcttgcggagtggctaaagtgctttggatgcagggatcccagcagtgcaaacagacttcggagtacctgcgctatgaagacacgcttcttctggaagaccagccaacaggtgagaatgagatggtgatcatgagacctggaaacaaatatgagtacaagttcggctttgagcttcctcaggggcctctgggaacatccttca

SEQ ID NO: 3429 - DNA, 567 bp, Homo sapiens
cacccaggaaaggaggaccagtcaggatgaggccccgccttttcccccaccctccactgagactgccctgcccaggtatcctgggggaagaggagatgtgatcaggccccacccctgtaatcaggcaaggaggaggagtcagatgaggccctgcaccttccccaaaggaaccgcccagtgcaggtatttcagaaggagaaggctggagaaggacatgagatcagggcctgccccctggggatcacagcctcacccctgcccctgtgggactcatccttgcccaggtgagggaaggagacaggatgaggtctcgaccctgtcccctagggactgtcctagccaggtctcctgggaaagggagatgtcaggatgttgctccatcctttgtcttggaaccaccagtctagtccgtcctggcacagaagaggagtcaagtaatggaggtcccagccctgggggtttaagctctgccccttccccatgaaccctgccctgctctgcccaggcaaggaacagaagtgaggatgagacccagccccttcccctgggaactctcctggccttcta

SEQ ID NO: 3430 - DNA, 342 bp, Homo sapiens
cgggaattcgaattccaaacttgttcacatacagaaatgggatggcaaagaaacaaattttgtaagagaaattaaggatggcaaaatggttatgacccttacttttggtgatgtggttgctgttcgccactatgagaaggcataaaaatgttcctggtcggggcttggaagagctcttcagtttttctgtttcctcaagtctcagtgctatcctattacaacatggctgatcattaattagaaggttatccttggtgtggaggtggaaaatggtgatttaaaaacttgttactccaagcaacttgcccaattttaatctgaaaatttatcatgttttataat

SEQ ID NO: 3431 - DNA, 497 bp, Homo sapiens
ccatctattacatcactggtgagagcaaagagcaggtggccaactcagcttttgtggagcgagtgcggaaacggggcttcgaggtggtatatatgaccgagcccattgacgagtactgtgtgcagcagctcaaggaatttgatgggaagagcctggtctcagttaccaaggagggtctggagctgcctgaggatgaggaggagaagaagaagatggaagagagcaaggcaaagtttgagaacctctgcaagctcatgaaagaaatcttagataagaaggttgagaaggtgacaatctccaatagacttgtgtcttcaccttgctgcattgtgaccagcacctacggctggacagccaatatggagcggatcatgaaagcccaggcacttcgggacaactccaccatgggctatatgatggccaaaaagcacctggagatcaaccctgaccaccccattgtggagacgctgcggcagaaggctgaggccgacaagaat

SEQ ID NO: 3432 - DNA, 471 bp, Homo sapiens
aagtactcaccagcctcctggtctgcagagaagacagaatcaatatgagcacagcaggtaaaagtaatcaaatgcaaagcagctgtgctatgggagttaaagaaacccttttccattgaggaggtagaggttgcacctcctaaggctcatgaagttcgcattaagatggtggctgcaggaatctgtcgttcagatgagcatgtggttagtggcaacctggtgaccccccttcctgtgattttaggccatgaggcagccggcatcgtggaaagtgttggagaaggggtgactacagtcaaaccaggtgataaagtcatcccgctctttactcctcagtgtggaaaatgcagaatttgtaaaaacccagaaagcaactactgcttgaaaaatgatctaggcaatcctcgggggaccctgcaggatggcaccaggaggttcacctgcagcgggaagcccatccaccacttcgtc

SEQ ID NO: 3433 - DNA, 513 bp, Homo sapiens; identical to SEQ ID NO: 661

SEQ ID NO: 3434 - DNA, 456 bp, Homo sapiens
tcggctcggggcctgtcccgttcagccgttgggcccaggcttcctcccctccaaggtgaaacactgcagtcccggtgtggtggctccccatgcaggacgggccaggctgggagtgccgccttcctgtgccaaattcagtggggactcagtgcccaggccctggccacgagctttggccttggtctacctgccaggccaggcaaagcgcctttacacaggcctcggaaaacaatggagtgagcacaagatgccctgtgcagctgcccgagggtctccgcccaccccggccggactttgatccccccgaagtcttcacaggcactgcatcgggttgtctggcgcccttttcctccagcctaaactgacatcatcctatggactgagccggccactctctggccgaagtggccgcaggctgtgcccccgagctgcccccaccccctcacagggtccctc

SEQ ID NO: 3435 - DNA, 399 bp, Homo sapiens; identical to SEQ ID NO: 662

SEQ ID NO: 3436 - DNA, 219 bp, Homo sapiens
agcacagtaaatgttagcatatttatttaaatagtcctgcagcagagaccctgcgattgtaaagtgatttaagtatttctgggtagtgtttgtgatttacggatttgttactgaaaaacaaaaaaaatcactactgtgaatttactactatgtaaccttgtggtcgtatttcattataaataaaataagaattgctcttctgccaaaaaaaaaaacccc

SEQ ID NO: 3437 - DNA, 537 bp, Homo sapiens
taagctcgggattcggctcgaggcgtgggaaaaaggagcggtggcggaagacggggatgagctcaggacagagccagaggccaagaagagtaagacggccgcaaagaaaaatgacaaagaggcagcaggagagggcccagccctgtatgaggaccccccagatcagaaaacctcacccagtggcaaacctgccacactcaagatctgctcttggaatgtggatgggcttcgagcctggattaagaagaaaggattagattgggtaaaggaagaagccccagatatactgtgccttcaagagaccaaatgttcagagaacaaactaccagctgaacttcaggagctgcctggactctctcatcaatactggtcagctccttcggacaaggaagggtacagtggcgtgggcctgctttcccgccagtgcccactcaaagtttcttacggcataggcgatgaggagcatgatcaggaaggccgggtgattgtggctgaatttgactcgtttgtgctggtaacagcatatgtacctaatgc

SEQ ID NO: 3438 - DNA, 538 bp, Homo sapiens
taagctcggaattcggctcgaggcctcagcaactagcccgagccccgcgcccagttccgggaatggagccagcacagcagccagcccgacccagcccatccagctgagcgacctccagagcatcctggccacgatgaacgtaccagccgggccagcaggcggccagcaagtggacctggccagtgtgctgacgccggagataatggctcccatcctcgccaacgcggatgtccaggagcgcctgcttccctacttgccatctggggagtcgctgccgcagaccgcggatgagatccagaataccctgacctcgccccagttccagcaggccctgggcatgttcagcgcagccttggcctcggggcagctgggccccctcatgtgccagttcggtctgcctgcagaggctgtggaggccgccaacaagggcgatgtggaagcgtttgccaaagccatgcagaacaacgccaagcccgagcagaaagagggcgacacgaaggacaagaaggacgaagaggaggacatgagcctggactga

SEQ ID NO: 3439 - DNA, 466 bp, Homo sapiens
taagctcggaattcggtcgaggcttcttgcctgacagcaagtcaaagaatgagtttaatatcaaagtgtaagcttactttccatccccaagccagcctgccccctgccccatttcccatgagcacacttctggggaaggaaaacaggctcctggccttcactctcagcagagctttggagatgccccaggcatgccctgagctccttctgtgtacctgctcccacttctgagccacccgctgcccctccgcactgctggcaaacccagttcctgcctcagccaggtctccttccctggtttccagtcacacagagcccagcagctttctctttcagtcccataagggcagccttgtgtccctggccacacttccacccgccagggtcttcctccccatctttccatccttcctgctgagcttccacagagctcgtttgcaaacagggggattaaagcatcactgcg

SEQ ID NO: 3440 - DNA, 502 bp, Homo sapiens
taagctcggaattcggctcgaggtgctccttgccgccgccctcatcgcggggtccgtcttcttcctgctgctgccgggaccttctgcggccgatgagaagaagaaggggcccaaagtcaccgtcaaggtgtattttgacctacgaattggagatgaagatgtaggccgggtgatctttggtctcttcggaaagactgttccaaaaacagtggataattttgtggccttagctacaggagagaaaggatttggctacaaaaacagcaaattccatcgtgtaatcaaggacttcatgatccagggcggagacttcaccaggggagatggcacaggaggaaagagcatctacggtgagcgcttccccgatgagaacttcaaactgaagcactacgggcctggctgggtgagcatggccaacgcaggcaaagacaccaacggctcccagttcttcatcacgacagtcaagacagcctggctagatggcaagcatgtggtgtttggc

SEQ ID NO: 3441 - DNA, 465 bp, Homo sapiens
agctgtcacgggagttcctgttaaaggtcaagacactgtcaaaggccgtgttccattcaatggacaagatcccgttaaaggacaagtttcagttaaaggtcaagataaagtcaaagcgcaagagccagtcaaaggtccagtctccactaagcctggctcctgccccattatcttgatccggtgcgccatgttgaatccccctaaccgctgcttgaaagatactgactgcccaggaatcaagaagtgctgtgaaggctcttgcgggatggcctgtttcgttccccagtgagagggagccggtccttgctgcacctgtgccgtccccagagctacaggccccatctggtcctaagtccctgctgcccttccccttcccacactgtccattcttcctcccattcaggatgcccacggctggagctgcctctctcatccactttccaataaagagttccttctgctcca

SEQ ID NO: 3442 - DNA, 492 bp, Homo sapiens
ggctcgagccgggaactacacttctgctccccactgtctggaggctctgcaagaactctacaaccacatccacaggtactatgatcagattatcagtgccctggaggaggaccctgtgggccagaagctgcagctggcctgccgcctgcagcaggtcgccgccctggtggaaaacaaagtgactgacctgtgagctctggctcagacagcagcaagccggatccaccaacaccgcagcgccttatgaccccggaaccgagccagccactgaggggagctggcagagcctgggggcacagggtgcaaagccaggcactgtgcccagcagtgggctccctgcctgccacctcccctgccagcccacccaccttccccccacctgagattgtttctaatttataaggatccccctccttccccctctccccattgtatttatttgcctgctggaaaatcacatccggaaataaaatagaaatatgtctttttatt

SEQ ID NO: 3443 - DNA, 566 bp, Homo sapiens
ccctttgtcttggagtagaatactaagttagagttagtggatttctagtttaggagaggagctcaaaactatatctttaacaaattgaaaaatgaaatagggtgttttccctttttgtgcacacctatattaccttaagaaatttccttccatagacagctgcctcaaagggaaatcctctttaaaccgtagttggcgcagaggtcagtcctagtcggagcttaggaggggcggagacgctcacatcgtctgacttgagtcgccactgattgtggcaacagctttgcctcatgagtcaaaaattggcaatttcttttgatttttagttgttgaatttgctgtttcaagcatttgtacatattagaagtctaaggagtagcaagtcagtgggaggactttttcacccctggcattagcagcttcgacctcattttccagatgcaccagctcctattaataagttagcaaggaaagtgtatgtcacgtgcaggaacagtgaggcagggacaggggttctgctccttctcacttcaccaccggcacacagcttgcccctgtctttgccc

SEQ ID NO: 3444 - DNA, 528 bp, Homo sapiens
gctgtttgcgggtctccgcgcgggaccggggcgcagcggggtcgctgaggcgagggtgtcatgtcagacaacgaggacaattttgatggcgacgactttgatgatgtggaggaggatgaagggctagatgacttggagaatgccgaagaggaaggccaggagaatgtcgagatcctcccctctggggagcgaccgcaggccaaccagaagcgaatcaccacaccatacatgaccaagtacgagcgagcccgcgtgctgggcacccgagcgctccagattgcgatgtgtgcccctgtgatggtggagctggagggggagacagatcctctgctcattgccatgaaggaactcaaggcccgaaagatccccatcatcattcgccgttacctgccagatgggagctatgaagactggggggtggacgagctcatcatcaccgactgagctggagtcatcttcctgcccttgccccatgcccaattttcattctcactttatatgtgtaaataataaaatattcaactttcc

SEQ ID NO: 3445 - DNA, 496 bp, Homo sapiens
ccttttggcaaagctgatgacgacgatgttgtagtgaaaaccaagtttgtggggggcattgctcagatcatcgccgcccaggaagaaatgctaaagaaagagcgagaactggaagaagcaaggaaaaaactggcccaaatccgccagcagcagtataagtttttacccaccgagctgagggaagatgagggctaaaggtgcgagcccagatggcgagccccaggggatggccctggctgaactggacagacagtgttcctgagaggctgggcacttagctggaaaccgcccacctccctcccgggtgagcctggagccctgcgtgcttgttctcacatctctgtcccgtcggcactggctgcatgatcgtgatgtcacacggtacaatgtcctacccacaactcctctgccgcctcccctcatgcctcaccgtgtctcaggagagaggggtgcacgtttcatggactgttaccaacaaagaaaagtcagtattatg

SEQ ID NO: 3446 - DNA, 271 bp, Homo sapiens
gaagaaatgattgatcacagactaacagacagagaatgggcagaagagtggaaacatcttgaccatctgttaaactgcataatggacatggtagaaaaaacaaggcgatctctcaccgtactaaggcggtgtcaagaagcagaccgggaagaattgaattactggatccggcggtacagtgacgccgaggacttaaaaaaaggtggcggcagtagcagcagccactctaggcagcagagtcccgtcaacccagacccagttgcactagacg

SEQ ID NO: 3447 - DNA, 538 bp, Homo sapiens
ggctcgagggagacgctgctacctgaggggaaggcctgaggtccaggtaagaagggaaaatagactgggagtgggacaagggacttgactctgctgaaccagatgaacaggagctggaaaggcaaggagctgaagcctctgggagtctgggaagtgaagttctactcctcttggcatcaaacaaggtttgggagtgtaggaggtgcgggaaagtgcttgtggcttagattaagtggaatttagggcatagctgaaaggggaaacagaattaaagacaccagaagtagcagagaagcagggggccagagctacaacagtattcttctctgttcctctttgcctcctccccagatgggcctctcagctcccacaatctctggcctccaggatgagctatcccatcttcaggagttattacggaaatggacaccaagaatatctcctgaggatcactccaagaaaagagatccacataccattctcaatcccactgaaattgctggcattctcaaaggcagggcagagggggatctggggt

SEQ ID NO: 3448 - DNA, 479 bp, Homo sapiens
tttggtccgcacgcctcctgctcctgactcaccgctgttcgctctcgccgaggaacaagtcggtcaggaagcccgcgcgcaacagccatggcttttaagggataccggaaaaacacccgtggagccggaggtggcaattcaccgaattcgaatcaccctaacaagccgcaacgtaaaatccttggaaaaggtgtgtgctgacttgataagaggcgcaaaagaaaagaatctcaaagtgaaaggaccagttcgaatgcctaccaagactttgagaatcactacaagaaaaactccttgtggtgaaggttctaagacgtgggatcgtttccagatgagaattcacaagcgactcattgacttgcacagtccttctgagattgttaagcagattacttccatcagtattgagccaggagttgagggtggaagtcaccattgcagatgcttaagtcaactattttaataaattgatgaccagt

SEQ ID NO: 3449 - DNA, 502 bp, Homo sapiens; identical to SEQ ID NO: 672

SEQ ID NO: 3450 - DNA, 599 bp, Homo sapiens
taagctcggaattcggctcgagtgcatcctggtgccagcactgaggaagttaaacgagctttcttctccaagtccaaagagctgcacccagaccgggaccctgggaacccaagcctgcacagccgctttgtggagctgagcgaggcataccgtgtgctcagccgtgagcagagccgccgcagctatgatgaccagctccgctcaggtagtcccccaaagtctccacgaaccacagtccatgacaagtctgcccaccaaacacacagctcctggacaccccccaacgcacagtactggtcccagtttcacagcgtgaggccacaggggccccagttgaggcagcagcaacacaaacaaaacaaacagtgctggggtactgcctcctcctcatgctggcgggcatgggcctgcactacattgccttcaggaaggtgaagcagatgcaccttaacttcatggatgaaaaggatcggatcatcacagccttctacaacgaagcccgggcacgggccaggtctgtccctgctctattctgctccctgctccctgtccaggaaccacacttcgggatccctatcccaaccacccaggtgccctct

SEQ ID NO: 3451 - DNA, 371 bp, Homo sapiens
  misc_feature 264: n = A,T,C or G
tgtctgcacatctcatggtagctggctgggaccaacgtgaaggaggtcaggtatatggaaccctgggaggaatgctgactcgacagccttttgccattggtggctccggcagcacctttatctatggttatgtggatgcagcatataagccaggcatgtctcccgaggagtgcaggcgcttcaccacagacgctattgctctggccatgagccgggatggctcaagcggggggtgtcatctacctggtcactattacagctgcncggtgtggaccatcgagtcatcttgggcaatgaactgccaaaattctatgatgagtgaaccttccccagacttctctttcttattttgtaataaactctctagggcc

SEQ ID NO: 3452 - DNA, 517 bp, Homo sapiens
gggtgctcacagctgctcattgcatcagcgacaattaccagctctggctgggtcgccacaacttgtttgacgacgaaaaaacagcccagtttgttcatgtcagtgagagcttcccacaccctggcttcaacatgagcctcctggagaaccacacccgccaagcagacgaggactacagccacgacctcatgctgctccgcctgacagagcctgctgataccatcacagacgctgtgaaggtcgtggagttgcccacccaggaacccgaagtggggagcacctgtttggcttccggctggggcagcatcgaaccagagaatttctcatttccagatgatctccagtgtgtggacctcaaaatcctgcctaatgatgagtgcgaaaaagcccacgtccagaaggtgacagacttcatgctgtgtgtcggacacctggaaggtggcaaagacacctgtgtgggtgattcagggggcccgctgatgtgtgaatggtgtgctccaaagtgtcacatcatggg

SEQ ID NO: 3453 - DNA, 612 bp, Homo sapiens
gtttgagagacagactgcagttctgcagcaacaggtcacagtgaatactgaagaattaaaaggaactgaggttcaactaacggagctgagacgcacctcccagagccttgagatagaactccagtcccatctcagcatgaaagagtctttggagcacactctagaggagaccaaggcccgttacagcagccagttagccaacctccagtcgctgttgagctctctggaggcccaactgatgcagattcggagtaacatggaacgccagaacaacaaataccatatccttcttgacataaagactcgacttgaacaggaaattgctacttaccgccgccttctggaaggagaagacgtaaaaactacagaatatcagttaagcaccctggaagagagagatataaagaaaaccaggaagattaagacagtcgtgcaagaagtagtggatggcaaggtcgtgtcatctgaagtcaaagaggtggaagaaaatatctaaatagctaccagaaggagatgctgctgaggttttgaaagaaatttggctataatcttatctttgctccctgcaagaaatcagccataagaaagcactattaatactctgcagtgatt

SEQ ID NO: 3454 - DNA, 536 bp, Homo sapiens
ctgcgtggcgtggtacaggagctgcagcaggccatctccaagctggaggcccggctgaacgtgctggagaagagctcgcctggccaccgggccacggccccacagacccagtgacaatgaggaggaggacaaggaggcggcacagctgcgggaggagcggctacggcagtacgcggagaagaaggccaagaagcctgcactggtggccaagtcctccatcctgctggatgtcaagccttgggatgatgagacggacatggctcagctggaggcctgtgtgcgctctatccagctggacgggctggtctggggggcttccaagctggtgcccgtgggctacggtatccggaagctacagattcagtgtgtggtggaggacgacaaggtggggacagacttgctggaggaggagatcaccaagtttgaggagcacgtgcagagtgtcgatatcgcagctttcaacaagatctgaagcctgagtgtgtgtacgtgcgcgcgtgcgtgaggccctgccacgattaaagactgagaccggc

SEQ ID NO: 3455 - DNA, 509 bp, Homo sapiens; identical to SEQ ID NO: 674

SEQ ID NO: 3456 - DNA, 243 bp, Homo sapiens
aaatgacctctagtgttccccttgggtttaaatgtctataaatgttcaatgactagaatgtattgcgtttttctttattctttttgctttgagaaaagagaatgtgatttaagagtaataatttgaataccaattatccacattaaaattgtgtcctctatgtgtaaggcatagcacatttagcacacatacataagcacactaagcaccttacaaatatcctcatttattctttacataatt

SEQ ID NO: 3457 - DNA, 453 bp, Homo sapiens; identical to SEQ ID NO: 677

SEQ ID NO: 3458 - DNA, 558 bp, Homo sapiens
gggccatcctcatcataacacacttctgtttttctcctttccattgtcggatgagaatgatgtttttgacaagctaagtgtcattgcagaagactctgagagcggcaagcagaatcctggtgacagctgcagcctcgggaccccgcctgggcaggggccccaaagctaggctctgagaaggaaacacactcggctgggcacagtgacgtactccatctcacatctgcctcagtgagggatcagggcagcaaacaagggccaagaccatctgagccagccccacatctagaactcccagaccctggacttagccaccagagagctacattttaaaggctgtcttggcaaaaatactccatttgggaactcactgccttataaaggctttcatgatgttttcagaagttggccactgagagtgtaattttcagccttttatatcactaaaataagatcatgttttaattgtgagaaacagggccgagcacagtggctcacgcctgtaataccagcaccttagaggtcgaggcaggcggatcacttgaggtcaggagttca

SEQ ID NO: 3459 - DNA, 612 bp, Homo sapiens
taagctcggaattcggctcgagcgaccttaacaacccggacaagcacgccaagctggacttcctcaacaacctggccacgggcctggtgttcatcatcgtggtagtcaacatcttcatcacggccttcggggtccagaagcccttgatggacatggcaccccagcagtaggacacccaggaccctggatgctgcctgccctgcaactcagctgcccgaccccaggagtcgccatacctgtgaggtgtccacctccctgcacatggcactacccagactgccagagcccaggctggcctcatctgcaccatgtccccggaccagcccttgctctgactgcggccaagcaccacgcaggaggccactcttgtctctcagcagctgttcccaggaggcagctccctcctggcacatgggggctggccacaatagcccagagggtcagaactggacagctgcagagacctgtgcccagagaagggtctcgacccactcaaggacacacagcaggtccgtggatgggctggatgagtgaccagggccagcctctgtctcaggacattccagaaggacaaggagatgtctctccctctcccaagcaccagcgtccctg

SEQ ID NO: 3460 - DNA, 444 bp, Homo sapiens
aattcggctcgagcgtggctgtctcctctctccgccatggcgtgtgctcgcccactgatatcggtgtactccgaaagggggagtcatctggcaaaaatgtcactttgcctgctgtattcaaggctcctattcgaccagatattgtgaactttgttcacaccaacttgcgcaaaaacaacagacaaccctatgctgtcagtgaattagcaggtcatcagactagtgctgagtcttggggtactggcatagctgtggctcgaattcccagagttcgaggtggtgggactcaccgctctggccagggtgcttttggaaacatgtgtcgtggaggccgaatgtttgcaccaaccaaaacctggcgccgttggcatcgtatagtgaacacaacccaaaaacgatacgccatctgttctgccctggctgcctcaaccctaccagcactgg

SEQ ID NO: 3461 - DNA, 576 bp, Homo sapiens
tatcaccggaaccgggtgaaggtgcccgtggggcaggaggtggaggggatgaacatcctgggcttggtagtgtttgccatcgtctttggtgtggcgctgcggaagctggggcctgaaggggagctgcttatccgcttcttcaactccttcaatgaggccaccatggttctggtctcctggatcatgtggtacgcccctgtgggcatcatgttcctggtggctggcaagatcgtggagatggaggatgtgggtttactctttgcccgccttggcaagtacattctgtgctgcctgctgggtcacgccatccatgggctcctggtactgcccctcatctacttcctcttcacccgcaaaaacccctaccgcttcctgtggggcatcgtgacgccgctggccactgcctttgggacctcttccagttccgccacgctgccgctgatgatgaagtgcgtggaggagaataatggcgtggccaagcacatcagccgtttcatcctgcccatcggcgccaccgtcaactggacggtgccgcgctcttccagtgcgtggccgcagtgttcattgcacagctca

SEQ ID NO: 3462 - DNA, 559 bp, Homo sapiens
tggattccctcttctacgctgcccaggccagccaggccctctcaggatgtgagatctctatttcaaatgagaccaaagatctgcttctggcagctgtcagtgaggactcatctgttacccagatctaccatgcagttgcagctctaagtggctttggccttcccttggcatcccaagaagcactcagtgcccttactgctcgtctcagcaaggaggagactgtgctggcaacagtccaggctctgcagacagcatcccacctgtcccagcaggctgacctgaggagcatcgtggaggagattgaggaccttgttgctcgcctggatgaactcgggggcgtgtatctccagtttgaagaaggactggaaacaacagcgttatttgtggctgccacctacaagctcatggatcatgtggggactgagccatccattaaggaggatcaggtcatccagctgatgaacgcgatcttcagcaagaagaactttgagtccctctccgaagccttcagcgtggcctctgcagctgctgtgctctcgcataatcgctaccacgtgcc

SEQ ID NO: 3463 - DNA, 238 bp, Homo sapiens
gcaaccctgatttcagccagatcaactgctctgaaggctacattcagaactacagatgcagaggtgatgacagcaaagtccaggaagccaggaagtccttcttctctggccatgcctccttctccatgtacactatgctgtatttggtgctatacctgcaggcccgcttcacttggcgaggagcccgcctgctccggcccctcctgcagttcaccttgatcatgatggccttctacac

SEQ ID NO: 3464 - DNA, 536 bp, Homo sapiens; identical to SEQ ID NO: 684

SEQ ID NO: 3465 - DNA, 525 bp, Homo sapiens
aagctcgggaattcgctcgagcttttcagaagtaaaaaactgggtcaaagaattacggaaaatgttgggaaatgaaatctgtttatgtatagttggtaataaaatagacttggaaaaggagagacatgtttccattcaagaagcagagtcgtatgcagaatctgtgggagcaaaacattatcatacttcagccaaacagaacaaaggaattgaggaactctttcttgacctttgtaaaaggatgatagaaacagcacaagtcgatgagagagcaaaaggcaatggctctagtcagccgggaactgcaaggcgaggtgtacagattattgatgatgaacctcaagcccagaccagtggtggagggtgctgttcttttggataactgttcacgcctaagaaattaaaagacagaacaaaactgtggatcattgccctcaacatgaagactgccatattccaagtcacattattttaccaatggaattatagaattaacagtattttaaattacgtttataacactgc

SEQ ID NO: 3466 - DNA, 462 bp, Homo sapiens
caagggcacgagcatcgggtagccatgcctttcttggacatccagaaaagttcggccttaacatagatcgatggttgacaatccagagtggtgaacagccctacaagatggctggtcgatgccatgcttttgaaaaagaatggatagaatgtgcacatggaatcggttatactcgggcagagaaagagtgcaagatagaatatgatgatttcgtagagtgtttgcttcggcagaaaacgatgagacgtgcaggtaccatcaggaagcagcgggataagctgataaaggaaggaaagtacacccctccacctcaccacattggcaagggggagcctcggccctgaacagagcagctgctgatgtctggaggctgattttcctgttctctgttctccactggaaaggttgtttacgacaaacctccttgtcaaagtgtgtaaaaataaaggattgctccatcct

SEQ ID NO: 3467 - DNA, 402 bp, Homo sapiens
tacgtaagctcgggaattcggctcgagcataaatgcacttctgaggtgcaaggattgagctcagagctgctctgttgtggcaaaacccaaagtgctgtgatgtgtggctgtgacaagcctggagcgggtcctgtgagcgccgcctctgtctcctgcttccccactgaacgcctgctgaatgtgccgctgactcagctgtgctgctttcagccctcctgtgaggggcggtcccagtgcacagatgtttttcaagttcctcagtttgtactgaaattagggattcatcagggcaggaagcaggcaggcctctcagaagggagaggaggcctccaaatctattgagtccccacagtttgctcaagcccaggcaaatttctgtgattaaaatgaattcatcagttc

SEQ ID NO: 3468 - DNA, 480 bp, Homo sapiens
taagctcgggattcggctcgagtctacactgggttctttggaagctctactggaatttctgaaaacatcagaagtgccctatgcaggaattaacattggcccagtgcataaaaaagatgttatgaaggcttcagtgatgttggaacatgaccctcagtatgcagtaattttggccttcgatgtgagaattgaacgagatgcacaagaaatggctgatagtttaggagttagaatttttagtgcagaaattatttatcatttatttgatgcctttacaaaatatagacaagactacaagaaacagaaacaagaagaatttaagcacatagcagtatttccctgcaagataaaaatcctccctcagtacatttttaattctcgagatccgatagtgatgggggtgacggtggaagcaggtcaggtgaaacaggggacacccatgtgtgtcccaagcaaaaattttgttgacatcggaatagt

SEQ ID NO: 3469 - DNA, 322 bp, Homo sapiens
ccattgtttgcataaaatttggacaagatctcttctctaagacccaaatactctatgttgtgctttggcttctttgcgtggctttcaccactttcctctgtctgtacggcatgatttggtatgcagaacactatggtcaccgagaaaagacctactcggagtgtgaagatggcacctacagtccagagatctcctggcatcacaggaaagggacaaaaggttctgaagacagcccacccaagcatgcaggcaacaacgaaagccattcttccaggagaaggaatcggcattccaagtcaaaagtcaccaatggcgttggaaa

SEQ ID NO: 3470 - DNA, 520 bp, Homo sapiens
gctgctgctaacgcggtccccggcacgcaccatctgttgccatcccggccggccgaggccattgcagattttggaagatggcaaagttcatgacacccgtgatccaggacaacccctcaggctggggtccctgtgcggttcccgagcagtttcgggatatgccctaccagccgttcagcaaaggagatcggctaggaaaggttgcagactggacaggagccacataccaagataagaggtacacaaataagtactcctctcagtttggtggtggaagtcaatatgcttatttccatgaggaggatgaaagtagcttccagctggtggatacagcgcgcacacagaagacggcctaccagcggaatcgaatgagatttgcccagaggaacctccgcagagacaaagatcgtcggaacatgttgcagttcaacctgcagatcctgcctaagagtgccaaacagaaagagagagaacgcattcgactgcagaaaaagttccagaaacaatttggggttaggca

SEQ ID NO: 3471 - DNA, 336 bp, Homo sapiens
gcgaggtaagcggtggcgccttgggcggcgcacttgctgggtgacttggagggcatcggctagctgacattggtgatctgacggcagccaagcccagctcggatcaaggtcccttcatgcgcggtgtctctgcgcctgagtaacgacatggaactgaaagaccagagggacactaggaatcaaaacaaacatttctattctgcttagtttttctgttttgtaaatctttctttcttaccactttcagcccctgggattctagaactgtgaattgtgctctgttgtagggggcaggggaagctctcactctgttgccattaaatgtatgagactggg

SEQ ID NO: 3472 - DNA, 480 bp, Homo sapiens
ggttttgacagcgtggtgtccagtcctagccccctcagtgcttgctgttcacacttaagcaagtgaaggcctgaaggtgcccagctgtgccctcaggggaaacttaagtcacccgccctgtcagcacttggcccttgtcgggcagtgagagtggagctgcccccgcagcaccctcaggagccatgcagttcacagcagtagctggatctccctgaggacatttgtccttgcatatcttaatgatttgtccacagaaacaccgggttgtcttcctctgcccctctgccccgcagtgggggcactctctgtaactcagcatcacagtggggggcagctgggaggcctggttccaggtgaccttctccacctagatgttcaccccactcagttccagctttaccaacagggccccccgcagggacttggggtcgcagagtcccggcctgtctcagggccttgttcatggaagggagatgagtc

SEQ ID NO: 3473 - DNA, 493 bp, Homo sapiens
gaatgatatcctggtgcgggctgagttcagttcaacttctttaccacaattttggctgtcatctgctgtgaattcttcaagcactgaccctgaaaggctggctgtgaccacggcatggaccactgatagtaagattttgcccccaggaggagaggctggggtcactgagatccacggaaagtgtgaaaatatgactataacccctagaggtacaactgtgacccctacaaaggaaactgtatcccttggaaagcacactgtagctctaggagagaagactgagatcactggggcaatgaccatgacttctgtgggtcatcagtccatgacccctggagagaaggccctgacccctgtgggtcatcaatctgtgaccactggacagaagaccctgacctctgtgggttatcagtctgtgacccctggggaaaagaccctgacccctgtgggtcatcagtctgtgacccctgtgagtcatcagtctgtgagccct

SEQ ID NO: 3474 - DNA, 609 bp, Homo sapiens
tcggctcgagtggtgtgcgaccacagccaactacgatgatgaccgcaagtggggcttctgccctgaccaagggtacagcctgttcctcgtggcagcccacgagtttggccacgccatggggctggagcactcccaagaccctggggccctgatggcacccatttacacctacaccaagaacttccgtctgtcccaggatgacatcaagggcattcaggagctctatggggcctctcctgacattgaccttggcaccggccccacccccacgctgggccctgtcactcctgagatctgcaaacaggacattgtatttgatggcatcgctcagatccgtggtgagatcttcttcttcaaggaccggttcatttggcggactgtgacgccacgtgacaagcccatggggcccctgctggtggccacattctggcctgagctcccggaaaagattgatgcggtatacgaggccccacaggaggagaaggctgtgttctttgcagggaatgaatactggatctactcagccagcaccctggagcgagggtaccccaagccactgaccagcctgggactgccccctgatgtccagcgagtggatgccgcctttaa

SEQ ID NO: 3475 - DNA, 521 bp, Homo sapiens
tccatctacaatgagtttctcgagagaaccgtggagaaagcaaagcagaggaaagtggggaacccctttgagctggacacccagcaggggcctcaggtggacaaggagcagtttgaacgagtcctaggctacatccagcttggccagaaggagggcgcaaaactcctctgtggcggagagcgtttcggggagcgtggtttcttcatcaagcctactgtctttggtggcgtgcaggatgacatgagaattgccaaagaggagatctttgggcctgtgcagcccctgttcaagttcaagaagattgaggaggtggttgagagggccaacaacaccaggtatggcctggctgcggctgtgttcacccgggatctggacaaggccatgtacttcacccaggcactccaggccgggaccgtgtgggtaaacacctacaacatcgtcacctgccacacgccatttggagggtttaaggaatctggaaacgggagggagctgggtgaggatgggcttaaggcctacac

SEQ ID NO: 3476 - DNA, 588 bp, Homo sapiens; identical to SEQ ID NO: 703

SEQ ID NO: 3477 - DNA, 197 bp, Homo sapiens
cagccaaggcctaccctgatgccagagtccttgagctgtcagttcccacagttgctcctttgtttgctcttctcagcctcggccagatttacagtccaggcagcaaaatctcaaggcctggggctcagagtagtaaggggtgggaagtgggtggcagggagaaaagaacatcagggtgggtggggacaggccagtga

SEQ ID NO: 3478 - DNA, 446 bp, Homo sapiens; identical to SEQ ID NO: 709

SEQ ID NO: 3479 - DNA, 311 bp, Homo sapiens; identical to SEQ ID NO: 710

SEQ ID NO: 3480 - DNA, 507 bp, Homo sapiens
atatatcagcctgtgggtaaaccagatcctgcagctccaccaaagaaaccgcctcgccctggagctcccggtcatctgggaagccttgccagcctcagcagccctgctgacagctacaacgagggtgtcaagcttcagccccaggaaatcagcccccctcctactgccaacctggaccggtcgaatgataaggtgtacgagaatgtgacgggcctggtgaaagctgtcatcgagatgtccagtaaaatccagccagccccaccagaggagtatgtccctatggtgaaggaagtcggcttggccctgaggacattattggccactgtggatgagaccattcccctcctaccagccagcacccaccgagagattgagatggcacagaagctattgaactctgacctgggtgagctcatcaacaagatgaaactggcccagcagtatgtcatgaccagcctccagcaagagtacaaaaagcaaatgctgactgctgctcacgccctggct

SEQ ID NO: 3481 - DNA, 566 bp, Homo sapiens
tcatctgaacctctacctgctcctggactgttcgcagagtgtgtcggaaaagactttctcatcttcaaggagagcgcctccctcatggtggacaggatcttcagctttgagatcaatgtgagcgttgccattatcacctttgcctcagagcccaaagtcctcatgtctgtcctgaacgacaactcccgggatatgactgaggtgatcagcagcctggaaaatgccaactataaagatcatgaaaatggaactgggactaacacctatgcggccttaaacagtgtctatctcatgatgaacaaccaaatgcgactcctcggcatggaaacgatggcctggcaggaaatccgacatgccatcatccttctgacagatggaaagtccaatatgggtggctctcccaagacagctgttgaccatatcagagagatcctgaacatcaaccagaagaggaatgactatctggacatctatgccatcggggtgggcaagctggatgtggactggagagaactgaatgagctagggtccaagaaggatggtgagaggcatgccttcattctgca

SEQ ID NO: 3482 - DNA, 511 bp, Homo sapiens; identical to SEQ ID NO: 711

SEQ ID NO: 3483 - DNA, 526 bp, Homo sapiens
acaagttgtatctggtagaccagaaggccaaagaaatcattcccaaggctgacattcccagcccaagaaaagagtttagtgcatgtgcgattggctgcaaagtgtacattactggggggcgggggtctgaaaatggggtctcaaaagatgtctgggtttatgataccctgcacgaggagtggtccaaggctgcccccatgctggtggccaggtttggccatggctctgctgaactgaagcactgcctgtatgtggttggggggcacacggccgcaactggctgcctcccggcctccccctcagtctctctaaagcaggtagaacattatgaccccacaatcaacaaatggaccatggtggccccactccgagaaggcgttagcaacgccgcagtagtgagtgccaaacttaagttatttgctttcggaggtaccagtgtcagtcatgacaagctccccaaagttcagtgttacgatcagtgtgaaaacaggtggactgtaccggccacctgtccccagccctggcg

SEQ ID NO: 3484 - DNA, 557 bp, Homo sapiens
ggaaagaagtggctccggccccagctgtcgtgaagaagcaggaggctaagaaagtggtgaatcccctgtttgagaaaaggcctaagaattttggcattggacaggacatccagcccaaaagagacctcacccgctttgtgaaatggccccgctatatcaggttgcagcggcagagagccatcctctataagcggctgaaagtgcctcctgcgattaaccagttcacccaggccctggaccgccaaacagctactcagctgcttaagctggcccacaagtacagaccagagacaaagcaagagaagaagcagagactgttggcccgggccgagaagaaggctgctggcaaaggggacgtcccaacgaagagaccacctgtccttcgagcaggagttaacaccgtcaccaccttggtggagaacaagaaagctcagctggtggtgattgcacacgacgtggatcccatcgagcctggttgtcttcttgcctgccctgtgtcgtaaatggggggtcccttactgcattatcaagggaaaggcaagactgggacgtctagt

SEQ ID NO: 3485 - DNA, 536 bp, Homo sapiens
tgcaggtcctggtgcttgatggtcgaggccatctcctgggccgcctggcggccatcgtggctaaacaggtactgctgggccggaaggtggtggtcgtacgctgtgaaggcatcaacatttctggcaatttctacagaaacaagttgaagtacctggctttcctccgcaagcggatgaacaccaacccttcccgaggcccctaccacttccgggcccccagccgcatcttctggcggaccgtgcgaggtatgctgccccacaaaaccaagcgaggccaggccgctctggaccgtctcaaggtgtttgacggcatcccaccgccctacgacaagaaaaagcggatggtggttcctgctgccctcaaggtcgtgcgtctgaagcctacaagaaagtttgcctatctggggcgcctggctcacgaggttggctggaagtaccaggcagtgacagccaccctggaggagaagaggaaagagaaagccaagatccactaccggaagaagaaacagctcatgaggctacggaaacaggccgag

SEQ ID NO: 3486 - DNA, 371 bp, Homo sapiens
taagctcggaattcgaattccactatcagggatgagatcgctgggtgcatcgagaaggcctacgagaaaatccttttcactgaggccacccggatcctcttcttcaacacacccaaaaagatgacagactacgccaagaagcgagggtgggtcctgggccccaacaactactacagttttgccagccagcagcagaagccggaagacaccaccattccctccacagaactggccaaacaggtcatcgagtatgcccggcagctggagatgatcgtctgagccccccgggcactgggtggggcagggcacgagttatttaaaacagttacactgcagggtttcgcccaataaaggtggactgacattccctc

SEQ ID NO: 3487 - DNA, 613 bp, Homo sapiens
  misc_feature 535: n = A,T,C or G
tggtgccccctccacccatcattgacaagatcttcatggacacgcctgcccttctgacccctgcctgggaaacacgtgtgccacatgcgcactctcatatgccaccccatgtgcctttagtcccacggacccccagagcacccccaagcctgggcttgagctgcagaatgactccacctttctcacctgctccaggaggtttgcagggagctcaagcccttggggagggggatgccttcatgggggtgaccccacgatttgtcttatcccccccagcctggccccggcctttatgttttttgtaagataaaccgtttttaacacatagcgccgtgctgtaaataagcccagtgctgctgtaaatacaggaagaaagagcttgaggtgggagcggggctgggaggaagggatgggccccgccttcctgggcagcctttccagcctcctgctggctctctcttcctaccctccttccacatgtacataaactgtcactctaggaagaagacaaatgacagattctgacatttatatnttgtgtattttcctggatttatagtatgtgacttttctgattaatatatttaatatattgaataaaaaatagacatgt

SEQ ID NO: 3488 - DNA, 170 bp, Homo sapiens
gccgcgggctctgcgtcaacactagtgccgtcagccgactgcgcgcctacctgctgccagcgcctacagctacaggaaatgctattgagtcggaggaagaccgcagcgccggcagagtggatagcccttccgtctgggggggcaccgggtgtttgatcccaagttccacc

SEQ ID NO: 3489 - DNA, 258 bp, Homo sapiens
attgagaactatcaaaacaagcagcgggaggtgatgtggcaattgtgtgccatcaaaattacagaagctatacagtatgtggtggagtttgccaaacgcattgatggatttatggaactgtgtcaaaatgatcaaattgtgcttctaaaagcaggttctctagaggtggtgtttatcagaatgtgccgtgcctttgactctcataacaacaccgtgtactttgatgggaagtatgccagccccgacgtcttcaaatcc

SEQ ID NO: 3490 - DNA, 665 bp, Homo sapiens
gtaaacttcatgatccagaaggcatgggaattattccaagaatagtgcaagatatttttaattatatttactccatggatgaaaatttggaatttcatattaaggtttcatattttgaaatatatttggataagataagggacctgttagatgtttcaaagaccaacctttcagttcatgaagacaaaaaccgagttccctatgtaaaggggtgcacagagcgttttgtatgtagtccagatgaagttatggataccatagatgaaggaaaatccaacagacatgtagcagttacaaatatgaatgaacatagctctaggagtcacagtatatttcttattaatgtcaaacaagagaacacacaaacggaacaaaagctgagtggaaaactttatctggttgatttagctggtagtgaaaaggttagtaaaactggagctgaaggtgctgtgctggatgaagctaaaaacatcaacaagtcactttctgctcttggaaatgttatttctgctttggctgagggtagtacatatgttccatatcgagatagtaaaatgacaagaatccttcaagattcattaggtggcaactgtagaaccactattgtaatttgctgctctccatcatcatacaatgagtctgaaacaaatctacactcttatttg

SEQ ID NO: 3491 - DNA, 124 bp, Homo sapiens
  misc_feature 28, 47, 87, 90: n = A,T,C or G
gaattcttttgtgaaaggaacaaacttnattgttttaaaaaattganacaggcttccaaccttcagcagcccccacactgattaganagnagtcatcaatatagaggcaagactctcaccagca

SEQ ID NO: 3492 - DNA, 385 bp, Homo sapiens
tgcatggaggccggccgggtgaagtgtgagcattactggcctctggactcgcaggcctgcacccatgggcacctgcgggtaaccctggtaggtgaggaagtgatggagaactggacggtgcgggaactgctgctcctccaggtggaggagcagaagacactgtctgtgcgccaattccactaccaagcctggccggatcacggcgtaccctcctccccagacaccttgctggctttctggaggatgcttccgcagtggctggatcacaccatggagggaggcccacccattgtgcactgcattgctggcgtgggtcgcacaggatccctcattgccctggacgtcctgcttcggcagctgcagtacgagggtctccttgggccct

SEQ ID NO: 3493 - DNA, 565 bp, Homo sapiens; identical to SEQ ID NO: 725

SEQ ID NO: 3494 - DNA, 555 bp, Homo sapiens; identical to SEQ ID NO: 727

SEQ ID NO: 3495 - DNA, 577 bp, Homo sapiens
gtaagctcgggaattcggctcgaggcccctggtacctctgccaccaccaatcccaacgccatggctacaatccagagtaacactatttttaccaatgtggctgagaccagtgatggtggcgtgtactgggagggcattgaccagcctcttccacctggtgttactgtgacctcctggctgggcaaaccctggaaacctggtgacaaggagccctgtgcacatcccaactctcgattttgtgccccggctcgccagtgccccatcatggacccagcctgggaggccccagagggtgtccccattgacgccatcatctttggtggccgcagacccaaaggggtacccctggtatacgaggccttcaactggcgtcatggggtgtttgtgggcagcgccatgcgctctgagtccactgctgcagcagaacacaaagggaagatcatcatgcacgacccatttgccatgcggcccttttttggctacaacttcgggcactacctggaacactggctgagcatggaagggcgcaagggggcccagctgccccgtatcttccatgtcaactggttccggcgtg

SEQ ID NO: 3496 - DNA, 616 bp, Homo sapiens
ctgacccacagcatatatgcttatgactaaaccctccactcctgattctcaagagtgtatcacctgtcagcaaaatgaatagtgggatattttgggccattttaaatgtgaaattttgcctctttaatgttaattcaaaactatatcaatgttttcttgttcccacctctaacccaaggaaaaaagagaaaacatactatgcaaaggaagtttaaacttaagttttccttaagggtcagcccaacaatgactttcagtcaaatggattaaactggaaaatgtttttgtttctgttgtaaacagatcatcctaggcgaaagttttttttgtttgtttgcttttaaattagtttatttctaaatcttagtcttccacatttctagaggccacctgacacaagtccctgtatctgaagtctagcatctcaaggctgatctggaagtgtgctagtatgctccctagtggataacttaatcttttaatacagttccgtcattcccatcttgttttcagaagagaaggtggctacagccaggcataacatatccactgtgtgcatagagggtctcttcacgttgatgcttggcattccatcagctttctctaagtctttgct

SEQ ID NO: 3497 - DNA, 510 bp, Homo sapiens
gtaagctcgggaattcggctcgaggcgccgacagaatgggcaagtgtcgtggacttcgtactgctaggaagctccgtagtcaccgacgagaccagaagtggcatgataaacagtataagaaagctcatttgggcacagccctaaaggccaacccttttggaggtgcttctcatgcaaaaggaatcgtgctggaaaaagtaggagttgaagccaaacagccaaattctgccattaggaagtgtgtaagggtccagctgatcaagaatggcaagaaaatcacagcctttgtacccaatgacggttgcttgaactttattgaggaaaatgatgaagttctggttgctggatttggtcgcaaaggtcatgctgttggtgatattcctggagtccgctttaaggttgtcaaagtagccaatgtttctcttttggccctatacaaaggcaagaaggaaagaccaagatcataaatattaatggtgaaaacactgtagtaataaattttcatatgcc

SEQ ID NO: 3498 - DNA, 606 bp, Homo sapiens
ggcgggcggtgtggtgcacgcattgctgtgctccaactccctcagggcctgtgttgccgcactctgctgctatgagcttcctcaaaagtttcccgccgcctgggccagcggaggggctcctgcggcagcagccagacactgaggctgtgctgaacgggaagggcctcggcactggtaccctttacatcgctgagagccgcctgtcttggttagatggctctggattaggattctcactggaataccccaccattagtttacatgcattatccagggaccgaagtgactgtctaggagagcatttgtatgttatggtgaatgccaaatttgaagaagaatcaaaagaacctgttgctgatgaagaagaggaagacagtgatgatgatgttgaacctattactgaatttagatttgtgcctagtgataaatcagcgttggaggcaatgttcactgcaatgtgcgaatgccaggccttgcatccagatcctgaggatgaggattcagatgactacgatggagaagatatgatgtggaagcacatgaacaaggacagggggacatccctacattttacacctatgaagaaggattatcccatctaacagc

SEQ ID NO: 3499 - DNA, 96 bp, Homo sapiens
gacgctgacctctgggggccacgctgagcacgaaggcaaaccctactgcaaccacccctgctacgcagccatgtttgggcctaaaggctttgggcg

SEQ ID NO: 3500 - DNA, 459 bp, Homo sapiens
aagctgtgtaatgaagaacaggaattgctgcgttttctatttgagaacaaattgaaaaatataataagcctagtgaaacggtcatccctgaatctgtagatggcttgcaagagaatctggatgtggtagtgtctttagctgagagacattattataactgtgattttaaaatgtgctacaagcttacttctgtagtaatggagaaagatcctttccatgcaagttgtttacctgtacatatagggacgcttgtagagctgaataaagccaatgaacttttctatctttctcataaactggtggatttatatcctagtaatcctgtgtcttggtttgcagtgggatgttactatctcatggtcggtcataaaaatgaacatgccagaagatatctcagcaaagccacaacacttgagaaaacctatggacctgcatggatagcctatggacattcatttg

SEQ ID NO: 3501 - DNA, 360 bp, Homo sapiens
  misc_feature 360: n = A,T,C or G
gcatggccgtccgccagtgggtaatcgccctggccttggctgccctccttgttgtggacagggaagtgccagtggcagcaggaaagctccctttctcaagaatgcccatctgtgaacacatggtagagtctccaacctgttcccagatgtccaacctggtctgcggcactgatgggctcacatatacgaatgaatgccagctctgcttggcccggataaaaaccaaacaggacatccagatcatgaaagatggcaaatgctgatcccacaggagcacctcaagccatgaagtgtcagctggagaacagtggtgggcatggagaggatatgacatgaaataaaagatccagcccaactgan

SEQ ID NO: 3502 - DNA, 392 bp, Homo sapiens
  misc_feature 390: n = A,T,C or G
tcacacgctgggcttcacggctgccaggagcctctcccctccagaagacttgcctgctggggacctcgcctgctggggacctcgcctgttggggacctcacctgctggggacctcacctgctggggaccttggctgctggaggctgcacctactgaggatgtcggcggtcggggactttacctgctgggacctgctcccagagaccttgccacactgaatctcacctgctggggacctcaccctggagggccctgggccctggggaactggcttacttggggccccacccgggagtgatggttctggctgatttgtttgtgatgttgttagccgcctgtgaggggtgcagagagatcatcacggcacggtttccagatgtaatactgcangg

SEQ ID NO: 3503 - DNA, 541 bp, Homo sapiens
tctccgttgggtccggccgctctgcgggactctgaggaaaagctcgcaccaggtggacgcggatctgtcaacatgggtaaaggagaccccaacaagccgcggggcaaaatgtcctcgtacgccttcttcgtgcagacctgccgggaagagcacaagaagaaacacccggactcttccgtcaatttcgcggaattctccaagaagtgttcggagagatggaagaccatgtctgcaaaggagaagtcgaagtttgaagatatggcaaaaagtgacaaagctcgctatgacagggagatgaaaaattacgttcctcccaaagatctgccttcttcctgttttgctctgaacatcgcccaaagatcaaaagtgaacaccctggcctatccattggggatactgcaaagaaattgggtgaaatgtggtctgagcagtcagccaaagataaacaaccatatgaacagaaagcagctaagctaaaggagaaatatgaaaaggatattgctgcatatcgtgccaagggcaaaagtgaagcaggaaagaa

SEQ ID NO: 3504 - DNA, 302 bp, Homo sapiens; identical to SEQ ID NO: 731

SEQ ID NO: 3505 - DNA, 297 bp, Homo sapiens
catcctgtacctatggcagggccaccaggccactgcggatgagattgaggccctgaacagcaacgctgaggaactagatgtcatgtatggtggcgtcctagtacaggagcatgtgaccatgggcagcgagcccccccacttcctcgccatcttccagggccagctggtgatcttccaggagagagctgggcaccatggaaaggggcagtcagcatccaccacaaggcttttccaagtgcaaggcactgacagccacaacaccaggaccatggaggtgccagcccgtgcctcatccct

SEQ ID NO: 3506 - DNA, 534 bp, Homo sapiens
aagtcctctccctggaggcctatctccctcagaacggcgcgagaagcgagaccttagaaggcagcgcttcccgcgaaggaccggaaaggagcgcctactaaggacgccgtcgaggtccggggcgcctcaactctatagctctaactggctagaagtgcccaacgtggaatgtttcttttttaaaggcggctcttgaagcgacccggaagcggaagtggaagaaagttctagtggcttgagattaagcctgatcaagatgacaacctcccaaaagcaccgagacttcgtggcagagcccatgggggagaagccagtggggagcctggctgggattggtgaagtcctgggcaagaagctggaggaaaggggttttgacaaggcctatgttgtccttggccagtttctggtgctaaagaaagatgaagacctcttccgggaatggctgaaagacacttgtggcgccaacgccaagcagtcccgggactgcttcggatgccttcgagagtggtgcgacgccttcttgtgatgctctct

SEQ ID NO: 3507 - DNA, 259 bp, Homo sapiens
ggtgccgattcctgccctgccccgaccgccagcgcgaccatgtcccatcactgggggtacggcaaacacaacggacctgagcactggcataaggacttccccattgccaagggagagcgccagtcccctgttgacatcgacactcatacagccaagtatgacccttccctgaagcccctgtctgtttcctatgatcaagcaacttccctgaggatcctcaacaatggtcatgctttcaacgtggagtttgatgactctc

SEQ ID NO: 3508 - DNA, 438 bp, Homo sapiens; identical to SEQ ID NO: 732

SEQ ID NO: 3509 - DNA, 500 bp, Homo sapiens; identical to SEQ ID NO: 735

SEQ ID NO: 3510 - DNA, 533 bp, Homo sapiens
accggcagtacaaagactacaagatccactggtgggagaacgtgtatggcttcgacatgtcttgcatcaaagatgtggccattaaggagcccctagtggatgtcgtggaccccaaacagctggtcaccaacgcctgcctcataaaggaggtggacatctataccgtcaaggtggaagacctgaccttcacctccccgttctgcctgcaagtgaagcggaatgactacgtgcacgccctggtggcctacttcaacatcgagttcacacgctgccacaagaggaccggcttctccaccagccccgagtccccgtacacgcactggaagcagacggtgttctacatggaggactacctgaccgtgaagacgggcgaggagatcttcggcaccatcggcatgcggcccaacgccaagaacaaccgggacctggacttcaccatcgacctggacttcaagggccagctgtgcgagctgtcctgctccaccgactaccggatgcgctgaggcccggctctcccgccctgcacagcccag

SEQ ID NO: 3511 - DNA, 358 bp, Homo sapiens
acagacattaacagtatttactgagagctcatcagataagctgtcattggaaggaatagtggtacaaagagctgaatgccgaccagctgccagtgaaaactacatgcgattaaaaagattgcaaatagaagagtcttccaaaccagtgaggctatcacaacagctggacaaagttgtaacaaccaattacaaacctgttgctaatcatcaatacaatatcgaatatgaaaggaaaaagaaagaagacggaaagcgagctcgagctgataaacaacatgttttagacatgctattttcagcctttgagaaacatcaatactataatcttaaggacttggtggacatcacaaagcaacct

SEQ ID NO: 3512 - DNA, 373 bp, Homo sapiens
attcgtgagttttgatcttccagctcaggcagacaccttacacagtgcaaacaagagccgtgtcaagatgagagggaagcgtagaccgcagacccgtgcagctaggcggctggctgctcaggagtccagcgagactgaggacatgagcgtccccagaggacccattgcacagtgggctgatggcgccatttccccaaatggccatcggccacagctcagagcagccagtggagaagacagcactgaggaggccctggcagctgccgctgcaccttgggaaggtggtcctgtgcctggagtggacagaagcccctttgcaaagtctctgggtcattccagaggggaggctgacctttttgattctggggacatc

SEQ ID NO: 3513 - DNA, 539 bp, Homo sapiens; identical to SEQ ID NO: 736

SEQ ID NO: 3514 - DNA, 573 bp, Homo sapiens
  misc_feature 441: n = A,T,C or G
tgctttacgtggatgataataatgaaaatggatgtgagttggataaggagatcaaaaacagctttaacccagaggcccaggtttttatgcccataagtgacccagcctcatcagtgtccagctctccatcgcctccttttggtcactctgctgctgtaagccctaccttcatgccccggtccactcagcctttaacctttaccactgccacttttgctgccaccaagttcggctctaccaaaatgaagaatagtggccgtagcaacaaggttgcacgtacttctcccatcaacctcggcttgaatgtgaatgacctcttgaagcagaaagccatctcttcctcaatgcactctctgtatgggcttggcttgggtagccagcagcagccacagcaacagcagcagccagcccagccgccaccgccaccaccaccaccacagnagcaacaacagcagaaaacctctgctctttctcctaatgccaaggaatttatttttcctaatatgcagggtcaaggtagtagtaccaatggaatgttcccaggtgacagcccccttaacctcagtcctctcc

SEQ ID NO: 3515 - DNA, 586 bp, Homo sapiens; identical to SEQ ID NO: 738

SEQ ID NO: 3516 - DNA, 580 bp, Homo sapiens
aagctcgggaattcggctcgagggccagtcatgtgttaagttgcgcttctttgctgtgatgtgggtgggggaggaagagtaaacacagtgctggctcggctgccctgagggtgctcaatcaagcacaggtttcaagtctgggttctggtgtccactcacccaccccaccccccaaaatcagacaaatgctactttgtctaacctgctgtggcctctgagacatgttctatttttaaccccttcttggaattggctctcttcttcaaaggaccaggtcctgttcctctttctccccgactccaccccagctccctgtgaagagagagttaatatatttgttttatttatttgctttttgcgttgggatgggttcgtgtccagtcccgggggtctgatatggccatcacaggctgggtgttcccagcagccctggcttgggggcttgacgcccttccccttgccccaggccatcatctccccacctctcctcccctctcctcagttttgccgactgcttttcatctgagtcaccatttactccaagcatgtattccagacttgtcactgactttccttctgg

SEQ ID NO: 3517 - DNA, 541 bp, Homo sapiens
tggaggaattgtatggagacattgatgcgttggagttctaccctggactgcttcttgaaaagtgccatccaaactctatctttggggagagtatgatagagattggggctcccttttccctcaagggtctcctagggaatcccatctgttctccggagtactggaagccgagcacatttggcggcgaggtgggctttaacattgtcaagacggccacactgaagaagctggtctgcctcaacaccaagacctgtccctacgtttccttccgtgtgccggatgccagtcaggatgatgggcctgctgtggagcgaccatccacagagctctgaggggcaggaaagcagcattctggaggggagagctttgtgcttgtcattccagagtgctgaggccagggctgatggtcttaaatgctcattttctggtttggcatggtgagtgttggggttgacatttagaactttaagtctcacccattatctggaatattgtgattctgtttattcttccagaatgctgaactccttgttagcccttc

SEQ ID NO: 3518 - DNA, 542 bp, Homo sapiens
atatccacactgtactgtgatataggtactctgatttaaaactttggacatcctgtgatctgttttaaagttggggggtgggaaatttagctgactagggacaaacatgtaaacctattttcctatgaaaaaaattttaaatgtcccacttgaataacgtaattcttcatagtttttttaatctatggataaatggaaacctaattatttgtaatgaattatttagacagttctaagccctgtcttctgggagttatcaattttaaagagaacttttgtgcaattcaaatgaagtttttataagtaattgaaaatgacaacacaataacactttctgtataaaagtatatattttatgtgatttattcctactaaatgaaagtgcactactgcctcatgtaaagactcttgcacgcagagcctttaagtgactaaggaacaacatagatagtgagcatagtccccacctccacccctcacaatttatttgaatacttcaattgtgcctctcaattttttgtaatgctaaaaaatcagtatct

SEQ ID NO: 3519 - DNA, 633 bp, Homo sapiens
ttgttactgtgacagtttggaaaatttggcagatggttataagcacatgtccttggccctgaataggactggcagaagcattgtgtactcctgtgagtggcctctttatatgtggccctttcaaaagcccaattatacagaaatccgacagtactgcaatcactggcgaaattttgctgacattgatgattcctggaaaagtataaagagtatcttggactggacatcttttaaccaggagagaattgttgatgttgctggaccagggggttggaatgacccagatatgttagtgattggcaactttggcctcagctggaatcagcaagtaactcagatggccctctgggctatcatggctgctcctttattcatgtctaatgacctccgacacatcagccctcaagccaaagctctccttcaggataaggacgtaattgccatcaatcaggaccccttgggcaagcaagggtaccagcttagacagggagacaacttttgaagtgtgggaacgacctctctcaggcttagcctgggctgtagctatgataaaccggcaggagattggtggacctcgctcttataccatccagttgcttcctgggtaaaggagtggcctgtaatcctgcctgc

SEQ ID NO: 3520 - DNA, 519 bp, Homo sapiens
tcggctcgagcggctcgagccctgatggacacgcaggatgaccctcaggccataatcatctgggacatccttacggggcacaagaagaggggttttcactgtgagagctcagcccattggcctatttttaagtggagccatgatggcaaattctttgccagaatgaccctggatacgcttagcatctatgaaactccttctatgggtcttttggacaagaagagtttgaagatctctgggataaaagacttttcttggtctcctggtggtaacataatcgccttctgggtgcctgaagacaaagatattccagccagggtaaccctgatgcagctccctaccaggcaagagatccgagtgaggaacctgttcaatgtggtggactgcaagctccattggcagaagaacggagactacttgtgtgtgaaagtagataggactccgaaaggcacccaggtgttgtcacaaattttgaaattttccgaatgagggagaaacaggtacctgtggatgtggtcg

SEQ ID NO: 3521 - DNA, 610 bp, Homo sapiens
caactgtgttcactagcaacctcaaacagacaccatggtgcatctgactcctgaggagaagtctgccgttactgccctgtggggcaaggtgaacgtggatgaagttggtggtgaggccctgggcaggctgctggtggtctacccttggacccagaggttctttgagtcctttggggatctgtccactcctgatgctgttatgggcaaccctaaggtgaaggctcatggcaagaaagtgctcggtgcctttagtgatggcctggctcacctggacaacctcaagggcacctttgccacactgagtgagctgcactgtgacaagctgcacgtggatcctgagaacttcaggctcctgggcaacgtgctggtctgtgtgctggcccatcactttggcaaagaattcaccccaccagtgcaggctgcctatcagaaagtcgtggctggtgtggctaatgccctggcccacaagtatcactaagctcgctttcttgctgtccaatttctattaaaggttcctttgttccctaagtccaactactaaactgggggatattatgaagggccttgagcatctggattctgcctaataaaaaacatttattttcattgc

SEQ ID NO: 3522 - DNA, 506 bp, Homo sapiens
aagctcgggaattcggctcgaggcggtagctgggaccgccgttcagtcgccaatatgcagctctttgtccgcgcccaggagctacacaccttcgaggtgaccggccaggaaacggtcgcccagatcaaggctcatgtagcctcactggagggcattgccccggaagatcaagtcgtgctcctggcaggcgcgcccctggaggatgaggccactctgggccagtgcggggtggaggccctgactaccctggaagtagcaggccgcatgcttggaggtaaagtccatggttccctggcccgtgctggaaaagtgagaggtcagactcctaaggtggccaaacaggagaagaagaagaagaagacaggtcgggctaagcggcggatgcagtacaaccggcgctttgtcaacgttgtgcccacctttggcaagaagaagggccccaatgccaactcttaagtcttttgtaattctggctttctctaataaaaaagccacttagttcagtc

SEQ ID NO: 3523 - DNA, 646 bp, Homo sapiens
ttaaaccattcagaaaaagcttaagaaatgcgatatgacttccttttgtaatgctgctgatcccagtagactatgacttttgataattagcagaatttaactactgagtagttgattattttcacattttaattgctaatcactggctatataagtgtttttaagcaaaggtatttttgaagtggtgtagaacccttccaagctttcctgctcagtgttctaccagacttaccctggggcctggcttaaaagcaggattgaagaaaagggactgggggaaggaaacttattggaaaacttgatgcgaatgagtttctgcttggcacagtctctgcctgcttgctctcctttgctgatggattgcatttatcaaactattcatgctagcatttttccaacgagggaacttattccgcacgggcctactgtaggaccattgtctcgtgtaattaggaattttccatttgaaggatcgctaaattgtcacagtagtaggaagtatagggaaacctctcagctgtggcactgttgtagctttggagtgcagagtgtaactctgggacaatcagatttcacatattctgtcatcttggcataagccattaaaagcttggagattactgtatttggcattaaaaaaaaatgt

SEQ ID NO: 3524 - DNA, 629 bp, Homo sapiens
taagctcgggattcggctcgagcggctcgagcctggggggcagaatgtgaacaaagtgaattccaaggcagaagtcaggttccatttggcaactgccgagtggatcgcggagcccgtgcggcagaagatagccatcacgcataaaaacaagatcaacaggttaggagagttgatcctcacctctgagagcagccgctatcagttccggaatctggcagattgcctgcagaaaattcgagacatgatcactgaggccagccagacaccgaaggagccaacaaaagaagatgttaaacttcatagaatcaggatagaaaacatgaatcgggaaaggctgagacaaaagagaattcattctgctgtaaagacaagcaggagggtcgacatggactgaaatcaccctctgcagctgggagggctcttctgggcgtccgggcagctgcagctgagaggactttcacaccataaggagatttctgtttttctttttggctgttaatgcttgtctataacattggagccatcacaagaatgttcatttggaatgaaggctgcaggcactggttgcagacgtctttataggcagtcaccatgttgtcaaaccttaataatgcacctcatgtattagt

SEQ ID NO: 3525 - DNA, 578 bp, Homo sapiens
ccatctcttcctccaagctgtacaatgaggtccgagcctgtagggagaaggaccgtgaccctgaggcccagtttgagatgccttatgtggtacggctgcacaacttccaccagctctctgcaccccagccctgtttcaccttcagccatcccaacagagatcctatgattgacaacaaccgctattgcaccttggaatttcctgtggaggtgaacacagtactacatggctttgccggctactttgagactgtgctttatcaggacatcactctgagtatccgtccagagactcactctcctgggatgttctcatggtttcccatcctcttccctattaagcagcccataacggtacgtgaaggccaaaccatctgtgtgcgtttctggcgatgcagcaattccaagaaggtgtggtatgagtgggctgtgacagcaccagtctgttctgctattcataaccccacaggccgctcatataccattggcctctagccctgcgtgccaagtgtccagagccttggaagcagcttcaggttctgctcctgtagtacagaaggtgcagtacatctatgggct

SEQ ID NO: 3526 - DNA, 565 bp, Homo sapiens
gctgcgaggcgctgggcacagttgctgtcccctttgacgatgatgacaagattgttgggggctacacctgtgagaattctctcccctaccaggtgtccctgaattctggctcccacttctgcggtggctccctcatcagcgaacagtgggtggtatcagcagctcactgctacaagacccgcatccaggtgagactgggagagcacaacatcaaagtcctggaggggaatgagcagttcatcaatgcggccaagatcatccgccaccctaaatacaacagggacactctggacaatgacatcatgctgatcaaactctcctcacctgccgtcatcaatgcccgcgtgtccaccatctctctgcccaccgcccctccagctgctggcactgagtgcctcatctccggctggggcaacactctgagctttggtgctgactacccagacgagctgaagtgcctggatgctccggtgctgacccaggctgagtgtaaagcctcctaccctggaaagattaccaacagcatgttctgtgtgggcttccttgagggaggcaaggattcctg

SEQ ID NO: 3527 - DNA, 577 bp, Homo sapiens
gtaagctcgggaattcggctcgaggcgtcctcgtggaagtgacatcgtctttaaaccctgcgtggcaatccctgacgcaccgccgtgatgcccaggaagacagggcgacctggaagtccaactacttccttaagatcatccaactattggatgattatccgaaatgtttcattgtgggagcagacaatgtgggctccaagcagatgcagcagatccgcatgtcccttcgcgggaaggctgtggtgctgatgggcaagaacaccatgatgcgcaaggccatccgagggcacctggaaaacaacccagctctggagaaactgctgcctcatatccgggggaatgtgggctttgtgttcaccaaggaggacctcactgagatcagggacatgttgctggccaataaggtgccagctgctgcccgtgctggtgccattgccccatgtgaagtcactgtgccagcccagaacactggtctcgggcccgagaagacctcctttttccaggctttaggtatcaccactaaaatctccaggggcaccattgaaatcctgagtgatgtgcagctgatcaagactgg

SEQ ID NO: 3528 - DNA, 427 bp, Homo sapiens
attgaagcaagactaaagatgtataagcattccaataataaggccatgactacgggggcaattgctgcaatgctgtctacaatcctgtattcaaggcgcttctttccatactatgtttacaacatcatcggtggacttgatgaagaaggaaagggggctgtatacagctttgatccagtagggtcttaccagagagactccttcaaggctggaggctcagcaagtgccatgctacagcccctgcttgacaaccaggttggttttaagaacatgcagaatgtggagcatgttccgctgtccttggacagagccatgcggctggtgaaagatgtcttcatttctgcggctgagagagatgtgtacactggggacgcactccggatctgcatagtgaccaaagagggcatcagggaggaaactgtttcct

SEQ ID NO: 3529 - DNA, 382 bp, Homo sapiens
ggaagacgagggattgccatcgcctatgaggatgagggaagcggctgataccatgtggggctggagacatagatggacttatgaatggctgctaggacctttagtgctccctgcaccaacctcccatccccctgccaagatccttgaaggaccctggaaggagggagagcaggcagcccttcacaggataggatccgtctctgtcctgtcctggcactggcacaagctcagcacatgcccagtaatgcgtgttgtttggctgatggaataaagggcttagggacttccctgaggcctctggacccatctgtcttcctgagggcagcccaggacctttggccaatcccagttcccaggctgcagttgagggtctgtccttgtc

SEQ ID NO: 3530 - DNA, 299 bp, Homo sapiens
atggacttgcccaggtcgcgcatcaacgccggcatgctagctcaattcatcgacaagcctgtctgcttcgtagggaggctggaaaagattcatcccaccggaaaaatgtttattctttcagatggagaaggaaaaaatggaaccatcgagttgatggaaccccttgatgaagaaatctctggaattgtggaagtggttggaagagtaaccgccaaggccaccatcttgtgtacatcttatgtccagtttaaagaagatagccatccttttgatcttggactttacaatgaagctgtgaa

SEQ ID NO: 3531 - DNA, 404 bp, Homo sapiens
gggccaggcccctttccacaagggtgcccagagcagccattgtgttcaccgacggacgggctcaggatgacgtctccgagtgggccagtaaagccaaggccaatggtatcactatgtatgctgttggggtaggaaaagccattgaggaggaactacaagagattgcctctgagcccacaaacaagcatctcttctatgccgaagacttcagcacaatggatgagataagtgaaaaactcaagaaaggcatctgtgaagctctagaagactccgatggaagacaggactctccagcaggggaactgccaaaaacggtccaacagccaacagtgcaacacagatatctgtttgaagaagacaatcttttacggtctacacaaaagctttcccattcaacaaaacct

SEQ ID NO: 3532 - DNA, 396 bp, Homo sapiens; identical to SEQ ID NO: 749

SEQ ID NO: 3533 - DNA, 505 bp, Homo sapiens
tgctgtgtggccaattataatttttttcaaagactttgtcacaaaactgtctatattagacattttggagggaccaggaaatgtaagacaccaaatcctccatctcttcagtgtgcctgatgtcacctcatgatttgctgttacttttttaactcctgcgccaaggacagtgggttctgtgtccacctttgtgctttgcgaggccgagcccaggcatctgctcgcctgccacggctgaccagagaaggtgcttcaggagctctgccttagacgacgtgttacagtatgaacacacagcagaggcaccctcgtatgttttgaaagttgccttctgaaagggcacagttttaaggaaaagaaaaagaatgtaaaactatactgacccgttttcagttttaaagggtcgtgagaaactggctggtccaatgggatttacagcaacattttccattgctgaagtgaggtagcagctctcttctgtcagctgaatgttaaggatggggaa

SEQ ID NO: 3534 - DNA, 314 bp, Homo sapiens; identical to SEQ ID NO: 750

SEQ ID NO: 3535 - DNA, 563 bp, Homo sapiens
accgccaccatgacggtgggcaagagcagcaagatgctgcagcatattgattacaggatgaggtgcatcctgcaggacggccggatcttcattggcaccttcaaggcttttgacaagcacatgaatttgatcctctgtgactgtgatgagttcagaaagatcaagccaaagaactccaaacaagcagaaagggaagagaagcgagtcctcggtctggtgctgctgcgaggggagaatctggtctcaatgacagtagagggacctcctcccaaagatactggtattgctcgagttccacttgctggagctgccgggggcccagggatcggcagggctgctggcagaggaatcccagctggggttcccatgccccaggctcctgcaggacttgctgggccagtccgtggggttggcgggccatcccaacaggtgatgaccccacaaggaagaggtactgttgcagccgctgcagctgctgccacagccagtattgccggggctccaacccagtacccacctggccgtgggggtcctcccccacctatgggccgaggagcaccccc

SEQ ID NO: 3536 - DNA, 435 bp, Homo sapiens
ccagcggtgggcattgctgctggaatggcacgggccggcccggcgtggctgctgctggcaatctgggtggtcctgccatcatggctgtcctctgcaaaggtctcctcgctcattgagagaatctctgaccccaaggacttgaaaaaactgctcagaacccggaataatgtactggtgctttactccaaatctgaggtggcagctgaaaatcatctcaggttactgtccacagtggcccaggcggtgaaaggacaagggaccatctgctgggtggactgtggtgatgcagagagtagaaaattgtgcaagaagatgaaagttgacctgagcccgaaggacaaaaaggttgaattattccattaccaggatggtgcatttcatactgaatataaccgagctgtgacatttaagtccatagtggcctttttgaaggat

SEQ ID NO: 3537 - DNA, 303 bp, Homo sapiens
  misc_feature 37: n = A,T,C or G
acgtttcctgtcactacacagagcacacctgggagangaggcccacaagtgccttgaatgtgggaaatgcttcagtcagaacacccatctgactcgccaccaacgcacccacacgggtgagaagccctatcagtgcaacatttgcggaaaatgtttctcctgcaactccaacctccacaggcaccagagaacgcacactggggagaagccctacaagtgccctgagtgtggggagatctttgctcacagttccaacctccttcggcaccagagaatcacactggagagcgaccttataagtgt

SEQ ID NO: 3538 - DNA, 552 bp, Homo sapiens; identical to SEQ ID NO: 753

SEQ ID NO: 3539 - DNA, 377 bp, Homo sapiens
gaccccactgggtggtgctcaaccagggaagggagatcgtgcagacaatgaacagcgacccaggcctggctgtgggttacactgccttcaatggcgtggacttcgagggcacgttccatgtgaacacggtcacggatgacgactatgcgggcttcatctttggctaccaggacagctccagcttctacgtggtcatgtggaagcagatggagcaaacgtattggcaggcgaaccccttccgtgctgtggccgagcctggcatccaactcaaggctgtgaagtcttccacaggccccggggaacagctgcggaacgctctgtggcatacaggagacacagagtcccaggtgcggctgctgtggaaggacccgcgaaac

SEQ ID NO: 3540 - DNA, 530 bp, Homo sapiens
gctcctcctcgcccgccgctaggtccatcccggcccagccaccatgtccatccacttcagctccccggtattcacctcgcgctcagccgcctggaggcggagctgcggagcatgcaggatgtggtggaggacttcaagaataagtacgaagatgaaattaaccgccgcacagctgctgagaatgagtttgtggtgctgaagaaggatgtggatgctgcctacatgagcaaggtggagctggaggccaaggtggatgccctgaatgatgagatcaacttcctcaggaccctcaatgagacggagttgacagagctgcagtcccagatctccgacacatctgtggtgctgtccatggacaacagtcgctccctggacctggacggcatcatcgctgaggtcaaggcacagtatgaggagatggccaaatgcagccgggctgaggctgaagcctggtaccagaccaagtttgagaccctccaggcccaggctgggaagcatggggacgacctccggaatacccggaatgagat

SEQ ID NO: 3541 - DNA, 521 bp, Homo sapiens
ccacaaaggttctgtggagatttgatgggaataaaccagataccttaggtctcaatactcggctctacaagtggataccccagaatgaccttctaggtcatccaaagaccagagcttttataactcatggtggagccaatggcatctacgaggcaatctaccatgggatccctatggtggggattccattgtttgctgatcaacctgataacattgctcacatgaaggccaggggagcagctgttagagtggacttcaacacaatgtcgagtacagacttgctgaatgcattgaagagagtaattaatgatccttcatataaagagaatgttatgaaattatcaagaattcaacatgatcaaccagtgaagcccctggatcgagcagtcttctggattgaatttgtcatgcgccacaaaggagctaaacaccttcgggttgcagcccacgacctcacctggttccagtaccactctttggatgtgattgggttcctgctggtctgtgtggcaactgtgata

SEQ ID NO: 3542 - DNA, 263 bp, Homo sapiens
gacagtgtatcgcctcggagactgcctcgctgcccatgatcgtcagcatcaaggagggaggcaggaccaggccccaggtggtcagcctgcccaacatgagggtgcagaagtgcagctgtgcctcggatggggcgctcgtgccaaggaggctccagccataggcgcctggtgtatccattgagccctctaactgaacgtgtgcatagaggtggtcttaatgtaagtcttaactttatacttagcaagttactccatcccaattt

SEQ ID NO: 3543 - DNA, 417 bp, Homo sapiens
cgacgctgtggttgctgtaaggggtcctccctgcgccacacggccgtcgccatggtgaagctgagcaaagaggccaagcagagactacagcagctcttcaaggggagccagtttgccattcgctggggctttatccctcttgtgatttacctgggatttaagaggggtgcagatcccggaatgcctgaaccaactgttttgagcctactttggggataaaggattatttggtcttctggatttggaggcaatcagcggacagcatggaagatgtgtgctctggctcggataagagatgggacatcattcagtcactagttggatggcacaaggctcttcacagacgcatctgtagcagagtggaacttgtactaacttatgatagaatgtatcagaataaatgtttttaacagtgtt

SEQ ID NO: 3544 - DNA, 631 bp, Homo sapiens
aagctcgggaattcggctcgaggctggcagacctgtactccgtactccgtacttcgtagtcgcagcggcgcggtcttcggcagtttagtcatccaccgccatcctgggccccacgtgttgcctgaccattcctgagcccaggtgggagccgtggctgaggtgacggtctcaaagtggaagagcttactgtcacagcaactcctttgcaagatgccccggccaggaatagttgctgaacaccccaggcctgctgaggtccctccttgagtctcatgttcaagcagtctttgtccatgaaactgggaggcgaccgtgttagctgccagttcctgacagccacctctcaccagtggcttcactctgtgtccctgacccagcacatggcacaagagtgcctgccatccgtcagtgtttctacagcagcaatcccaagatgctggagctagaggggacctgacctgagagaagataccttcagtggctgccaggctgttccttggaacctgtgcatggatgaggcctgcctgtgttaatacacctagtgaggagtggagctgaattgtgatgcaagccttggcaccttaattgagcaagtttgaaacctcgcttgttgcccttctggaaggagtca

SEQ ID NO: 3545 - DNA, 620 bp, Homo sapiens
cgttgtagtcggcccggctgcaaagcgtttttctgcaggctgttttcccaggttccctcggcctgtacctcgcgcactcctcttgctccaggtccttcagtctccgctcgtctcaccgtaggctgtgacgacatgagcaacaaagaaggatcaggagggttcaggaaaaggaagcatgacaatttcccacataaccaaagaagagaagggaaggatgttaattcatcttcacccgtgatgttggcctttaaatcatttcagcaggaacttgatgcaaggcatgacaaatatgagagacttgtgaaacttagtcgggatataactgttgaaagtaaaaggacaatttttctcctccataggattacaagtgctcctgatatggaagatatattgactgaatcagaaattaaattggatggtgtcagacaaaagatattccaggtagcccaagagctatcaggggaagatatgcatcagttccatcgagccattactacaggactacaggaatatgtggaagctgtctcttttcaacacttcatcaaaacacgatcattaattagtatggatgaaattaataaacaattgatatttacgactgaagacaatgggaaagaaaa

SEQ ID NO: 3546 - DNA, 487 bp, Homo sapiens
aacgcctcactgaaacatggctgtgtttgcagcctgctctagtgggacagcccagagcctggctgcccatcatgtggccccacccaatcaagggaagaaggaggaatgctggactggaggcccctggagccagatggcaagagggtgacagcttcctttcctgtgtgtactctgtccagttcctttagaaaaaatggatgcccagaggactcccaaccctggcttggggtcaagaaacagccagcaagagttaggggccttagggcactgggctgttgttccattgaagccgactctggccctggcccttacttgcttctctagctctctaggcctctccagtttgcacctgtccccaccctccactcagctgtcctgcagcaaacactccaccctccaccttccattttcccccactactgcagcacctccaggcctgttgctatagagcctacctgtatgtcaataaacaacagctgaagcacct

SEQ ID NO: 3547 - DNA, 550 bp, Homo sapiens
gcggtggcaaattcaagtcctgttaaccccgtggtgttctttgatgtcagtattggcggtcaggaagttggccgcatgaagatcgagctctttgcagacgttgtgcctaagacggccgagaactttaggcagttctgcaccggagaattcaggaaagatggggttccaataggatacaaaggaagcaccttccacagggtcataaaggatttcatgattcagggtggagattttgttaatggagatggtactggagtcgccagtatttaccgggggccatttgcagatgaaaattttaaacttagacactcagctccaggcctgctttccatggcaaacagtggtccaagtacaaatggctgtcagttctttatcacctgctctaagtgcgattggctggatgggaagcatgtggtgtttggaaaaatcatcgatggacttctagtgatgagaaagattgagaatgttcccacaggccccaacaataagcccaagctacctgtggtgatctcgcagtgtggggagatgtagtccagacaaagactgaatc

SEQ ID NO: 3548 - DNA, 544 bp, Homo sapiens; identical to SEQ ID NO: 2693

SEQ ID NO: 3549 - DNA, 469 bp, Homo sapiens
aggcttgtgcacaaccagatcatctggaccatataattccagaccacaacttcctttttccagaatttgaaattgtaatagaaacagaagatgagattatgcctgaggttgtggaaaaggaagattactcagagattatagggagcatgggtaagcagtttcaggacttcattcattaagtggttaaacataatacttggaagaaagggctccatgtgcctagaagagaggtactgagaggaagactcactttggaggctgtagcatacaattttcagatattgcctcaggtaaaaatatacttcctggactttgttttctgacacataagaggtgtgttctgctccctgtaaagacaagggtgggtatccagatggtcccatgagtagggctgcacaagatgctggaggcttggtaagttcctctgggtcgcagatcggtttctcgggtcgggatagtgtgagtgcct

SEQ ID NO: 3550 - DNA, 316 bp, Homo sapiens; identical to SEQ ID NO: 2636

SEQ ID NO: 3551 - DNA, 463 bp, Homo sapiens
tctcctggtgtttataccaaagtctcagcctttgtaccttggataaaaagtgtcaccaaactgtaattcttcatggaaacttcaaagcagcatttaaacaaatggaaaactttgaacccccactattagcactcagcagagatgacaacaaatggcaagatctgtttttgctttgtgttgtggtaaaaaattgtgtaccccctgctgcttttgagaaatttgtgaacattttcagaggcctcagtgtagtggaagtgataatccttaaatgaacattttctaccctaatttcactggagtgacttattctaagcctcatctatcccctacctatttctcaaaatcattctatgctgattttacaaaagatcatttttacatttgaactgagaaccccttttaattgaatcagtggtgtctgaaatcatattaaatacccacatttgacataaatgcggtaccc

SEQ ID NO: 3552 - DNA, 411 bp, Homo sapiens
gtaagctcgggaattcggctcgagcttcatcagcttcaggccaagttcgaagtcactatgtagactggagaatgtggcgcgatgtgaagagacgaaaaatggcctatgaatacgcagatgagaggctacgtattaattcactcaggaagaataccattttgccaaaaattcttcaggatgtggctgatgaagaaattgctgccctcccccgggatagctgtcctgttagaatcagaaatcggtgtgttatgacgtcccgtccgcgtggtgtgaagcggcgctggaggcttagtcgtatagtcttccgtcacttagctgaccatgggcaactttctgggatccagcgagcgacatggtaaatgagctccagaacctattgagcttgcagggaagccaagcttgcagttccag

SEQ ID NO: 3553 - DNA, 586 bp, Homo sapiens
gccctggtgctgacagccctgttggtggggctggggatgtcagtggggctgcctctgggggcgctcccggaaatgctcctgcccttggcgtttgtcgccaccctcaccgctttcatcttcagcctctttctctacatgaaggcgcaggtagccccagtttcggccctggcacctggggggaactcaggcaatccgatttacgacttttttctgggacgagagctcaaccctcgtatctgtttcttcgacttcaaatatttctgtgaactgcgacccggcctcatcggctgggtcctcatcaacctggccctgttgatgaaggaggcagagcttcgaggcagtccctcactggccatgtggctggtcaatggcttccagttgctctacgtgggtgatgccctctggcacgaggaggccgtcctcaccaccatggatatcacacatgacgggtttggcttcatgctggcgtttggggacatggcctgggtgcccttcacctacagcctgcaggcccagttcctgctgcaccacccgcagcccctggggttgcccatggcctctgtcatctgcctcatcaatgctattg

SEQ ID NO: 3554 - DNA, 519 bp, Homo sapiens
tcagacgtcgccttccacttcaatccgcggtttgacggctgggacaaggtggtcttcaacacgttgcagggcgggaagtggggcagcgaggagaggaagaggagcatgcccttagtacgggcaccggcttcccctacagatggtcacccacctgcaagtggatggggatctgcaacttcaatcaatcaacttcatcggaggccagcccctccggccccagggacccccgatgatgccaccttaccctggtcccggacattgccatcaacagctgaacagcctgcccaccatggaaggacccccaaccttcaacccgcctgtgccatatttcgggaggctgcaaggagggctcacagctcgaagaaccatcatcatcaagggctatgtgcctcccacaggcaagagctttgctatcaacttcaaggtgggctcctcaggggacatagctctgcacattaatccccgcatgggcaacggtaccgtggtccggaacagccttctgaatggctcgtggggatc

SEQ ID NO: 3555 - DNA, 585 bp, Homo sapiens
cgtttgggatgccaacgatgaggctgctgtcatttgtggtgttggctctatttgctgtcactcaagcagaggaaggagccaggcttttggcttccaaatcactgctgaacagatacgccgtggagggacgagacctgaccttgcagtacaacatctacaatgttggctcaagattggctctaccagtgcacctggacagggaggaatcctggctcagcgggagtttgacaggcgattctcccctcattttctggactgggcagcctttggggtcatgacccttccctccatcggcatccccctgctattgtggtactccagcaagaggaaatatgacactcccaaaacgaagaagaactgattggggcttccacagccctcctctcccaagaaatccaggctcctctcccaagaaatccaggtgctttccagactccaaagggtatcttaaatgcaatctcttctctcttagcccttggccactttctcctggatcctgccctgctctcagccatagtgaaggaccagccctaggagtctgcgagagcctccttggttccatcgtgaagccataaacaggaatgc

SEQ ID NO: 3556 - DNA, 594 bp, Homo sapiens
agctcggaattcggctcgagattatctgcaatgaagaatttgacagtattcctagaagaactggagctgaggttgacatcacaggcatgacaatgctgctacaaaatctggggtacagcgtagatgtgaaaaaaaatctcactgcttcggacatgactacagagctggaggcatttgcacaccgcccagagcacaagacctctgacagcacgttcctggtgttcatgtctcatggtattcgggaaggcatttgtgggaagaaacactctgagcaagtcccagatatattacaactcaatgcaatctttaacatgttgaataccaagaactgcccaagtttgaaggacaaaccgaaggtgatcatcatccaggcctgccgtggtgacagccctggtgtggtgtggtttaaagattcagtaggagtttctggaaacctatctttaccaactacagaagagtttgaggatgatgctattaagaaagcccacatagagaaggattttatcgctttctgctcttccacaccagataatgtttcttggagacatcccacaatgggctctgtttttattggaagactcattgaacatatgc

SEQ ID NO: 3557 - DNA, 565 bp, Homo sapiens; identical to SEQ ID NO: 762

SEQ ID NO: 3558 - DNA, 530 bp, Homo sapiens; identical to SEQ ID NO: 765

SEQ ID NO: 3559 - DNA, 466 bp, Homo sapiens
  misc_feature 299, 413: n = A,T,C or G
ctcatacctgtctgattctggttctactggggagcatacaaaatccctagtcacacagtatttgaatgccactggcaatcgctggtgcagctggagtttgtctcaggcaaggctcctgacttccttcttgccggctcaacttctccgactctaccagctgatgctcttcaccctgccagggacccctgttttcagctacggggatgagattggcctggatgcagctgcccttcctggacagcctatggaggctccagtcatgctgtgggatgagtccagcttccctgacatcccagggngctgtaagtgccaacatgactgtgaagggccagagtgaagaccctggctccctcctttccttgttccggcggctgagtgaccagcggagtaaggagcgctccctactgcatggngacttccacgcgttctccgctgggcctggactcttctcctatatccgccactg

SEQ ID NO: 3560 - DNA, 250 bp, Homo sapiens
acagggcaggcagaggaggcacctgtagggggtggtgggctggtggcccaggagaagtcaggaagggagcccagctggtgacaagagagcccagaggtgcctggggctgagtgtgagagcccggaagatttcagccatgcctcacagctccgacagcagtgactccagcttcagccgctctcctccccctggcaaacaggactcatctgatgatgtgagaagagttcagaggagggagaaaaatcgtatt

SEQ ID NO: 3561 - DNA, 485 bp, Homo sapiens
taaaagtgctgtttgtacgcaaccttgccaatactgtaacagaagagattttagaaaaggcatttagtcagtttgggaaactggaacgagtgaagaagttaaaagattatgcgttcattcattttgatgagcgagatggtgctgtcaaggctatggaagaaatgaatggcaaagacttggagggagaaaatattgaaattgtttttgccaagccaccagatcagaaaaggaaagaaagaaaagctcagaggcaagcagcaaaaaatcaaatgtatgacgattactactattatggtccacctcatatgccccctccaacaagaggtcgagggcgtggaggtagaggtggttatggatatcctccagattattatggatatgaagattattatgattattatggttatgattaccataactatcgtggtggatatgaagatccatactatggttatgaagattttcaagttggagctagaggaagg

SEQ ID NO: 3562 - DNA, 505 bp, Homo sapiens
attcgtgacttgggatgaatataacattcagatgtatgatcgtgtgattgactttgatgagaacactgctctggatgatgcagaagaggagtcctttaggaagcttcacttaaaggacaagaagcgatttgaaaaagctaaccaggattcaggtcccggtttgagtcttgaagaatttattgcttttgagcatcctgaagaagttgattatatgacggaatttgtcattcaagaagctttagaagaacatgacaaaaatggtgatggatttgttagtttggaagaatttcttggtgattacaggtgggatccaactgcaaatgaagatccagaatggatacttgttgagaaagacagattcgtgaatgattatgacaaagataacgatggcaggcttgatccccaagagctgttaccttgggtagtacctaataatcagggcattgcacaagaggaggcgcttcatctaattgatgaaatggatttgaatggtgacaaaaagctc

SEQ ID NO: 3563 - DNA, 499 bp, Homo sapiens
aagctcggaattcggctcgaggacgagtccaaccatgaccctcagtttgagccaatagtttctcttcctgagcaagaaattaaaacactggaagaagatgaagaggaactttttaaaatgcgggcaaaactgttccgatttgcctctgagaacgatctcccagaatggaaggagcgaggcactggtgacgtcaagctcctgaagcacaaggagaaaggggccatccgcctcctcatgcggagggacaagaccctgaagatctgtgccaaccactacatcacgccgatgatggagctgaagcccaacgcaggtagcgaccgtgcctgggtctggaacacccacgctgacttcgccgacgagtgccccaagccagagctgctggccatccgcttcctgaatgctgagaatgcacagaaattcaaaacaaagtttgaagaatgcaggaaagagatcgaagagagagaaaagaaagcaggatcaggcaaaaatgatcatgccg

SEQ ID NO: 3564 - DNA, 430 bp, Homo sapiens; identical to SEQ ID NO: 769

SEQ ID NO: 3565 - DNA, 478 bp, Homo sapiens
tcggctcgaggccctggggagggaggggagccccggagagcctgccggtgggagctggaagcaggctcccggctgagcgccccagcccgaaggcagggtctgggtgcgggaagagggctcggagctgccttcctgctgccttggggccgcccagatgagggaacagcccgatttgcctggttctgattctccaggctgtcgtggttgtggaatgcaaacgccagcacataatggaaacaggacctgaagacccttccagcatgccagaggaaagttcccccaggcggaccccgcagagcattccctaccaggacctccctcacctggtcaatgcagacggacagtacctcttctgcaggtactggaaacccacaggcacacccaaggccctcatctttgtgtcccatggagccggagagcacagtggccgctatgaagagctggctcggatgctgatggggctggacctgctggtgtt

SEQ ID NO: 3566 - DNA, 465 bp, Homo sapiens
tgggcacaacagtttcagtgagtgccttttgagcacaccttttatttttattattagtaactaatggttaagattgatggtggcctggattagcaaagaggaagacagcttttaacacagttccctgccttcacaagaggtgtcagattaagatgtgaaagctgcaagaatgttgcagtgaacaccatttcagagctctcagtgtgcagttcaggaattaagatacttggaatagctgtggaggaagaacctaaattgcaaagatctgctattgccagctctcaacccaagtcagtgaattgtcaacctgcatatcctaaaaatgtcaaaatgctgcatctggttaaatgtcggggtagggggggaagcttgaaggtgctcgcttcatttgccttgtttactcatcctgccctgtaatgtctgtaatcctgaagatggaataaattgtaacatttagtttctatc

SEQ ID NO: 3567 - DNA, 495 bp, Homo sapiens
acccatacttctaccctgtggtgaaggagcagtcccagccttgtgcagacaatgctgtgctttccagtggtctcacggcagcacgatgaagactggaaagcgacgggtctgttgcggttctcccacttttccataagcagaacaagaaccaaatcaaacgtcttaacgcgtatagagagatcacgttccgtgagcagacacaaaacggtggcaggtttggcgagcacgaactagaccaagcgaagggcagcccaccaccgtatatcaaacctcacttccgaatgtaaaaggctcacttgcctttggcttcctgttgacttcttcccgacccagaaagcatggggaatgtgaagggtatgcagaatgttgttggttactgttgctccccgagcccctcaactcgtcccgtggccgcctgtttttccagcaaaccacgctaactagctgaccacagactccacagtggggggacgggcgcagtatgtggcatggcgg

SEQ ID NO: 3568 - DNA, 427 bp, Homo sapiens
cttgttcctcaccaacctgccagaggagaccaacgagctcatgctgtccatgcttttcaatcagttccctggcttcaaggaggtccgtctggtacccgggcggcatgacatcgccttcgtggagttcgacaatgaggtacaggcaggggcagctcgcgatgccctgcagggctttaagatcacgcagaacaacgccatgaagatctcctttgccaagaagtagcaccttttccccccatgcctgccccttcccctgttctggggccacccctttcccccttggataacccccctgaaggtaagtccccccttgggggccttcttggagccgagtgtgattgagtggtcgccacacatcattggacccagagtctgtccccagacattgcacctggcgctgttaggccggaattaaagtggctttttg

SEQ ID NO: 3569 - DNA, 557 bp, Homo sapiens
ggagtttgttgttgccatgggaagtccctttgcactgcagaacacgatcacatccggcattgttagctctgctcagcgtccagccagagacctgggactcccccaaaccaatgtggaatacattcaaactgatgcagctattgattttggaaactctggaggtcccctggttaacctggatggggaggtgattggagtgaacaccatgaaggtcacagctggaatctcctttgccatcccttctgatcgtcttcgagagtttctgcatcgtggggaaaagaagaattcctcctccggaatcagtgggtcccagcggcgctacattggggtgatgatgctgaccctgagtcccagcatccttgctgaactacagcttcgagaaccaagctttcccgatgttcagcatggtgtactcatccataaagtcatcctgggctcccctgcacaccgggctggtctgcggcctggtgatgtgattttggccattggggagcagatggtacaaaatgctgaagatgtttatgaagctgttcgaacccaatcccagttggcagtgc

SEQ ID NO: 3570 - DNA, 493 bp, Homo sapiens
gtgtcccatcatcgggtgggcgagacagccccacccaatgcctacactgtcactgacctagtggagtatagcatcgtgatccagcagctctcaaatggcaaatgggtcccctttgatggcgatgacattcagctggagtttgtccgcattgatccttttgtgaggaccttcctgaagaagaaaggtggcaaatacagtgttcagttcaagttgcccgacgtgtatggtgtattccagtttaaagtggattacaaccggctaggctacacacacctgtactcttgcactcaggtatccgtgcgggcactccatcacacgcagtatgagcgcttcatcccctcggcctacccctactacgccagcgccttctccatgatgctggggctcttcatcttcagcatcgtcttcttgcacatgaaggagaaggagaagtccgactgatgggctagagccctctccgcacagcgtggagacggggcagggaggggggtta

SEQ ID NO: 3571 - DNA, 409 bp, Homo sapiens
taagctcggaattcggctcgagcgtggtctcacttcccccaacaggggagggcaaaggaggccccacctcccatccttctccagttcctcccccggcatcgtccccgtccccactcagcggcagtgccctttgtggggggaagcaggaggctggggacagtccccctccagctccagggactccaaaagccaatggctcccagcccaactccggctcccctcagcctgctccgtgatgctccacctgccagcccccggattcccacacatgcagacatgtacacacgtgcacgtacacacatgcatgctcgctaagcggaaggaagttgtagattgcttccttcatgtcactttctttttagatattgtacagccagtttctcagaataaaagtttggtttgtaagttc

SEQ ID NO: 3572 - DNA, 293 bp, Homo sapiens
  misc_feature 98: n = A,T,C or G
ccgctgcgtgttttcctcttgatcgggaatcctgcttctccttgcctcgaaatggaccccaactgctcctgctcgcctgttggctcctgtgcctgtgncggctcctgcaaatgcaaagagtgcaaatgcacctcctgcaagaagagctgctgctcctgctgccctgtgggtgtgccaagtgtgcccagggctgcatctgcaaagggacgtcagacaagtgcagctgctgtgcctgatgccaggacagctgtgctctcagatgtaaatagagcaacctatataaacctggattt

SEQ ID NO: 3573 - DNA, 538 bp, Homo sapiens
ttggtctggtcatatgtgacgagggacacaggctcaagaactctgagaatcagacttaccaagccctggacagcttgaacaccagccggcgggtgctcatctccggaactcccatccagaatgatctgcttgagtatttcagcttggtacattttgttaattccggcatcctagggactgcccatgaattcaagaagcattttgaattgccaattttgaagggtcgagacgctgctgctagtgaggcagacaggcagctaggagaggagcggctgcgggagctcaccagcattgtgaatagatgcctgatacggaggacttctgatatcctttctaaatatctgcctgtgaagattgagcaggtcgtttgttgtaggctgacaccccttcagactgagttatacaagaggtttctgagacaagccaaaccggcagaagaattgcttgagggcaagatgagtgtgtcttccctttcttccatcacctcgctaaagaaagctttgtatcatccagctctaatctatgataagtgtgtgga

SEQ ID NO: 3574 - DNA, 595 bp, Homo sapiens
gctcggaattcggctcgagcccaatgtgccttggagtaaatcacattcacaagaaacgtgtgctacacagagatatcaagtccaagaatatcttcctcactcagaatggaaaagtgaaattgggagactttggatctgcccgtcttctctccaatccgatggcatttgcttgtacctatgtgggaactccttattatgtgcctccagaaatttgggaaaacctgccttataacaataaaagtgacatctggtccttgggttgcatcctgtatgaactctgtacccttaagcatccatttcaggcaaatagttggaaaaatcttatcctcaaagtatgtcaagggtgcatcagtccactgccgtctcattactcctatgaacttcagttcctagtcaagcagatgtttaaaaggaatccctcacatcgcccctcggctacaacgcttctctctcgaggcatcgtagctcggcttgtccagaagtgcttaccccccgagatcatcatggaatatggtgaggaagtattagaagaaataaaaaattcgaagcataacacaccaagaaaaaaaacaaaccccagcagaatcaggatagc

SEQ ID NO: 3575 - DNA, 204 bp, Homo sapiens
aagagtttttaagaatgtggcagtgatccctcctggaactggaatggctcatcaaataaacttagaatatttgtcaagagtggtttttgaagaaaaagacctcctcttcccagacagtgtagtcggcacagattcacacataacgatggtgaatggtttagggattctggggtggggtaagtaaatgactaaatatatttcatt

SEQ ID NO: 3576 - DNA, 519 bp, Homo sapiens; identical to SEQ ID NO: 789

SEQ ID NO: 3577 - DNA, 534 bp, Homo sapiens
tggtacgcctgcaggtaccggtccggaattcccgggtcgacccacgcgtccggtgaaaaggttcgctattcacttgacccggagaaccccacgaaatcatgcaaatcaagaggttccaatcttcgtgttcactttaagaacactcgtgaaactgctcaggccatcaagggtatgcatatacgaaaagccacgaagtatctgaaagatgtcactttacagaaacagtgtgtaccattccgacgttacaatggtggagttggcaggtgtgcgcaggccaagcaatggggctggacacaaggtcggtggcccaaaaagagtgctgaatttttgctgcacatgcttaaaaacgcagagagtaatgctgaacttaagggtttagatgtagattctctggtcattgagcatatccaagtgaacaaagcacctaagatgcgccgccggacctacagagctcatggtcggattaacccatacatgagctctccctgccacattgagatgatccttacggaaaaggaacagattgttcctaaa

SEQ ID NO: 3578 - DNA, 553 bp, Homo sapiens
tggtacgcctgcaggtaccggtccggaattcccgggtcgacccacgcgtccgaccatgaatccactcctgatccttacctttgtggcagctgctcttgctgccccctttgatgatgatgacaagatcgttgggggctacaactgtgaggagaattctgtcccctaccaggtgtccctgaattctggctaccacttctgtggtggctccctcatcaacgaacagtgggtggtatcagcaggccactgctacaagtcccgcatccaggtgagactgggagagcacaacatcgaagtcctggaggggaatgagcagttcatcaatgcagccaagatcatccgccacccccaatacgacaggaagactctgaacaatgacatcatgttaatcaagctctcctcacgtgcagtaatcaacgcccgcgtgtccaccatctctctgcccaccgcccctccagccactggcacgaagtgcctcatctctggctggggcaacactgcgagctctggcgccgactacccagacgagctgcagtgcctggatgctcctgtgctg

SEQ ID NO: 3579 - DNA, 582 bp, Homo sapiens
taccggtccggaattcccgggtcgacccacgcgtccgcccctctggtggggacgccagcagcacctgctcctccagcgattctgtcttcagccacgaccccctgccattgggatccagctccttccccttcgggtctggggtgcagacatgagcaaggctcaaggctgtgcaggcacataggctggtggccttgggccttggggctcagccacagcctgacacagtgctcgaccttgatagcatggggcccctggcccagagttgctgtgccgtgtccaagggccgtgcccttgcccttggagctgccgtgcctgtgtcctgatggcccaaatgtcagggttctgctcggcttcttggaccttggcgcttagtccccatcccgggtttggctgagcctggctggagagctgctatgctaaacctcctgcctcccaataccagcaggaggttctgggcctctgaaccccctttccccacacctccccctgctgctgctgccccagcgtcttgacgggagcattggcccctgagcccagagaagctggaagccctgccgaaacaggagcaaatggcgttttata

SEQ ID NO: 3580 - DNA, 653 bp, Homo sapiens
gaatttggccctcgaggccaagaattcggcacgaggcgcaaagaaggcatcagaaggagaaatctggcatcatacctacctcaccgacgccctacacttacaacaagagctgtgacttgtggtccctaggggtgattatctatgtgatgctgtgcggataccctcctttttactccaaacaccacagccggactatcccaaaggatatgcgaagaaagatcatgacaggcagttttgagttcccagaggaagagtggagtcagatctcagagatggccaaagatgttgtgaggaagctcctgaaggtcaaaccggaggagagactcaccatcgagggagtgctggaccacccctggctcaattccaccgaggccctggataatgtgctgccttctgctcagctgatgatggacaagtggttgcaggaatccagcaggctcacgcggaacagttggccaacatgagaatccaggatctgaaagtcagcctcaaacccctgcactcagtgaacaaccccattctgcggaagaggaagttacttggcaccaagccaaaggacagtgtctatatccacgaccatgagaatggagccgaggattccaatgttgccttggaaaaactccgagatgtgattgctcagtgtattctccccc

SEQ ID NO: 3581 - DNA, 120 bp, Homo sapiens; identical to SEQ ID NO: 324

SEQ ID NO: 3582 - DNA, 582 bp, Homo sapiens
tgagttggatatttttaaagcagttaactaattttttcttacctaatcttttgggagttttgcttgttgatataacctttttagttaacctgaaagattccaaaaattgttcttaagtgcttgagactggaaccaaaattaaattgtacttcataaaatcctcttatagagttactcttgccctagattgtaaattaagtttggcattattgtcagactggatggagggtgaagtaaaatagtatgaacaattaagaggctctccccctcttgtctttaagccatattctcctacatgtattttataagaaaatgttaagtcaaattttagtggctctttaattcctgacctcttcattctccttttcagtataacctcccctatgctcatgcccacacagacaaaaaaacaaaacgaaatacacacagaaaaaagtctttccaaactgtttaagtatttaaacatctgagccaaagcagatagaagttattgtataattgttaatcactttgcaaataggggctatcaaattacctatattggcattgctggattataaactctatatctgtaatataaag

SEQ ID NO: 3583 - DNA, 869 bp, Homo sapiens
  misc_feature 644: n = A,T,C or G
tgaactctgaactttttattggcctcctgctccccaaagggtaccctgcttctgctggcttaatgcctcagaactttggtgtcattggtctcagacaccactttgccatccactatccggcgggtggtggtcttttggatggtttgcatggagttgctgctgtccaaggcatcaccaagattaaagtcctcgccatcttccagcaggcggcggtaggtggcgatctcagcctccagcttgaccttgatgttcagcagggcctcatactcctgggcctggcgctgtccctctgcccgggtctgtgccagctctgactcaaggtgcagcaggatcccgttgagctgctccatctgtagggcgtaggggcctccacctccctcaggctgttctccaagctggccttcagatttctcatggagtccaggtcgatctccaaggactggactgtacgtctcagctctgtgagcgtcgtctcagcagctccaacctcagcagactgtgtggtgaccactgtggtgctctcctcaatctgctgagaccagtacttgtctagctcctctcggttcttccgagccagctcgtcataattgggcccggatgtctgccatgatcttggccgaggtctgagatttgggggcatctancctcaccgtcaaacccagaggtggcaatctgggcttgtagggcttttaattcctctttcgtggttcttcttcatgaagagaagctcctcttgaggagctcgattctctgtttccagctgagtcgtgtgaatatggtggtaaacatgacccgggggacccaagggatgtggttctccacaagatggggatgggcagtctcgtctcaatttgaattaaagtacatca

SEQ ID NO: 3584 - DNA, 436 bp, Homo sapiens
tggtacgcctgcaggtaccggtccggaattcccgggtcgacccacgcgtccggaaaaacatgtccaaagtcttgggcatgcttgtcacagccaacatcctgacatggaaagtttatgtttctgtccctgggcctccttctacctcccactaaatcatagacattgccagattgcagaccctgtcttcatagaagtgtgaaatgtaaaagtgtgtgaaagtagtgtctcaaccaggtgcagtggctcacacctgtaatcccagcactttggggaggccgaggtgggtgaattgcttgagctcagaagttcgggaccagcctgggcagcataatgagatacctgtctctatagaaaatacagaaattggccaggcatggtggcagccacctgtagtaccaggtactcgggtggctgaagcacgagaatcgcttgagcc

SEQ ID NO: 3585 - DNA, 385 bp, Homo sapiens
tggtacgcctgcaggtaccggtccggaattcccgggtcgacccacgcgtccgcccacgcgtccgggcaaatctgagtggcttctctaagcatctgctggtacaagtcaatgtggcaccatgagcttcatggtggcagaagagacaatagtccttagctctcctcccagtacaccccctacttggccagtctgtaggccaacaagaaggttcctttacccccatgcaagacacttatgagaacacattacaagatggctgaccgtggaggatgagtggatcctgaaaggttgtcccaaactgttgatttggaaaagaaataagcacatagataaccttattgtgtgctgcatggaaaggaactgaatacatttgcctttaagcatg

SEQ ID NO: 3586 - DNA, 578 bp, Homo sapiens; identical to SEQ ID NO: 794

SEQ ID NO: 3587 - DNA, 465 bp, Homo sapiens; identical to SEQ ID NO: 798

SEQ ID NO: 3588 - DNA, 567 bp, Homo sapiens; identical to SEQ ID NO: 800

SEQ ID NO: 3589 - DNA, 461 bp, Homo sapiens; identical to SEQ ID NO: 802

SEQ ID NO: 3590 - DNA, 352 bp, Homo sapiens
tggtacgcctgcaggtaccggtccggaattcccgggtcgacccacgcgtccgcatgtatccaaagctcactctgtagtatcacctggtagatgggttgacctgaaaggtccaaggtggcttcccttatgtgtctgccaccttacgggagatgggtgggaagctggctcatctggggctattaaccagaatactggcatttgtcctgtcctctggggtggatttgcccatcaaaacttgaagttctagcagggcagggtagatactcctactatagttccaactacctgggaggctgaggcaggaggatatctttagttcagcccgagcaagctagcaagaccccatctcttt

SEQ ID NO: 3591 - DNA, 290 bp, Homo sapiens; identical to SEQ ID NO: 2542

SEQ ID NO: 3592 - DNA, 363 bp, Homo sapiens
taccggtccggaattcccgggtcgacccacgcgtccgcagaggctcagccttcgggtgttcctggcaaaccctcacctccggaggccccacagctcagacctagtccttggttcacatggccccacttccatcctctttttcccttaagactgatttgtcctgggagatcactggatccctcattcaggtggagtgctgcaggacgacactttttccaggggtgacccaggcctgcagggtcccagtgtcacaggcaggccttgcccgagcctccacctgagcccctgctcctcttctcccacagggaggtggaggttacagtgaggtgagttcaggccactgcacttcagcctgggcaacag

SEQ ID NO: 3593 - DNA, 474 bp, Homo sapiens
ccaagaattcggcacgaggggccactgcctgaaagccgggccaaggccctcttccgtcagatggttgaggccatccgctactgccatggctgtggtgtggcccaccgggacctcaaatgtgagaacgccttgttgcagggcttcaacctgaagctgactgactttggctttgccaaggtgttgcccaagtcacaccgggagctgagccagaccttctgcggcagtacagcctatgctgcccccgaggtgctgcagggcattccccaagatgctgtggcagcagcagaagggggtgtccttccccactcatctgagcatctcggccgattgccaggacctgctcaagaggctcctggaacccgatatgatcctccggccttcaattgaagaagttagttggcatccatggctagcaagcacttgataaaagcaatggcaagtgctctccaataaagtagggggagaaagcaaacc

SEQ ID NO: 3594 - DNA, 663 bp, Homo sapiens
gaatttggccctcgaggccaagaattcggcacgaggcctctcttcagcgtggggcgcccacaatttgcgcgctctctttctgctgctccccagctctcggatacagccgacaccatgggtttcggagacctgaaaagccctgccggcctccaggtgctcaacgattacctggcggacaagagctacatcgaggggtatgtgccatcacaagcagatgtggcagtatttgaagccgtgtccagcccaccgcctgccgacttgtgtcatgccctacgttggtataatcacatcaagtcttacgaaaaggaaaaggccagcctgccaggagtgaagaaagctttgggcaaatatggtcctgccgatgtggaagacactacaggaagtggagctacagatagtaaagatgatgatgacattgacctctttggatctgatgatgaggaggaaagtgaagaagcaaagaggctaagggaagaacgtcttgcacaatatgaatcaaagaaagccaaaaaacctgcacttgttgccaagtcttccatcttactagatgtgaaaccttgggatgatgagacagatatggcgaaattagaggagtgcgtcagaagcattcaagcagacggcttagtctggggctcatctaaactagttccagtgggatacgga

SEQ ID NO: 3595 - DNA, 492 bp, Homo sapiens
cctttccaactttctgtttcagaggcagcagcagtgagctgcaattgcagccagccctttccccagccccactcccttctatgaactcctagccttcttcgcagacagcctagcatctggctaaagggcaccttgttagcaaacacaatttctatgaacggattacccatggactgaagctgttgttgccagcggctggaggaggggactccagacatgagtgttccatgagtgatgcagatgtggagtggaggtctcaggtgaggtgctgcagagccctgggtaacagaacgagtgagacagtaaggactaaactctagagatctttgcacaccttaactagcccgaggtccgtgtgacaagtccggtatgcactgcgggggaaatgcaccccaggcagaagccggcccttccaggcgtggcatcctggggcacctgccaggatgctcacagccctctcgtccacaaaccactgtcttcccttggcttctg

SEQ ID NO: 3596 - DNA, 210 bp, Homo sapiens
atttccatgtgaaaaagtgttatatatgacaagtgttttttgattgtaattgcgttaaatcttttgagagtgtaaatgccgggctaggcaattgcagttaatacatacaggggttagtgaagggcttattaagttgtaggggaagcaagctgggaagaatcagatcagatattttcctgacaaaaaaaaaaatgaccctgtagacagcat

SEQ ID NO: 3597 - DNA, 424 bp, Homo sapiens
  misc_feature 347: n = A,T,C or G
taagctcggaattcggctcgaggcgaagccgggcccaattacggatccacggagttacaggcgccgacatgaagtcgcttctctggcgcccatctcccttcctggtctgagactagctctgggggaggcgggggcccccacactctgctcccgctccaccctgccctgcgctgctgctctgtgcctagctgtcaaaaccctggtgggggaggatgtggccaccctgagacccggaagacacggccgtctgcctgggtttgcggagagccgcttatgggtgtggtccgtccagacaccttgtttcaagggggatgggcgtgagcgggcaagcatagcatccccaccgntgagcaagaactttttcttgtttttaaaccatcacgtgctcatttcacattggaataaagtgagtttttgaaacctg

SEQ ID NO: 3598 - DNA, 616 bp, Homo sapiens
aagctcggaattcggctcgagggagctgaattccggaagatccccacatcgatgaaagcaaagcgaagccaccaagccatcatcatgtccacgtcgctacgagtcagcccatccatccatggctaccacttcgacacagcctctcgtaagaaagccgtgggcaacatctttgaaaacacagaccaagaatcactagaaaggctcttcagaaactctggagacaagaaagcagaggagagagccaagatcatttttgccatagatcaagatgtggaggagaaaacgcgtgccctgatggccttgaagaagaggacaaaagacaagcttttccagtttctgaaactgcggaaatattccatcaaagttcactgaagagaagaggatggataaggacgttatccaagaatggacattcaaagaccaagtgagtttgtgagattctaacagatgcagcattttgctgctaccttacaagcttctcttctgtcaggactccagaggctggaaagggaccgggactggaaagggaccaggactgaacagactggttacaaagactccaaacaatttcatgccctgtgctgttacagaggagaacaaatgctttcagcaagga

SEQ ID NO: 3599 - DNA, 421 bp, Homo sapiens
tggtacgcctgcaggtaccggtccggaattcccgggtcgacccacgcgtccgcttttctttttatacaaggaaagcttcctaagaatgtctaggaagaagaggaagaatgaccctttgcatggcacagggttctgcccctattctgaatatgtcattccatcaaggagatcaaaagcctttttttctccccagtatttggaaattactttcttgatgatgctgccttttaaaagcttcacgtacattatagttttttaaaaaaatctttggactggatcttactgaagtgcagttgctatattaaaattagggcatagagcacagaaaaatcaagaccatgagaagacattttaccatttaactactttttataactaaatactctttaaatatttttatttcaatactgtggatggaaat

SEQ ID NO: 3600 - DNA, 445 bp, Homo sapiens
cggaattcccgggtcgacccacgcgtccggattttttagggccatactaaagggaatgagctgaaacagacctcctgatacctttgcttaattaaactagatgataattctcaggtactgataaacacctgttgttgttcactttgctcataaaaattgtcagctctctctgacacttagacctcaaactttagcatctctgtggagctgccatccactgtataatttcgcctggcaactggactgaggggagtgtgcccaggcagctgccaagcactccctccctggcttcagggtcagagtgcccagcgtttatcaaaggcagcatccaagcccagagccagtgtcgactcttccgctggtgcctttcctctgaggggctatcaatgtgtagataaagccctgagtaggcaaaagcagtgacatccactgctatggtcttgat

SEQ ID NO: 3601 - DNA, 538 bp, Homo sapiens; identical to SEQ ID NO: 2735

SEQ ID NO: 3602 - DNA, 652 bp, Homo sapiens
cgactacaacgtgatggtcatggagctgctggggcctagcctcgaggacctgttcaacttctgttcccgcaaattcagcctcaagacggtgctgctcttggccgaccagatgatcagccgcatcgagtatatccactccaagaacttcatccaccgggacgtcaagcccgacaacttcctcatggggctggggaagaagggcaacctggtctacatcatcgacttcggcctggccaagaagtaccgggacgcccgcacccaccagcacattccctaccgggaaaacaagaacctgaccggcacggcccgctacgcttccatcaacacgcacctgggcattgagcaaagccgtcgagatgacctggagagcctgggctacgtgctcatgtacttcaacctgggctccctgccctggcaggggctcaaagcagccaccaagcgccagaagtatgaacggatcagcgagaagaagatgtcaacgcccatcgaggtcctctgcaaaggctatccctccgaattctcaacatacctcaacttctgccgctccctgcggtttgacgacaagcccgactactcttacctacgtcagctcttccgcaacctcttccaccggcagggcttctcctatgactacgtctttgactggaacatg

SEQ ID NO: 3603 - DNA, 597 bp, Homo sapiens
tctgactggactttctattagctcaactccaccagctgtcagtagtgttctcagtacaggtgtaccaacagtaccgttattgccaccacaagtaaaccagtccctcacttctgtgccaccaatgaatccagctactacattaccaggtctgatgcctttaccagcaggactgcccaacctccccaacctcaacctcaacctcccagcaccacacatcatgccaggggttggcttaccagaacttgtaaacccaggtctgccacctcttccttccatgcctccccgaaacttacctggcattgcacctctccccctgccatccgagttcctcccgtcattccccttggttccagagagctcttctgcagcaagctcaggagagctgctgtcttccctcccgcccaccagcaacgcaccctctgaccctgccacaactactgcaaaggcagacgctgcctcctcactcactgtggatgtgacgccccccactgccaaggcccccaccaccgttgaggacagagtcggcgactccaccccagtcagcgagaagcctgtttctgcggctgtggatgccaatgcttctgagtcaccttaact

SEQ ID NO: 3604 - DNA, 540 bp, Homo sapiens
ccaagaattcggcacgaggcgagactgcgtctcaaggaacaacggcaacaacaaaaaagaaatgggacagaaagttgtaaggccagatgtgggtgactcaccgactcgcagcgatgtcgaggtcccccgaatccactgggacctgtccacggagcgggtcctcctgatggagtttgtggatggcgggcaggtcaatgacagagactacatggagaggaacaagatcgacgtcaatgagatctcacgccacctgggcaagatgtatagtgagatgatcttcgtcaatggcttcgtgcactgcgatccccaccccggcaatgtactggtgcggaagcaccccggcacgggaaaggcggagattgtcctgttggaccatgggctttaccagatgctcacggaagaattccgcctgaattactgccacctctggcagtctctgatctggactgacatgaagagagtgaaggagtacagccagcgactgggagccggggatctctaccccttgtttgcctgcatgctgacggcgcgatcgtggga

SEQ ID NO: 3605 - DNA, 422 bp, Homo sapiens
tggtacgcctgcaggtaccggtccggaattcccgggtcgacccacgcgtccgatttttttccagtacattaaatttgtcaatttcatctttgagggaaactgattagatgggttgtgtttgtgttctgatggagaaaacagcaccccaaggactcagaagatgattttaacagttcagaacagatgtgtgcaatattggtgcatgtaataatgttgagtggcagtcaaaagtcatgatttttatcttagttcttcattactgcattgaaaaggaaaacctgtctgagaaaatgcctgacagtttaatttaaaactatggtgtaagtctttgacaagaaaaaaaaacaaacaaacacttctttccatcagtaacactggcaatcttcctgttaaccactctccttagggatggtatctgaaac

SEQ ID NO: 3606 - DNA, 438 bp, Homo sapiens
caggccctgatgcccgtcatccttcaggacgcacccagcgccccaggccacgcgccccacagacaagcttctctgagcatctctgtgtccaacagtcagatccaagagaatgtggacattgccactgtctaccagatcttccctgacgaagtgctgggctcagggcagtttggagtggtctatggaggaaaacaccggaagacaggccgggacgtggcagttaaggtcattgacaaactgcgcttccctaccaagcaggagagccagctccggaatgaagtggccattctgcagagcctgcggcatcccgggatcgtgaacctggagtgcatgttcgagacgcctgagaaagtgtttgtggtgatggagaagctgcatggggacacgtggggagtggggtggggggagctatttccaaggcccctccctgtttcccca

SEQ ID NO: 3607 - DNA, 617 bp, Homo sapiens
aggatcagtccagagaagtaaaactcttttattttcaccgtccaaacatcagtcaatatactgggagagccagcggaaaccctcgccgtaaccttgcctcttgagcacactgcacatgaacacttccatggggcgagcattcagctccttcagggtcacattcccctttcctgtggtctgtccataaagcccaaatatctcacggagtttttcttcactgattgcatctgttctgtcaattttgttacccaagataaggattggcacattggatattgtttcatcagtcattaaagcattaagctcaactttggattccacgaggcgagaatgatctgcacagtccaccagaaagacaatcccattaattgctgggagataatttttccaaacgcgacgtgcttgctcgtgcccaccaagatcaaaagttgtaaaggtcattccagcaattgttagctcttctgatgtcggatgtagtgttggaacatgttggcccaatctgtcactttgagcaagtgaagaaaagtggttttgcctgcattatcccaacctcagaatacaagttttccagatttcttgtaaagtcccaggaactggagcaaactgccgaagccact

SEQ ID NO: 3608 - DNA, 500 bp, Homo sapiens
gaaaaccgaacatccactccagcaccctggagttctctccaaagcctggccagaggaatttgccttccttgtccttccggaaccagttgacatggaagatcttgggcagtttggctgctgggtgctgggccatgctaagccagtgggccaggtatttgccgaagttgtagccaaagaagggccgcatggcaaaggggtcatgcatgatgattttgcctttatgttctgcagccgctgtggcctctgatctcatggccgcccccacaaagactccatgttgccagctgagagcttcatagactagagggacaccagcaggtctacggcctccaaagataatgccttcaatgggaacaccttccggagactcccaggcagcatcaatgatggggcactggctggcaggggtgcagaacctcgagttggggtgggcacaaggttccccatcctctgagctccactccttattcttccaggacgtgatggtgacgcctgaagct

SEQ ID NO: 3609 - DNA, 503 bp, Homo sapiens
ccagggaaaagaacccccacccctcaacacagaattagccatgagaagaagcctgggcaacagcaactacaggccatgtttctcctccaaccgtgatgtaggtgagtgcttatggcttcatcactgagggccatgagcgcttttctgatcactactatgatacatcatggaagcggctgatcttttacataaaccatgacttcaagctggagagagaagtctggaagcggctacacgatgaagggataatccggctgtaccagcgtcctggtcccggaactgccaaagccaagaactgaccggggccagggctgccatggtctccttgcctgctccaaggcacaggatacagtgggaatcttgagactctttggccatttcccatggctcagactaagctccaagcccttcaagagttccaagggaacacttgaaccatggacaagactctctcaagatggcaaatggctaattgaggttctgaagttcttcagtacattgct

SEQ ID NO: 3610 - DNA, 711 bp, Homo sapiens
  misc_feature 494: n = A,T,C or G
gtgtggatgagctgaccctggccagagccgacctggagatgcagattgagaacctcaaggaggagctggcctacctgaagaagaaccacgaggaggagatgaacgccctgcgaggccaggtgggtggtgagatcaatgtggagatggacgctgccccaggcgtggacctgagccgcatcctcaacgagatgcgtgaccagtatgagaagatggcagagaagaaccgcaagagtgccgaggattggttcttcagcaagacagaggaactgaaccgcgagtgggccaccaacagtgagctggtgcagagtggcaagagtgagatctcggagctccggcgcaccatgcaggccttggagatagagctgcagtcccagctcagcatgaaagcatccctggagggcaacctggcggagacagagaaccgctactgcgtgcactgtcccagatccaggggctgattggcagcgttgaggagcagctggcccagcttcgcntgcgagatggagcagcagaaccaggaatacaaaatcctgctggatgtgaagacgcggctggagcaggagattgccacctaccgccgcctgctggaaggaagaggatgccacctgactcagtacaagaaagaaccgttgacacccgtaagtgcgtaccattgttgaagaagtcacagatgcaaggtcatctcctcccggaacaagtcaacagaacacc

SEQ ID NO: 3611 - DNA, 397 bp, Homo sapiens
tggtacgcctgcaggtaccggtccggaattcccgggtcgacccacgcgtccgggaggttgcagtgagccgagatcgcgccactgcactccagcctgggtgacacagtgagactccgtctccaaaaaaaaggatgaggaatagaattctgtgcagatgtcctgacttggcaattttgtgtccctgcctcactgtctccaccaacccccgcctgtcctagtgttgttctgcctcctgtcctctcttgctctcttgtcagtctctggcttcctcggccccatttcacttcactgagtcctgacacccatctccctaggggcctgtgagaggagagggaagggtctgttctgctcagctccatgtcccccattttcctccacaataaactgggactgggct

SEQ ID NO: 3612 - DNA, 468 bp, Homo sapiens
  misc_feature 419: n = A,T,C or G
tctgccctataaagtccccttccccattcctcccaggtcccaggtgtggtggtataaggagagttggcccaatctgggagctgagggatctgagacatccatctactgcatcagtgcactcagaagtgaggattttggcacagttattcatgagacatcagcccatcatataaaacatgcctccagtttggttaaactaggaagcactatataatattttaaaatcagttacatgtcactgataaaagacttagtattaccatgatgttatttttcttgaggcaacatgatgaaacccattgtctacaaaaaatccaaaaattagccaggtgaggtgtgcacctgtagtcccatcttctcaggaggctgaggtgggaagactacttgagccaaggtggtggaggttggagtgagcccanattacaccacttgcactccagcctgggcaacagagtgaggccttgtctc

SEQ ID NO: 3613 - DNA, 409 bp, Homo sapiens
  misc_feature 322: n = A,T,C or G
tggtacgcctgcaggtaccggtccggaattcccgggtcgacccacgcgtccgctcaattgggaggtggcattcttgtccctgttgcccccatctctacccccttttgttaatggttgagagaaatgtggaccagtgattctcagtttggtgcccaggtccccaaaggaagtgatggagagccttgagctaagttcaggcagcagcatgtggccagcagcagtgtgctgggagcagaggttggaatcagggctcagggccttcacttcaagggccctccccagctactcgggaggctgaggcaggagaatcgcttgaactcangaggtggaggttgcggtgagccaagatcgtgccactgcactccagcctgggctacaagattgaaaagatcgaaactctgtctcaaac

SEQ ID NO: 3614 - DNA, 545 bp, Homo sapiens
aatttggccctcgaggccaagaattcggcacgagaccttttgcggcacacctgagtacctggcccccgaggtgctggaggacaatgactacggccgtgcagtggactggtgggggctgggcgtggtcatgtacgagatgatgtgcggtcgcctgcccttctacaaccaggaccatgagaagctttttgagctcatcctcatggaggagatccgcttcccgcgcacgcttggtcccgaggccaagtccttgctttcagggctgctcaagaaggaccccaagcagaggcttggcgggggctccgaggacgccaaggagatcatgcagcatcgcttctttgccggtatcgtgtggcagcacgtgtacgagaagaaggtgcggctgctccccgcatattcacgcgcacgcatgctccccacatatccacactcacgcatgcacgtggcacgctcgccagatttcccacacactcgccctcacctcaggagcctgctgcagtcctggtacaaggagggccttgctgcaccaacctcagcgcctggtgctc

SEQ ID NO: 3615 - DNA, 470 bp, Homo sapiens
gccctcgaggccaagaattcggcacgaggaggggcagccgttcgacgtgggcccgcgctacacgcagttgcagtacatcggcgagggcgcgtacggcatggtcagctcggcctatgaccacgtgcgcaagactcgcgtggccatcaagaagatcagccccttcgaacatcagacctactgccagcgcacgctccgggagatccagatcctgctgcgcttccgccatgagaatgtcatcggcatccgagacattctgcgggcgtccaccctggaagccatgagagatgtctacattgtgcaggacctgatggagactgacctgtacaagttgctgaaaagccagcagctgagcaatgaccatatctgctacttcctctaccagatcctgcggggcctcaagtacatccactccgccaacgtgctccaccgagatctaaagccctccaacctgctcatcaacaccacctgcg

SEQ ID NO: 3616 - DNA, 563 bp, Homo sapiens
  misc_feature 2, 529, 554: n = A,T,C or G
cnagtatcacaatgtttattgatagatacaagtatataaaatcagggcatgaacatgacttgataaattaagtagacttaatttcaatactataataggagggaccaattcaaattctcaccatttgtttcacacccacaaaaaccacttcaagggcattaacgatctctcaaaactgatcagttttgtgcaagtaaaccatgtttcttttaaaaagacttgtgcacttgcccaggctcaaggatattaaaatctagcacataaagcccattactagaggtagaaatacaggcaatatactattacggcaacaaccatcaattacagttaagaatttttctgtaacaaccaaatgggataatcaaatattgcaacaactcaagtattactgagcaaagtgcatttctacagtattcagtgttgctattcagttttctaacttaaaacagcctatgataactgggcagcaaagaaggtccttggcaatagactgcctctgcttgagaacttatggatggtaattattgcntgctgctaatatactatcctaaacnttaaaggta

SEQ ID NO: 3617 - DNA, 300 bp, Homo sapiens
cggattcccgggtcgacccacgcgtccggtgtggtctggctataaatttagactgttgcttgaaagaagcgaaaaacctccccttcatagacttccttcttcccatcccccctggcagccgctttgttcctctagccttgtaaaattttctctgtataaaacaggaacatcagccaaacatgtggacttccccactttccattcattagaagaatgcattatttcaaaatctcctgggagcatttaaatgcaaattttgtcaagaaagcaatttgagtcttagagaagctctctagccac

SEQ ID NO: 3618 - DNA, 701 bp, Homo sapiens
cagaaaaatcacattttattgatcacttttatttaaaattacaaaaatataaataaaaatagtgaaatataaatattcagtgtacaggagtggtcctcaccccacccagtgaggattggatgaactaggctaaaaggaagggataactggccaagaaagggacatctatgtgaaagtgaaactgagacagtgctggtcacaggtcatgctgcagaataatacattcccaggcactgtcacgtgggggacccaagaggccccaggagtgacctataacctctccagaaagaccactctgtgtggcatcacagtccacacagtttaaggaaatatttagacttaacaatcagacaccagctcttactcacacttacactcacagcccacacacaggtgtgcaaacatacacacacatatatatttcctgatacattcatggaatatcagagccctgccctgaagtcgttagtgtctctgctccccaaaccgctgctcccacattggctaagctccctcaagagacctcagctgttacacttcctaattgggaaattattcatttctcaaccatgggcctcacaaatgcccaccgtcgggggagctggctctcccttcacccatgcacaggagatgccctgcccttttaactcctgcaggctcagtccagaaaaaagcaagttgctggcagtaacatggtgagt

SEQ ID NO: 3619 - DNA, 667 bp, Homo sapiens
tttgactgtcgctagcatttttattgcatcatcaacaacaaacatgcagtttctttctctgatgtgcatggcactgtaaaatgggtgctacactctctcttgtggtacaaagtttataaatacagtatactgatacaaagttgaagccattaaaaagagcttaataacaactatgaggagataattaaatctggagtgttgatggaatctatgaagagatttagaaacaagacataaacactacggtaaaagttttacttgggaaggggccagaggggaactttttatgtgctactgaaagattttttaagttgctccagatttactttctttctgctattatctttaaatactgcaaagcattgtgagctgcatcactttgtgcattgccacaggagataccggagccatgacagactgtgatggggctggtggacagttcagcaagacattgatattgtccattggcgctcagttcatctatatccaaatatgttatattaaaaccttgttccttggcaatttcactaagcagctggatgtaatctgtatttggaatactaaggaggcttcttttcagtaaagtgatcttttcaccaggagaattcctcaaggaatgccaagtacatcctaaagaatgtcctactacatttgttaaagaaatgtg

SEQ ID NO: 3620 - DNA, 517 bp, Homo sapiens
tcaggccagggcgggatgacactgattgattctaaagcatctttaatctgccaggcggagggggctttgctggtctttcttggactattccagagaggacaactgtcatctgggaagtaacaacgcaggatgccccctggggtggactgccccatggaattctggaccaaggaggagaatcagagcgttgtggttgacttcctgctgcccacaggggtctacctgaacttccctgtgtcccgcaatgccaacctcagcaccatcaagcagctgctgtggcaccgcgcccagtatgagccgctcttccacatgctcagtggccccgaggcctatgtgttcacctgcatcaaccagacagcggagcagcaagagctggaggacgagcaacggcgtctgtgtgacgtgcagcccttcctgcccgtcctgcgcctggtggcccgtgagggcgaccgcgtgaagaagctcatcaactcacagatcagcctcctcatcggcaaaggcctccacgagtttgact

SEQ ID NO: 3621 - DNA, 803 bp, Homo sapiens
tttgtggaatgtaaatcttttattaaaacagttgtctttccacagtagtaaagctttggcacatacagtataaaaaataatcacccaccataattataccaaattcctcttatcaactgcatactaagtgttttcaatacaattttttccgtataaaaatactgggaaaaattgataaataacaggtaagagaaagatatttctaggcaattactaggatcatttggaaaaagtgagtactgtggatatttaaaatatcacagtaacaagatcatgcttgttcctacagtattgcgggccagacacttaagtgaaagcagaagtgtttgggtgactttcctacttaaaattttggtcatatcatttcaaaacatttgcatcttggttggctgcatatgctttcctattgatcccaaaccaaatcttagaatcacttcatttaaaatactgagcggtattgaatacttcgaagcagaacaggcaatgtgcagccctcatttatgagaaaaccctcaggaaactcccagggtgatgcttggagaagctgtgagttgagctgaagctggagaacttcctccagagcaaagggcttaagaaagaaagaagaactctaagctgggtctgctaacatcactccagtttagatggatcttggcagagagacatgcttggtcctctggattggaaagatgatttactctcgggaatcttctctgtcagcctgtacatctaaaggcatgaagcactcaattgggcaattaaccattattgttggtcttctgtgggatctcttgggaatactg

SEQ ID NO: 3622 - DNA, 607 bp, Homo sapiens
cactatagggaatttggccctcgaggccaagaattcggaacgagggcgctgccggccccgagcgctcccgctaccacctgcagcagaacgtgcagttctccgaggacacagtgaggctgtacatctgcgagatggcactggctctggactacctgcgcggccagcacatcatccacagagatgtcaagcctgacaacattctcctggatgagagaggacatgcacacctgaccgacttcaacattgccaccatcatcaaggacggggagcgggcgacggcattagcaggcaccaagccgtacatggctccggagatcttccactcttttgtcaacggcgggaccggctactccttcgaggtggactggtggtcggtgggggtgatggcctatgagctgctgcgaggatggaggccctatgacatccactccagcaacgccgtggagtccctggtgcagctgttcagcaccgtgagcgtccagtatgtccccacgtggtccaaggagatggtggccttgctgcggaagctcctcactgtgaaccccgagcaccggctctccagcctccaggacgtgcaggcagccccggcgctggccggcgtgctgtg

SEQ ID NO: 3623 - DNA, 504 bp, Homo sapiens
tggtacgcctgcaggtaccggtccggaattcccgggtcgacccacgcgtccgcagtttcagggcaagaaaacgaaatttgctagtgatgatgaacatgatgaacatgatgaaaatggtgcaactggacctgtgaaaagagcaagagaagaaacagacaaagaagaacctgcatccaaacaacagaaaacagaaaatggtgctggagaccagtagtttagtaaaccaattttttattcattttaaataggttttaaacgacttttgtttgcggggcttttaaaaggaaaaccgaattaggtccacttcaatgtccacctgtgagaaaggaaaaatttttttgttgtttaacttgtctttttgttatgcaaatgagatttctttgaatgtattgttctgtttgtgttatttcagatgattcaaatatcaaaaggaagattcttccattaaattgcctttgtaatatgagaatgtattagtacaaactaactaataaaatatatact

SEQ ID NO: 3624 - DNA, 518 bp, Homo sapiens; identical to SEQ ID NO: 844

SEQ ID NO: 3625 - DNA, 517 bp, Homo sapiens; identical to SEQ ID NO: 845

SEQ ID NO: 3626 - DNA, 522 bp, Homo sapiens
tagtggatcccccgggctgcaggaattcggcacgagctccagaggaacccgaagcacgagctgaccgccaagtatctcaactactatcaggggatgctggacgtcgccgacgagtccctcacggacctagaggcccagccctacgaggccgtgttcctccgggctgtgaagctctacaacagcggggatttccgcagcagcacggaggacatggagcgggccttgtcagagtacctggcagtctttgcccggtgcctggccggctgtgaaggggcccatgagcaggtggacttcaaggacttctacccggccatagcagatctctttgcagagtccctgcagtgcaaggtggactgtgaggccaatttgacccccaatgtgggtggctacttcgtggacaagttcgtggccaccatgtaccactacctgcagtttgcctactataagttgaatgatgtgcgccaggctgcccgcagcgccgccagctacatgctcttcgaccccaagacagcgtcatgcagc

SEQ ID NO: 3627 - DNA, 648 bp, Homo sapiens
gacattgaccagaaaaagtgtttattcatcaagtctttaaagatacaaaaacacgtgtcttctgtggagctctgagaacaggactccagcaaagcacttttcagccttgtggtcttcaagcatttccaagatctttgctgcaaggagcattgtactcagcaattgcaaactcatccgtctcgtagtaatcatagactttcactatggctggtttcagatctcttactgggacatcttgcagaaccgtgaagaacaagctcagtgtctgatttgacaccttatcaaggtaaatcaagacatggttgctgctgacttctgtccggctcacatggttagatctttcaagcattttcactgttggcttcaggggaatgaagccagagaccatcttcacatcaacgatcgccatgttggaggcagagcggctccctgtgtaactgacacttagggagatttggaagctggtgtgggctttgggttcatcacagtttgaggcagagtctgcactcctaaagcaagggggaactcttcttttctgggagaatattgtatttcaaggatgtctgggaggtaggacacatccttctcgtgtcactttcatgcggtaatccccaaggcagctctgtcaatgagagcctgcggcagtaa

SEQ ID NO: 3628 - DNA, 826 bp, Homo sapiens
  misc_feature 26, 27: n = A,T,C or G
tttatgtacagatggcacatggtcannttttatttgtaaatatagtactccaactcaagtttacaagttacacctttgccacagccttggtaaatcttgaactagtgcagaattcagctgtggtagagtgctgatcttagcatgcttcgatgtggcatacttgttcttgacagtcatgtgctttgtaagtccttgatttaccatgactacattcttagccaggtgctgcataactggaagaagagattcttcagtatatgacaggtaatgttgtagagttggtgtccattcaccattatccagaattttcagtgctaagcaaaaagctcctgctgcaatttgagaaggaggaaagtgcaccatgtcatagtccaacatagttagttccatcaggtatttgggctaaagtatgttgctcgacatcaacctctccaatcttagatgctctccgaagaagtggcaaaggtagaggccgacccagaccaaagtttaaagctcttagaatcttcatttccatctgtcggaattggtgcttagtataaagtgttgtcagtcacaaaagcaaagtcaccaattttctggaggggacatttcttcatatttgcttgcaataaacatggcagtgacaccaaccagctgcagcatcttcttgggcacacaattaatctgcatgaaacgatcaataatggagacagtcatgtacaaggtctcctgcaaaaacccgaatttcatttgaacctgaactagccgtccattaggaaggcctcaagtttcccgtgattcccgatccataggtaattgggctgacagctggccctactcaagt

SEQ ID NO: 3629 - DNA, 500 bp, Homo sapiens
tggtacgcctgcaggtaccggtccggaattcccgggtcgacccacgcgtccggtcaacattagcaagataatggaaatcacgacgccagtgggtgcttacctccctgctaggcatgcaggggctggcggttggcaggggaaggaggcccagtgagccgggtcccttaggggagggagagtttgtcctctttgccccacagtctacccttcagggccttgtggcagtgccagtgttcggggggtgtctgggccactgagtacccactcggtcgtggttgtgctggcctcttgggtgagtgaacctgtgaagcccaggaggtggtgttggctgcagggtacacaaatactgagtggtggtcttttgttacaggcttagcaacaaagctgtgccctgggcatggggggctgtagtgtagctacagttgtgcgtttgtgaaatggcttagctttccatgttgctgagaggaacctggacatggtcccgggcatctgaatgatct

SEQ ID NO: 3630 - DNA, 419 bp, Homo sapiens
tggtacgcctgcaggtaccggtccggaattcccgggtcgacccacgcgtccggtttgttgacccatctctgacagttagagccgatatcactggaagatattcaaatcgtctctatgcttacgaacctgcagatacagctctgttgcttgacaacatgaagaaagctctcaagttgctgaagactgaattgtaaagaaaaaaaatctccaagcccttctgtctgtcaggccttgagacttgaaaccagaagaagtgtgagaagactggctagtgtggaagcatagtgaacacactgattaggttatggtttaatgttacaacaactattttttaagaaaaacaagttttagaaatttggtttcaagtgtacatgtgtgaaaacaatattgtatactaccatagtgagccatgattttct

SEQ ID NO: 3631 - DNA, 535 bp, Homo sapiens; identical to SEQ ID NO: 860

SEQ ID NO: 3632 - DNA, 609 bp, Homo sapiens
aatttggccctcgaggccaagaattcggcacgaggggttcagcaagtcaactcttgaggacctattttcctgaaggaatgagtgaaactttaataagaaacattctctttggagccgtgagagggttgaactatctgcaccaaaatggctgtattcacaggagtattaaagccagccatatcctcatttctggtgatggcctagtgaccctctctggcctgtcccatctgcatagtttggttaagcatggacagaggcatagggctgtgtatgatttcccacagttcagcacatcagtgcagccgtggctgagtccagaactactgagacaggatttacatgggtataatgtgaagtcagatatttacagtgttgggattacagcatgtgaattagccagtgggcaggtgcctttccaggacatgcatagaactcagatgctgttacagaaactgaaaggtcctccttatagcccattggatatcagtattttccctcaatcagaatccagaatgaaaaattcccagtcaggtgtagactctgggattggagaaagtgtgcttgtctccagtggaactcacacagtaaatagtgaccgattacacacac

SEQ ID NO: 3633 - DNA, 400 bp, Homo sapiens
tggtacgcctgcaggtaccggtccggaattcccgggtcgacccacgcgtccgaaaatgtgcaattttcatacagcatcccagtgttgatcatggaggttaatgattctttattgttagggacctatcttgtaattccagagttatttatgttttctacagttgaagaggaaaaataccgcttcttattgcctccttttcaggatttcttctggcttcttgagtagctggagtatttttgagagactcctacaggccctgcggggtggcacatgcctgtaatcctagctacttaggaggctgaggtgggagaattgcttaaacccgggaggcagaggttgcagtgagccgagatcgcatcactgcactccagcctgggcgacagagcaagactctgtctcg

SEQ ID NO: 3634 - DNA, 330 bp, Homo sapiens
gaaaaaatgtataaatgggaaaatgctttcccaaataatgtggatgtgaaaattcttatacttctatacttggtatttctgttgagcaggttcctataatgggtatttctaggtcctagttcatgtgcattttaaattttgatcacttctgccaaactaccctcagaaaaggtttgaccaaagttgccatctcattaacaaattatgacctgtttctcttgccgttgtcactggatagtgtctttttttttctccctgagacggggtcttgctttgttgcccagaggtggagtgcagtggtgcgatcttggttcactgcaccctctgcct

SEQ ID NO: 3635 - DNA, 493 bp, Homo sapiens; identical to SEQ ID NO: 863

SEQ ID NO: 3636 - DNA, 449 bp, Homo sapiens
tggtacgcctgcaggtaccggtccggaattcccgggtcgacccacgcgtccggggcacctgccaccacgcctggctaatttttgtattttagtggagacggggtttcaccatgctggccagactggtctcgaactcctgacctcaggtgatccgcccgcctcagcctctgaaattgctgggattacaggcatgagccaccacacccagcccggacagcttctttgggagtgctgctaaccttgaaattatcagacacttaggagttattagtgctaaaaaggggaccgtgcaaggcagcagagttacatggttcttcaaatcatgtctgaacctattcttggaatcttctctataataagggaagttctcttaccccactgccacatacctctgttttaaaagataagtccactaactgtgagtaaaaatgatatatataggcattaaa

SEQ ID NO: 3637 - DNA, 650 bp, Homo sapiens
  misc_feature 206, 207, 294, 376: n = A,T,C or G
gaatattcacatctgtttaatgtgcataaagccaaggaaaggacagttccgaattcaatagaaatattctgtacaattcatatggtggggttgagggggagggggacaaggctgtagaacccacacccgaacatgtacaaaaataacttatacagcaacccccacctgcaaggatgatgcagctctgcccagccaccggggctggnnggcacactgcagacatggcaccgcgggagccaaccagtatgggccccagatgcaggtgggagtgaggagggcaccagtccggagggnagggcagctattaggaggccttgagacggttgctggccgagcgtgactcagcagcttgtccaccatagtgcgggcgtaggangccggctggccagctccttgcagcagccgtactcctccaggagactcaggcggtatgtgcggaagtcccgcttctcgtcgatgtaggtcaccgctgccatcagtgggcacaagatgagcttggtgttgtcctggaaaaagttgatctgcacgcttccgtttgctgaggtgcagaataaggcgcctcgggttgcgaaacaggtccgtaagtagggcagccgggcgagctcatcaccctcgcgccgcgtaatgtttggcaccttcttaagcaagtg

SEQ ID NO: 3638 - DNA, 562 bp, Homo sapiens; identical to SEQ ID NO: 868

SEQ ID NO: 3639 - DNA, 671 bp, Homo sapiens; identical to SEQ ID NO: 869

SEQ ID NO: 3640 - DNA, 74 bp, Homo sapiens
tgtaaagtgccttacagggtaactgtgctgaatgctttacatgaggaaatgatccccaagtggtgaatgacacg

SEQ ID NO: 3641 - DNA, 509 bp, Homo sapiens
aaaagacagccaaaaaaggtcgcgcaatggtgatctccagtgggatgcagtcaatggacaccatgaagcaagtttatcagatcgtgaagcccctcaaccccaacttctgcttcttgcagtgtaccagcgcatacccgctccagcctgaggacgtcaacctgcgggtcatctcggaatatcagaagctctttcctgacattcccatagggtattctgggcatgaaacaggcatagcgatatctgtggccgcagtggctctgggggccaaggtgttggaacgtcacataactttggacaagacctggaaggggagtgaccactcggcctcgctggagcctggagaactggccgagctggtgcggtcagtgcgtcttgtggagcgtgccctgggctccccaaccaagcagctgctgccctgtgagatggcctgcaatgagaagctgggcaagtctgtggtggccaaagtgaaaattccggaaggcaccattctaacaatggacatgctcacc

SEQ ID NO: 3642 - DNA, 624 bp, Homo sapiens
taaatcttgacttgaacgaccaagtggactctcctcaaatatggagtccacgagatcatttacacaatgctggcctccttgatgaataaagatggggttctcatatccgagggccaaggcttcatgacaagggagtttctaaagagcctgcgaaagccttttggtgactttatggagcccaagtttgagtttgctgtgaagttcaatgcactggaattagatgacagcgacttggcaatatttattgctgtcattattctcagtggagaccgcccaggtttgctgaatgtgaagcccattgaagacattcaagacaacctgctacaagccctggagctccagctgaagctgaaccaccctgagtcctcacagctgtttgccaagctgctccagaaaatgacagacctcagacagattgtcacggaacacgtgcagctactgcaggtgatcaagaagacggagacagacatgagtcttcacccgctcctgcaggagatctacaaggacttgtactagcagagagtcctgagccactgccaacatttcccttcttccagttgcactattctgagggaaaatctgacacctaagaaatttactgtgaaaaagcattttaaaaagaaa

SEQ ID NO: 3643 - DNA, 563 bp, Homo sapiens; identical to SEQ ID NO: 871

SEQ ID NO: 3644 - DNA, 586 bp, Homo sapiens; identical to SEQ ID NO: 873

SEQ ID NO: 3645 - DNA, 555 bp, Homo sapiens
tggtacgcctgcaggtaccggtccggaattcccgggtcgacccacgcgtccgggaagttagtaggactcacttctctgattaataagcaattgcagcacacagcgttccactgcggggtttcacgctcacctgaaaacacctgttcccaacctacttcttggtgcaagttgaccaaatcgttttaagtggtaactctttccaaccgtagcagggttgttttctgttaagcaaagccgagatccagtgcaatacctggactgtcaccgtcctgtgagtggtgtacacaatgggaagataataagccgtggtgttttgctgtctgtctgtgtcacaagcatgaaaacccgtgtgtcattgatcagcaccatttgtggtatgttccgtgatgagcgtttagtgagcctgctggctgcagagcactatgaaatcatggtacgtagtccccggcacctgtcgttattcctatatcctcctgcaactgtggtttgaaactgcgcattctctagtagtatatatcgtgcctgtcttcaaaaacatttccctttttatactca

SEQ ID NO: 3646 - DNA, 520 bp, Homo sapiens
tggtacgcctgcaggtaccggtccggaattcccgggtcgacccacgcgtccggaactgggaagaacaagtgaatagtctgcctgaagttttcagaaaagctggttttgttatcgaagctttcaccagactaccatacctgtgtgaaggcgacatgtataatgactactacgttctggatgacgctgtctttgttctcaaaccagtataaacacgtggaggtcgaagtcttcagagtccgcaccctccgggatgtgcccttggaagagggtctgtgttcacaattacgtgaagggaggacccttggggaccgccattctaaatatcatgtaggaatttaaaaagccaaaatactaattatttctttgtagtgtgtaaaggaatgtttttaaaagacaaaaacccaactctttgtggatttttatcaactctttactcagagccactctccaatgcaggtcacactccaattatgatggaagatattttttatacttaattgcagtagggactcattcccag

SEQ ID NO: 3647 - DNA, 418 bp, Homo sapiens
tgcagacggaggtcaggtcttcctctttcctgagactggatctgttcaaacagcaaacgcccacagatggcccagaggtggtggtagtcagggtgtgtgggtgtttttagggttctttagtgttgtttctttcacccaggggtggtggtcccagccagtttggtgctgacggtgagaggaaattagaatctgtttgcaaattgtccaacccaccccctcaacatgaggggcttccattttctgtgttttgtaagggaactgtttccttcatgccgccatgttcctgatattagttctgatttctttttaacaaatgttatcatgattaagaaaatttccagcactttaatggccaattaactgagaatgtaagaaaattgatgctgtacaaggcaaataaagctgtttattaaccttg

SEQ ID NO: 3648 - DNA, 560 bp, Homo sapiens
tctgcaggtatgaccccgaaggggacaatacatgggagcaggtggctgttaaatctctgaagcctgagagtggaggtaaccacatagctgatctgaaaaaggaaatcgagatcttaaggaacctctatcatgagaacattgtgaagtacaaaggaatctgcacagaagacggaggaaatggtattaagctcatcatggaatttctgccttcgggaagccttaaggaatatcttccaaagaataagaacaaaataaacctcaaacagcagctaaaatatgccgttcagatttgtaaggggatggactatttgggttctcggcaatacgttcaccgggacttggcagcaagaaatgtccttgttgagagtgaacaccaagtgaaaattggagacttcggtttaaccaaagcaattgaaaccgataaggagtattacaccgtcaaggatgaccgggacagccctgtgttttggtatgctccagaatgtttaatgcaatctaaattttatattgcctctgacgtctggtcttttggagtcactctgcatgagctgctgacttac

SEQ ID NO: 3649 - DNA, 520 bp, Homo sapiens
aatttggccctcgaggccaagaattcggcacgagggcataagcagcagtgcatgaaggagctgcgggcgtgccatcagtctgaagcctataagatgtgcacggagaacatccacgataagatgatcaagatagaagactcgagctctgggctcatgaacactctcctgaatggacacacgggtggggactgcgatggcttctccaccttcgatgttcccatcttcactgaagagtggttggaccaagacaaagcgcgtgatgcggagcttccgcgcttgcggaagatgaatgtggccttcgaggatcacaccgcggtactgcagaagcacacgcagagcatgagcatcgcgcgcgagcgtctggagcaagagctggcgctggaggagcggaggacgctggcgctgcagcagcagctgcaggccgtgcgccaggcgctcaccgccagcttcgcctcactgccagtgccgggcacgggcgaaacgcccacgctgggcactctggacttctacatggcccggc

SEQ ID NO: 3650 - DNA, 473 bp, Homo sapiens
cagctaacgttctgcaccgtgacctcaagccttccaacctgctgctcaacaccacctgtgatctcaagatctgtgactttggcctggcccgtgttgcagatccagaccatgatcacacagggttcctgacagaatatgtggccacacgttggtacagggctccagaaattatgttgaattccaagggctacaccaagtccattgatatttggtctgtaggctgcattctggcagaaatgctttctaacaggcccatctttccagggaagcattatcttgaccagctgaaccacattttgggtattcttggatccccatcacaagaagacctgaattgtataataaatttaaaagctaggaactatttgctttctcttccacacaaaaataaggtgccatggaacaggctgttcccaaatgctgactccaaagctctggacttattggacaaaatgttgacattcaacccacac

SEQ ID NO: 3651 - DNA, 504 bp, Homo sapiens
tggtacgcctgcaggtaccggtccggaattcccgggtcgacccacgcgtccgaccagcttaaaggcagtattttgtgtcctccaggagcttcttgtttccttgttagggttaacccttcatcttcctgtgtcctgaaacgctcctttgtgtgtgtgtcagctgaggctgggggagagccgtggtccctgaggatgggtcagagctaaactccttcctggcctgagagtcagctctctgccctgtgtacttcccgggccagggctgcccctaatctctgtaggaaccgtggtatgtctgccatgttgcccctttctcttttcccctttcctgtcccaccatacgagcacctccagcctgaacagaagctcttactctttcctatttcagtgttacctgtgtgcttggtctgtttgactttacgcccatctcaggacacttccgtagactgtttaggttcccctgtcaaatatcagttacccactcggtcccagttttgttgcccc

SEQ ID NO: 3652 - DNA, 419 bp, Homo sapiens
gaatttaactactgagtaggtgattattttcacattttaattgctaatcactggctatataagtgtttttaagcaaaggtatttttgaagtggtgtagaacccttccaagctttcctgctcagtgttctaccagacttaccctggggcctggcttaaaagcaggattgaagaaaagggactgggggaaggaaacttattggaaaacttgatgcgaatgagtttctgcttggcacagtctctgcctgcttgctctcctttgctgatggattgcatttatcaaactattcatgctagcatttttccaacgagggaacttattccgcacgggcctactgtaggaccattgtctcgtgtaattaggaattttacatttgaaggattgctaaattgtcacagtagtaggaagtatatggaaacc

SEQ ID NO: 3653 - DNA, 552 bp, Homo sapiens
  misc_feature 426: n = A,T,C or G
ccctcggactccctcccctctgcttctactcctcctgctccagtgcggatcgtttcgcaactgcttgccactcgtcccgtgcctggctgtttttccatttcccggccccctcttcttgagtactttaccccctgcatttggggacagggactggaaaaggggcgggtggagcgtccagtggagaagaaggaagcgaggcccgcagaggaggaggatcggcggactgtggggaggagaccccacgccaccctttctggtcatctcccctcccgccccgcccctgcgcacactccctcgcgggcagctactttcggaccaggaaagtaagagcggccctgggtgacagcgccgcggggccagtcccggggttagccgcgcgtctgctcgcttctggtccgtcgcgctcccagccagggcacagcgganccgaggatggcttcgaccacaacctgcaccaggttcacggacgagtatcagcttttcgaggagcttggaaagggggcattctcagtggtgagaagatgtatgaaaattcctactggacaagaatat

SEQ ID NO: 3654 - DNA, 527 bp, Homo sapiens
ctccatcatggcgcaggatcaaggtgaaaaggagaaccccatgcgggaacttcgcatccgcaaactctgtctcaacatctgtgttggggagagtggagacagactgacgcgagcagccaaggtgttggagcagctcacagggcagacccctgtgttttccaaagctagatacactgtcagatcctttggcatccggagaaatgaaaagattgctgtccactgcacagttcgaggggccaaggcagaagaaatcttggagaagggtctaaaggtgcgggagtatgagttaagaaaaaacaacttctcagatactggaaactttggttttgggatccaggaacacatcgatctgggtatcaaatatgacccaagcattggtatctacggcctggacttctatgtggtgctgggtaggccaggtttcagcatcgcagacaagaagcgcaggacaggctgcattggggccaaacacagaatcagcaaagaggaggccatgcgctggttccagcagaagtatgatgggatca

SEQ ID NO: 3655 - DNA, 445 bp, Homo sapiens
tgctgagtctgcaggagttctccaacatggaccttcgggacttccacaagtacatgaggagccacaaggcagagtccagtgagctggtgcggaacagccaccatacctggctctaccagggtgagggtgcccaccacatcatgcgtgccatccgccagagggtgctgcgcctcactcgcctgtcgcctgagatcgtggagctcagcgagccgctgcaggttgttcgatatggtgaggggggccactaccatgcccacgtggacagtgggcctgtgtacccagagaccatctgctcccataccaagctggtagccaacgagtctgtacccttcgagacctcctgccgctacatgacagtgctgttttatttgaacaacgtcactggtgggggcgagactgttttccctgtagcagataacagaacctacgatgaaatgagtctgat

SEQ ID NO: 3656 - DNA, 463 bp, Homo sapiens
taatgtggtataaattcattgttaatgagaacaataatgttactctgctggaggacagagtcctgaaggctgagtatggcgccatcctgtcactatgtgagttttctcttgatgatagtgagctctttctgaagttcactgaacttagggcgattttcaggtttataatcccaacacttcatcatgattttggaaatatcctctggacagtgctggggagctgacatccggtatcctctttctacttgctctcttgcttgctgatttgtcattccagggtacggacaaacccctaagctgaaggtctcccagagaaggatgccaaagctccacacgtcactctctgaactgtatctcccataattaagagcttccggtgctgtccatttaatgggaatctcgcttaagccagaagatgaatacactccaccatccccctgacgagacattcccaagtcacctg

SEQ ID NO: 3657 - DNA, 581 bp, Homo sapiens
aattttgttcaccgagatctggccacacgaaactgtttagtgggtaagaactacacaatcaagatagctgactttggaatgagcaggaacctgtacagtggtgactattaccggatccagggccgggcagtgctccctatccgctggatgtcttgggagagtatcttgctgggcaagttcactacagcaagtgatgtgtgggcctttggggttactttgtgggagactttcaccttttgtcaagaacagccctattcccagctgtcagatgaacaggttattgagaatactggagagttcttccgagaccaagggaggcagacttacctccctcaaccagccatttgtcctgactctgtgtataagctgatgctcagctgctggagaagagatacgaagaaccgtccctcattccaagaaatccaccttctgctccttcaacaaggcgacgagtgatgctgtcagtgcctggccatgttcctacggctcaggtcctccctacaagacctaccactcacccatgcctatgccactccatctggacatttaatgaaactgagagacagaggcttgtttgcttg

SEQ ID NO: 3658 - DNA, 625 bp, Homo sapiens
tgtttttagatatttttcctataggtttctgctgtggagccgtactcactgcagaccctgaaggaggaggagcacctgctttctgccactcagtgcgctcagctgccattcttctcacatatgcatcatccacacacatcaagatattttccggctttatgtcagtatgaatgatcttgcacttactgtgtaagtaatctaacccttgaaggacctgtcgaatgatactcttcacacaacgtactgggaggccttgatagttggatttgatgatccacttgaggagatggtggccaagtacttcgaagaccatgcagacatgtatcccattcatgcctgaaatcttgaagtcgtcaatgagctggaccaccatgtctttgtttgggtcactgggatcactttctcgaacacatttgagcaattttatttcatccaaggctgtctccgtataatgctgggcactttttacaactttcattgcaacaaatcttttcccctgcatatccccgcacagccagacagtagagaagtgcccccatccaagcttttcaataacatgataccgggccatgaagagggtctccattttcaccggatgatatcccactttgcagtaagtcgcagg

SEQ ID NO: 3659 - DNA, 531 bp, Homo sapiens
gctgctgctggatactcgtgttttcggggatcgaggatactcaccagaaaccgaaaatgccgaaaccaatcaatgtccgagttaccaccatggatgcagagctggagtttgcaatccagccaaatacaactggatatctgctttttgatcaggtggtaaagactatcggcctccgggaagtgtggtactttggcctccactatgtggataataaaggatttcctacctggctgaagctggataagaaggtgtctgcccaggaggtcaggaaggagaatcccctccagttcaagttccgggccaagttctaccctgaagatgtggctgacgagctcatccaggacatcacccagaaacttttcttcctccaagtgaaggaaggaatccttagcgatgagatctactgcccccctgagactgccgtgctcttggggtcctacgctgtgcaggccaagtttggggactacaacaaagaagtgcacaagtctgggtacctcagctctgagcggctgatccctcaaagagtgatgg

SEQ ID NO: 3660 - DNA, 721 bp, Homo sapiens
cactgttataataactttaatttatcttgcattttacagaagtctatgaacgattttaaaaaagcacctccttaccccatatcacgtttctctgacaggtgttaaagtaggcaatgagtatgtcaacagcttgagcatcagcgtcttgcaaggacttcagaccaaccactcgccaaaaatcttggcagcttttttatcttgtttttaatacaacggtatatccactctgatggcaaacctgtccagccacatctccacaacaagctttgcaaaatcagtgattagcaaattagttagctttggcacggagctgtgctcgcttgcccgtgacagcctggaagccggttttgatactggcaacagaacatctagaatgacaagtttcgcactgtaggaaatagagtcgtgtgtccttctgcaggattgtgtccggtgatcggcatgtgtgacaagtgacatattccttgatatatcttctcaagacattttctatctgttcctgttggaatcttcctttgattacaagttgggtattaccatctatagaaccacttgtacccaattcagccaaccaaaatgccaggagatgtttgggctgacgatgtaatagtttacagatatctgtaaagttgaccaagaagttttctgggtcctactcggacgactgtggagggttccggcaaatttccttttcccccgaagcctatccgggatctttccc

SEQ ID NO: 3661 - DNA, 595 bp, Homo sapiens
taccggtccggaattcccgggtcgacccacgcgtccgggagtcggcgccgagaacatggctggaggcaaagctggaaaggacagtgggaaggccaaggctaaggcagtatctcgctcacagagagctgggctacagtttcctgtgggccgcatccacagacacttgaagactcgcaccacaagccatggaagggtgggtgccactgctgccgtgtacagtgctgcgattctggagtacctcactgcagaggtgctggagctggcaggtaatgcttctaaggatctcaaagtaaagcgtatcactccgcgtcacttgcagcttgcaatccgtggtgatgaagagttggattctcttatcaaggctaccatagctgggggtggtgtgatccctcacatccacaaatctctgattggaaagaagggacagcagaaaactgcttagagggatgctttaaccaaccctcttcctccccgtcattgtactgtaactgggacagaagaaataatggggatatgtggaatttttaacaacagttaaatggaaaagcatagacaattattgtagacatgataaaagaaacatttgtatgttctt

SEQ ID NO: 3662 - DNA, 529 bp, Homo sapiens
tggtacgcctgcaggtaccggtccggaattcccgggtcgacccacgcgtccgaaagagcctcagccttcgccgccaagatgagggggggcttctggccggcgctgaggatgaactggcgggtgtggacgccactacagttcatcaacatcaactacgtccctctgaagttccgggtgctcttcgccaacctggcagctctgttctggtatgcctacctggcctccttggggaagtgacgaccgctgggagaacatcaggtgcactgtggacgtgggtctgggggtctcacccgcccagcgagagcagaaccaatccagtcaggatgtcactgactctaaatcaggtgattcaagatgcccaaaaatgatggatagagaaacagaaatctctgaatgtcagaaccctgtcttttaaaaaggcagtcactgccttcaggtggtgctgccccagaaacttaaaatttagtcgaggcagtttcaattgttactgtggaccgaattaggatcacaataaacgataatgcaggtt

SEQ ID NO: 3663 - DNA, 325 bp, Homo sapiens
ccgggtcgacccacgcgtccgaaatttattagtgaaaggaaagacactaggaaacatttgagaacctgcctctatcccagaatgtgctggagatttgacactcaaatcagtgtttagtcttctgcttggcaccatagcttaacctgcagtttcttcaaaatgcccaatgccttgtttcctattaccttagattgcaaaccagtctagggaagtctatgagaaagtagcatttaattaaagtttaaaaaaaaaaaggttgggcgttggggctcatgcctgtaatcccagcactttgggaggctgaggcgggtggatcactaggtca

SEQ ID NO: 3664 - DNA, 181 bp, Homo sapiens
tgcaggaggtgctgtgggttggagccgtgggctgtggagggtttgtgtatgatgagaagccctgtacagtcttctcaagaaataccctgagccagtctctgagacgcttcggtaaaaaatgtccctggatggaatcaagattttaaattcaaataaagcctaatatcatgttgtgtccaca

SEQ ID NO: 3665 - DNA, 425 bp, Homo sapiens
  misc_feature 32, 372, 392, 399, 420: n = A,T,C or G
cgctccaatgtccagcccacagctgcccctgnccagaaggtgatggagaatagcagtgggacacccgacatcttaacgcggcacttcacaattgatgactttgagattgggcgtcctctgggcaaaggcaagtttggaaacgtgtacttggctcgggagaagaaaagccatttcatcgtggcgctcaaggtcctcttcaagtcccagatagagaaggagggcgtggagcatcagctgcgcagagagatcgaaatccaggcccacctgcaccatcccaacatcctgcgtctctacaactatttttatgaccgggagaaggatctacttgattctagagtatgccccccgcgggagctcttacaaggagctgcncaaaagcctgcacaatttgncgagcancgaacagccacggtcccgggnggatc

SEQ ID NO: 3666 - DNA, 543 bp, Homo sapiens; identical to SEQ ID NO: 895

SEQ ID NO: 3667 - DNA, 263 bp, Homo sapiens
gtgcagtggacagagagtgtgggcctcacgctggtcagcagggacctcacctccatgcagctgaagacccccagtggccaggtcctcagcttctgcattctgcagctgtttcccttcacctccgagagcaagcggatgggcgtcatcgtcagggatgaatccacggcagaaatcacattctacatgaagggcgctgacgtggccatgtctcctatcgtgcagtataatgactggctggaagaggagaggtcactattccaatt

SEQ ID NO: 3668 - DNA, 475 bp, Homo sapiens
tggtacgcctgcaggtaccggtccggaattcccgggtcgacccacgcgtccgctcttcacactggcactcctaatagcccagagcctggacctgttctggttaaagacacccccgaggacaagtatggaataaaggtcacatggaggagacgacagcacctgcttgcttacctcagggagagagggaagctgagcagaagccaattccttgtgaaaagctgactgccatcagtaatctcaatagaaaagagatatgttttctggagtcataaaggaattcaattcctagggtttttgtttttgtttttgagatgtaatattgctctgttgcccaggctggagtgcagtggtatgatctcaccttactgcaaccaccacttcctgggttcaagcgattctcctgcctcagcctccccagtagctgggattacaggcaccagccaccatgcctggctaatttttttgtatttttagt

SEQ ID NO: 3669 - DNA, 505 bp, Homo sapiens
taccggtccggaattcccgggtcgacccacgcgtccggctgagtcacccaagaaaggcccaagaaggtggcatctggtgtcttgtcacctcctccagctgcccctcctcccagcagctccagtgtccctgaggccgggggtccccccataaagaaacagaaggctgatgtgacactcagtgctctgaacgactccgatgccaacagtgacgtggtggatattgaagggctaggagaaactcctccagctaagaaactcaacttcgaccaggcctgaccctggattctggccttctcatgacctctgctgatcctcctctcctctcctgctgagccttccacctctgacctctcactgttcatgccggacctgtggatctcctgggactccgagcaaggcctgcacgagagagggctgaaaggctgctggggctgccacctcgctattcccgcataagcatctgcccccaacccctttgaccttcatctgatggacatttttatac

SEQ ID NO: 3670 - DNA, 526 bp, Homo sapiens
tataggaatttggccctcgaggccaagaattcggcacgaggtgcaatgcattctgttgaggggctacatgaaaggttgtttcttgaacaggatgagtttcaacagtgacctgtgtatgagcttcagtgcctgaccaaccaagaggagcaggaaattgctgacgcacctggggactgtgtgtctcgcagtccatggcctgcacggcagctgtgaagtgcccaccactgtgccgatgctggtgcgtcggatccgaccgggctctcccactgttgcttgtccccgatgagccacctgagcttgaccatgtactggaggtggtgcccgaacactgagactgctccatggcggggcttgtagatacactattacttgtatttgtaccttcatcagctgttttcttgaagaaactgtgctgcagagcataataaggttgaattcgagttttggggtcataatcaagcatccttaaaatgaggtctttgaacttcaagtagtcagcgaccgtatgacctgactccccagcacg

SEQ ID NO: 3671 - DNA, 563 bp, Homo sapiens
aaggtgaaggacgaaccacagagaagatccgcgaggttgtctgctaaacctgctcctccaaagctggattgatgtggagaaaacacctttcccttctagttttgagagacttcctcttggctcccaggaggagggattccctgactttgacacacatggccaccttggcacaaaagccttgtggtatagaaaaacaaatttgtttttatgtcctcttctccctttccatctttcagcatagacttaactcccttaagcccagacatctgttgagacctgacccctagtcattggttaccagtgtgtcaggcaatctggactttccagtgatgccactgagatggcacctgtcaaaagagcagtggttccatttctagattgtggatcttcagataaattctgccattttcatttcacttcctgaaagtcagggtcggcttgtgaaaagttgttaaacaacatgctaaatgtgaaatgtcaaccctcactctaaactttccctgttcagagcatcagatgaagacttcattgggttttatagtggctttctgatttttggtagt

SEQ ID NO: 3672 - DNA, 580 bp, Homo sapiens
gaatttggccctcgaggccaagaattcggcacgaggggaagtcaaaaggtcgtagatttaaaggaaaaggaaagggtaataaagctgcccagcctgggtctggtaaaggaaaagtacagtttcagggcaagaaaacgaaatttgctagtgatgatgaacatgatgaacatgatgaaaatggtgcaactggacctgtgaaaagagcaagagaagaaacagacaaagaagaacctgcatccaaacaacagaaaacagaaaatggtgctggagaccagtagtttagtaaaccaattttttattcattttaaataggttttaaacgacttttgtttgcggggcttttaaaaggaaaaccgaattaggtccacttcaatgtccacctgtgagaaaggaaaaatttttttgttgtttaacttgtctttttgttatgcaaatgagatttctttgaatgtattgttctgtttgtgttatttcagatgattcaaatatcaaaaggaagattcttccattaaattgcctttgtaatatgagaatgtattagtacaaactaactaataaaatatatactatatgaaaagag

SEQ ID NO: 3673 - DNA, 518 bp, Homo sapiens
aagaatatccgctaaggatgccttagcccacccctacctagatgaagggcgactacgatatcacacatgtatgtgtaaatgttgcttttccacctccactggaagagtttataccagtgactttgagcctgtcaccaatcccaaatttgatgacactttcgagaagaacctcagttctgtccgacaggttaaagaaattattcatcagttcattttggaacagcagaaaggaaacagagtgcctctctgcatcaaccctcagtctgctgcttttaagagctttattagttccactgttgctcagccatctgagatgcccccatctcctctggtgtgggagtgatggtggaagataatgtactactgaagatgtaatgtagctttccactggagtctgggatttgcaattctggaggttaatcatgcttgtactgtaattttactaatgaagttttaaattaacaaccactacttgtatgatatgaataatatttagaaatgttactagacttttaatc

SEQ ID NO: 3674 - DNA, 701 bp, Homo sapiens; identical to SEQ ID NO: 899

SEQ ID NO: 3675 - DNA, 494 bp, Homo sapiens
tggtacgcctgcaggtaccggtccggaattcccgggtcgacccacgcgtccgctgctagttagagaaacatgttagttgattatacctgaaatggattatttatctcatcagcaagtattatttgaataaaatgagaaatgcttaagaaaaattgttgctctatagtaatttggtttcgaagaatggaatggtaactattttttcccatcgttcttttgagagaaggaagtgtgatgactgatgatcttgaaaagcccatttctgattgcacgttgactggaattctttctttgtgtctgtggactagcgatgctgtttgtaaaatgaagattcgggactggctcatatctttttatctaactagatgtcagatcttgaaatctgtattctcgaagcaattctgccacttgatcgtattcacaggggccctggtaggctcctttagaaggaccatttctgttcctagagcttaactagaattcattcttcactg

SEQ ID NO: 3676 - DNA, 289 bp, Homo sapiens
gggaaagggatgagggaggacagcttctggttaaacacaggtccctcttccacatcaaatgaacattggcttcctgggacagaaggccttcaaaggagggattgcaaagcaaggcaaagcgttctgtcttcattttccccatccccatgagacaagactgatggaaagggtggtggggcaacactgcttaatggatgccttttcacatcatttcagtttttagccctcatgactgtattttctaatcagagacaataacattttaaataaaacaacgacaaagaagtct

SEQ ID NO: 3677 - DNA, 617 bp, Homo sapiens; identical to SEQ ID NO: 902

SEQ ID NO: 3678 - DNA, 303 bp, Homo sapiens
taagctcggaattcggctcgagctgaagaagaattttaaagacgatttgaacaagaaaatgaaggcagtgggaaagcaatgccaaatggttgtggagaaagtggccggagcctccctggagtggagcagccctgaagcctgtgccccccgacctgcgggccgctgttttggtttgacatgacaaggaaaggacttcctgctgaccctgagagcctctggggtgccgcggcaccacggggcatgcatgattgtgctagcgtttagtctgagttgatctttttaaaactgcaagtgttgaatact

SEQ ID NO: 3679 - DNA, 626 bp, Homo sapiens
agactgcttcatcttttatcccagaatagggttgacgtacatagtgagggttgacttccccattccataaggttttcattctgaagagtaaaacttccccaggtagaagactttctccttcttaaaaaatatagggtgatttctttaaaactttgttatctagagacagtttaattacagttatatacaggtttatgcctaggatgtattcagatgggtgggacctgtgtgctgcttttgtcatcccacactcaaagttgtctctttgtttcttgctgccactgccagctcattgttgagactgccatttctttctcttactcagctctccccagtgccttttggccactgcagctaccgtagaatggcattttatatgtaccttgtcacccacttctgtttactttttcctctccagtaaaaagtaaaagatttctttcaattggtcttcccattgcagttactgttatttctcttttttggttaactttaaatcaaaactcaaaatatgttcatccagagtgtgtcttaagtaacttacgtgtcttaagtaacagggaccagagacatgttacctacaagagttctgggctatccttttcattcttatcacatatcatagcttg

SEQ ID NO: 3680 - DNA, 484 bp, Homo sapiens
tggtacgcctgcaggtaccggtccggaattcccgggtcgacccacgcgtccgagacgatcttcttcactgaaggaaagaagccgcccattcactgtagcagcttcatttcaaagcacctctgtcaagagcccaaaaactgtgtccccacctatcaggaaaggctggagcatgtcagagcagagtgaagagtctgtgggtggaagagttgcagaaaggaaacaagtggaaaatgccaaggcttctaagaagaatgggaatgtgggaaaaacaacctggcaaaacaaagaatctaaaggagagacagggaagagaagtaaggaaggtcatagtttggagatggagaatgagaatcttgtagaaaatggtgcagactccgatgaagatgataacagcttcctcaaacaacaatctccacaagaacccaagtctctgaattggtcgagttttgtagacaacacctttgctgaagaattcactactcag

SEQ ID NO: 3681 - DNA, 433 bp, Homo sapiens
taccggtccggaattcccgggtcgacccacgcgtccgaatctattttatggttggcattttgggggaagatttcgatgggttccacattcttgctttagttgttgtagagggatttgggtgtttctacccaaggcattggtctagcttttcctacaatgaacctatctttggaggttcaagctccccaccttcccccactgtggtgacctgtggccacttgcagaagggatggtgcctgacccactgccctagccccacgctatgcaccaaacttgttctccccgtcctggtccagggctggggtctttagagactgacagcctctgccccaggcctgagtccttagcaagggttgggtaaggaggttttaagggagaaggtccagtccttagcccttgaaatacaaagctcttctgacactgaatttggatg

SEQ ID NO: 3682 - DNA, 277 bp, Homo sapiens
gacagtttgggtttgggacttaccggggtgatgttagatctggaacccccaagtgaggctggagggagttaaggtcagtatggaagatagggttgggacagggtgctttggaatgaaagagtgaccttagagggctccttgggcctcaggaatgctcctgctgctgtgaagatgagaaggtgctcttactcagttaatgatgagtgactatatttaccaaagcccctacctgctgctgggtcccttgtagcacaggagactggggctaagggcccct

SEQ ID NO: 3683 - DNA, 534 bp, Homo sapiens
ggttagcatccagcgacagatcaaccatccctttgtacacagcttgggggacagctggcagggaaaacggcaccttttcattatgtgtagctactgcagcacagatctgtactccctttggtcggctgttggctgctttcctgaggcttccatccgtctctttgctgccgagttggtgctggtactgtgttatctccatgacttgggcatcatgcatcgagatgtgaagatggagaatattcttctagatgaacgagatacagaaattagctggtcatgagggcacacactgtggtcccagctactcgggaggctgagggggaagaattgcttggacccgggagatggaggttgcagtgagtggggatcgtgccactgcatccagcctgagcaacagagtgagatcttgtctcaggaaaaaaataaatttaattgctgtggatactgtaaagggtgtttatcgtaacagttcataatattctatttaagaatgcgtgggagaaattttctctggacccagttatgcttttcctg

SEQ ID NO: 3684 - DNA, 551 bp, Homo sapiens
ggccctcgaggccaagaattcggcacgagaaactgttatctgatttattacccatgaggatgttaccaagtattatatttacctgtatagtgtacttcatgttaggattgaagccaaaggcagatgccttcttcgttatgatgtttacccttatgatggtggcttattcagccagttccatggcactggccatagcagcaggtcagagtgtggtttctgtagcaacacttctcatgaccatctgttttgtgtttatgatgattttttcaggtctgttggtcaatctcacaaccattgcatcttggctgtcatggcttcagtacttcagcattccacgatatggatttacggctttgcagcataatgaatttttgggacaaaacttctgcccaggactcaatgcaacaggaaacaatccttgtaactatgcaacatgtactggcgaagaatatttggtaaagcagggcatcgatctctcaccctggggcttgtggaagaatcacgtggccttggcttgtatgattgttattttcctcacaattgcctacctg

SEQ ID NO: 3685 - DNA, 521 bp, Homo sapiens
cgtttggcagaacttgtaaagaaaggtgcagtggacaagagggatgcaagtcttatgtgttctgtctccctgacccctatgggtgttcctgtgccacaggctggaagggtctgcagtgcaatgaagcatgccaccctggtttttacgggccagattgtaagcttaggtgcagctgcaacaatggggagatgtgtgatcgcttccaaggatgtctctgctctccaggatggcaggggctccagtgtgagagagaaggcataccgaggatgaccccaaagatagtggatttgccagatcatatagaagtaaacagtggtaaatttaatcccatttgcaaagcttctggctggccgctacctactaatgaagaaatgaccctggtgaagccggatgggacagtgctccatccaaaagactttaaccatacggatcatttctcagtagccatattcaccatccaccggatcctcccccctgactcaggagtttgggtctgcagtgtgaacacagtggctgggatg

SEQ ID NO: 3686 - DNA, 457 bp, Homo sapiens; identical to SEQ ID NO: 334

SEQ ID NO: 3687 - DNA, 459 bp, Homo sapiens
taccggtccggaattcccgggtcgacccacgcgtccgccatgtacatgaagaagctaaatcctttactgttagtcatttgctgagcatgtactgagccttgtaattctaaatgaatgtttacactctttgtaagagtggaaccaacactaacatataatgttgttatttaaagaacaccctatattttgcatagtaccaatcattttaattattattcttcataacaattttaggaggaccagagctactgactatggctaccaaaaagactctacccatattacagatgggcaaattaaggcataagaaaactaagaaatatgcacaatagcagttgaaacaagaagccacagacctaggatttcatgatttcatttcaactgtttgccttctacttttaagttgctgatgaactcttaatcaaatagcataagtttctgggacctcagttttatcat

SEQ ID NO: 3688 - DNA, 502 bp, Homo sapiens
  misc_feature 383: n = A,T,C or G
tggtacgcctgcaggtaccggtccggaattcccgggtcgacccacgcgtccggtacatcagcaagaaccccaaggacaagaggcatgtctggttcggcgagagcatgaccgatggattccagttcgagtatggcggccagggctccgaccctgccgatgtggccatccagctgaccttcctgcgcctgatgtccaccgaggcctcccagaacatcacctaccactgcaagaacagcgtggcctacatggaccagcagactggcaacctcaagaaggccctgctcctccagggctccaacgagatcgagatccgcgccgagggcaacagccgcttcacctacagcgtcactgtcgatggctgcacgagtcacaccggagcctgnggcaagacagtgattgaatacaaaaccaccaagacctcccgcctgcccatcatcgatgtggcccccttggacgttggtgccccagaccaggaattcggcttcgacgttggccctgtctg

SEQ ID NO: 3689 - DNA, 557 bp, Homo sapiens
acgcgccgtggctccggatctcttcgtctttgcagcgtagcccgagtcggtcagcgccggaggacctcagcagccatgtcgaagccccatagtgaagccgggactgccttcattcagacccagcagctgcacgcagccatggctgacacattcctggagcacatgtgccgcctggacattgattcaccacccatcacagcccggaacactggcatcatctgtaccattggcccagcttcccgatcagtggagacgttgaaggagatgattaagtctggaatgaatgtggctcgtctgaacttctctcatggaactcatgagtaccatgcggagaccatcaagaatgtgcgcacagccacggaaagctttgcttctgaccccatcctctaccggcccgttgctgtggctctagacactaaaggacctgagatccgaactgggctcatcaagggcagcggcactgcagaggtggagctgaagaagggagccactctcaaaatcacgctggataacgcctacatggaaaagtgtgacgagacatcctgtggctggactac

SEQ ID NO: 3690 - DNA, 590 bp, Homo sapiens
gaatttggccctcgaggccaagaattcggcacgaggcaggttctggctcacagacatcatcatgcctttttttccctccctgaggcgccttggcagaagagcgtgaccctgtgagccaggccccccttagctctgcttcagatcacagaacacagacagactcgcgagttgctggacctctttggtattaagtgtttgaatccatggtgggccttttgcaagtagcgttagctctttttaaatgttgaactgagctaaggatgcactttcttgtggacatagaaggggcccacgtaaggccctgagtaggctccttagttgctgctttacctgatgagggccaaagagattaactctgcctcgttgccatgtctcagaaaagttgccatatttcacccagaaggggctcgttttcctcttactcttactttaaccatgtgcctggaggagccattctgggctcttgcacttgcccagcctttctttgccaggggcagagaagggaaagggggtagattgagtgtgccaagggccgtgcaagggcaggcttgctttccacccatctgctgagggagccctctcctctcgct

SEQ ID NO: 3691 - DNA, 463 bp, Homo sapiens
gggaatttggccctcgaggccaagaattcggcacgaggctgacggcagcttccccgccggcttcgtcttgcagctcttctcccacacccagctcaggggcccagacagcaaggactcacccaaagacagggaagtggcagaaggaggccttccccgggcggagagcccctctccagggagccctcatttcaagtcctggggtaccctgtgcgcaaactccatctatctggagtggtatataggctggaggcagtaaatctttaaaaaccaggggcccccgtggcggttctttgcggagcagaggctctggacctgtggtttcagacgatctcacgaacccaaagcttggacagatttctcagaaacctgtgaggcttcgaccaaaatgtctctactttctgtgttgttatgtacgtattgaagttctctgaagactttatttaaataaagatcctgccacttt

SEQ ID NO: 3692 - DNA, 624 bp, Homo sapiens
tcggcacgaggcaatcatgcacttaactaccaaaaagagtaaactcctctcagagacttcttaatacagttcagtgcaaataaaatacatttgctgtttgatgtagcatgagaaatcccaagtccttctgttcctttactgaaaagtagctgtttgtaagtaagatctgcatcataaaaactttctaaatccctaagtaagagatatcaagtgcccagcagtttcctaaatgtcagtacacataggtagccagtcaccctcaaaaagtccagcagttttatcaggaaggaatctaaagatatctatcttccaagctggctctgggtctctcagctttttcaaactaaatgtgtggtcgtgggattgcttgctttcgcaggttctaaacgctgtttccctggtctgtttttcagtatctcgcacctgaggtgcttcataagcagccttatgacaggactgtggactggtggtgcctgggagctgtcttgtatgagatgctgtatggcctgccgcctttttatagccgaaacacagctgaaatgtacgacaacattctgaacaagcctctccagctgaaaccaaatattacaaattccgcaagacacctcctggagggcctcctgc

SEQ ID NO: 3693 - DNA, 576 bp, Homo sapiens
tgtcggtgcctatgggacagtgtacaaggcccgtgatccccacagtggccactttgtggccctcaagagtgtgagagtccccaatggaggaggaggtggaggaggccttcccatcagcacagttcgtgaggtggctttactgaggcgactggaggcttttgagcatcccaatgttgtccggctgatggacgtctgtgccacatcccgaactgaccgggagatcaaggtaaccctggtgtttgagcatgtagaccaggacctaaggacatatctggacaaggcacccccaccaggcttgccagccgaaacgatcaaggatctgatgcgccagtttctaagaggcctagatttccttcatgccaattgcatcgttcaccgagatctgaagccagagaacattctggtgacaagtggtggaacagtcaagctggctgactttggcctggccagaatctacagctaccagatggcacttacacccgtggttgttacactctggtaccgagctcccgaagttcttctgcagtccacatatgcaacacctgtggacatgtggagtgttggctgtatctttgc

SEQ ID NO: 3694 - DNA, 589 bp, Homo sapiens; identical to SEQ ID NO: 2942

SEQ ID NO: 3695 - DNA, 568 bp, Homo sapiens
ataccgtataaaactcctagacaccttgccgctcccaggcaggctgattagatacctgaaatacgagaacacccagtaactggggccacggggagagaggagtagcccctcagactcttcttactaagtctcaggacgtcggtgttcccaactccaaggggacctggtgacagacgaggctgcaggctgcctccctctcagcctggacagctaccaggatctcactgggtctcagggcccagagctttggccagagcagagaacagaatgtgtcaaggagaagaatcatttgtttacaaactgatgagcagatcccagaccttctctaccttcaggaatggcagaaacctctattcctggggccagggcagagcttgaggtgttctggggaaggtggtgctcagagccttccctgtgcccctccacttgttctggaaaactcaccacttgacttcagagctttctctccaaagactaagatgaagacgtggcccaaggtagggggtagggggagcctgggtcttggagggctttgttaagtattaatataataaatgttacacatgtg

SEQ ID NO: 3696 - DNA, 542 bp, Homo sapiens
tggtacgcctgcaggtaccggtccggaattcccgggtcgacccacgcgtccgcccacgcgtccgtgcgaggcggcggtcaggtgggatgctatggaatatgatgagaagctggcccgtttccggcaggcccacctcaaccccttcaacaagcagtctgggccgagacagcatgagcagggccctggggaggaggtcccggacgtcactcctgaagaggccctgcctgagctgccccctggggagccggaattccgctgccctgaacgcgtgatggatctcggcctgtctgaggaccacttctcccgccctgtgggtctgttcctggcctctgacgtccagcagctgcggcaggcgatcgaggagtgcaagcaggtgattctggagctgcccgagcagtcggagaagcagaaggatgccgtggtgcgactcatccacctccggctgaagctccaggagctgaaggaccccaatgaggatgagccaaacatccgagtgctccttgagcaccgcttttacaaggagaagagcaagagcgtcaagc

SEQ ID NO: 3697 - DNA, 536 bp, Homo sapiens
gtatcattccttccccaaagagaccagtcaagctgctcagtggaggcaacacattacatttggtctctaccaccaaaacggaggtgatcccacctctcattgagaacaggcagtcctggtcagtttgcaagcaagtctttcctggcctgaattactgcacctcaggcgcttactccaacgccagctccacagactccgcctcctactatccgctgaccggggacaccagattagagctggaactgaggcctacaggagagattgagcagtattctgtcagcgcaacctatgagctccagagagaggacagagccttggtggataccctgaagtttgtaactcaagcagaaggtgcgaagcagactgaggctaccatgacattcaaatataatcggcagagtatgaccttgtccagtgaagtccaaattccggattttgatgttgacctcggaacaatcctcagagttaatgatgaatctactgagggcaaaacgtcttacagactcaccctggacattcagaacaagaaaattact

SEQ ID NO: 3698 - DNA, 522 bp, Homo sapiens; identical to SEQ ID NO: 2866

SEQ ID NO: 3699 - DNA, 634 bp, Homo sapiens
tggtacgcctgcaggtaccggtccggaattcccgggtcgacccacgcgtccgggctggtctcagactccttgccttaagcagtcctcccacctcagcctcctaaagtgctgggattacaagcgtgaagcattacatccaagtgaaacttcttgagatggttacataatgtctaaatctgctggtgtagaagttaataaagtgtagaactgaataactattaaatattagatcaagtttctcatgtttatcttaacgtataacgatttatcttaaagcactgattttcacaaaataacatcagtgtgaaattggaaaagaagccaaatattttatttcatgtatctgggaaatgaggtgctttagtcaactgaatctgcccaaaactaaaaagcattaattaaaaagtacttaactcagaaattataaaaataggagacatcaataaaatacattctacacagaatacgccaaccatacactactcttttttgataataaaaaatgtatttactgagccagttgtggtggctcacgcctataatcccagcaccttggaaggccaatgagagtggatcagttgaggccaggagtttgagaccagcctggccaacatggtgaaatgccgtctctact

SEQ ID NO: 3700 - DNA, 559 bp, Homo sapiens
tggtacgcctgcaggtaccggtccggaattcccgggtcgacccacgcgtccgcgatcagctggggaggaagaggatggcccagtcctgacggatgagcagaagtcccgaatccaggccatgaagcccatgaccaaggaggagtgggatgcccggcagagcatcatccgcaaggtggtggaccctgagacggggcgcaccaggcttattaagggagatggcgaggtcctagaggaaatcgtaaccaaagaacgacacagagagatcaacaagcaagccacccgaggggactgcctggccttccagatgcgagctgggttgcttccctgagggcccccgctggccaaggcctgtggacgacgctggcggcccagcctgggcaggtttcagggtgccagtgggaagcctgatgggtgctggtggcctttcccccgtggattggtctctggcccagcccagtctcttctcaggggcagggggtggaggttggggtcaccggcctgcttggcacccccatctgaaagagcagcacttctcagctattaaaggccccctggatag

SEQ ID NO: 3701 - DNA, 544 bp, Homo sapiens
cttcacaattgatgactttgagattgggcgtcctctgggcaaaggcaagtttggaaacgtgtacttggctcgggagaagaaaagccatttcatcgtggcgctcaaggtcctcttcaagtcccagatagagaaggagggcgtggagcatcagctgcgcagagagatcgaaatccaggcccacctgcaccatcccaacatcctgcgtctctacaactatttttatgaccggaggaggatctacttgattctagagtatgccccccgcggggagctctacaaggagctgcagaagagctgcacatttgacgagcagcgaacagccacgatcatggaggagttggcagatgctctaatgtactgccatgggaagaaggtgattcacagagacataaagccagaaaatctgctcttagggctcaagggagagctgaagattgctgacttcggctggtctgtgcatgcgccctccctgaggaggaagacaatgtgtggcaccctggactacctgcccccagagatgattgaggggcgcatgcacaatgag

SEQ ID NO: 3702 - DNA, 630 bp, Homo sapiens
gaatttggccctcgaggccaagaattcggcacgaggaaagaatgcagcaaaaagtaatgttacagtgttatgctttcagagccttgagatttctcttcagtatggaaagaaacagaccactcttttaaagacttttccccacagacttgtttgagatcttcattgacatagggcattatgtacgtgatatcagtgcttatgaagaattggtatccaagctgaatttattagtggaggatgaactgaagcaaattgctgaaaatattgaaagcattaatcagaacaaagctcctttgaaatatataggcaactatgcaattttggatcatcttggaagtggagcttttggctgtgtttacaaggttagaaagcatagtggtcaaaatcttttagcaatgaaagaggtcaatttacataacccagcatttgggaaggataagaaagatcgagacagcagcgtaaggaatattgtttctgaattaacaataattaaagagcagctttatcatcccaacattgtacgttattacaaaacatttctggaaaatgataggttgtacatagttatggagctgatagaaggagccccgcttggagagcatttcagttctttgaaggaaaaacatcacc

SEQ ID NO: 3703 - DNA, 789 bp, Homo sapiens
gatactggaaaagattggggaaggcacctacggaactgtgttcaaggccaaaaaccgggagactcatgagatcgtggctctgaaacgggtgaggctggatgacgatgatgagggtgtgccgagttccgccctccggagatctgcctactcaaggagctgaagcacaagaacatcgtcaggcttcatgacgtcctgcacagcgacaagaagctgactttggtttttgaattctgtgaccaggacctgaagaagtattttgacagttgcaatggtgacctcgatcctgagattgtaaagtcattcctcttccagctactaaaagggctgggattctgtcatagccgcaatgtgctacacagggacctgaagccccagaacctgctaataaacaggaatggggagctgaaattggctgattttggcctggctcgagcctttgggattcccgtccgctgttactcagctgaggtggtcacactgtggtaccgctcaccggatgtcctctttgggggcaagctgtactccacgtccatcgacatgtggtcagccggctgcatctttgcagagctggcccatgctgggcggcctcctttttccggcaatgatgtcgatgaccagttgaagaggatctttcgactgcttgtgacgccaccgaagaagcagtggcctctattgacaagctgccagactataagcccaaccggtgtacccggccacaacatcctggtgaagttgtgcccaaatccatgcacaaggagggattctgctgcaaacttctgaatgtaaccc

SEQ ID NO: 3704 - DNA, 576 bp, Homo sapiens
tggagaataaacacaaagcacaacataatctatgtaaatggctctgtacctggacataaaaattgcttagtaaaggtcaaagattctaaactgcctgcatataaggatctcggtaaaaatctaccattccctacatattttcctgatggagatgaagaggaactgccagaagatttgtatgatgaaaacgtgtgtcagcccggtgcgccttctattacatttgcctaacatctttggacgtggcagaaccttacatattctgtgagcttcgatgagccagagtgatatcataaccaccagaaatcatactctcctttcttagtcacaacaaaatcacacatgtcatctttgtcaagggcataaatatatcattcatacccccattaaattttgttagaaaaattaccacattaaatatatgagttaagtagattggatttgctgaaattggtgttgggcatattagcaaaatattcttaatttgtggactcgattcttttttactacatatttcccaagttatcttaagatgtctgtaaatttaacttttattaaagttttgtcaatctttgtgaa

SEQ ID NO: 3705 - DNA, 472 bp, Homo sapiens; identical to SEQ ID NO: 2515

SEQ ID NO: 3706 - DNA, 213 bp, Homo sapiens
  misc_feature 84: n = A,T,C or G
tgcagaaatggggagcacttgaggacacaggtgggtggaggccctttgtgcgtggctggtcgtattcgggcagccctccgtcgntttttataaaactttgtgtgagaagaatatattgataatgtcagtgaaacaagcagacattgaaatggaggcacagattactccacaaggagttcttctgtatattttttctagatgcaaatacctttt

SEQ ID NO: 3707 - DNA, 366 bp, Homo sapiens
taccggtccggaattcccgggtcgacccacgcgtccggttatatggagaaccaagacatactacgtatcgctcaagatcagatctggactatattaggtcccctttaccatttcagaataggtacccaggcactccagctgatttcaatcctggttctttagcatgttctcagcttcagaattacgatcctgacagagccctaacagattatatcactcggctagaggcactgcaaagacgacttggaactatacagtcaggttcaactactcaatttcatgctggcatgagaagataatcctttgaaacatcattaattgaagtgattttaaatagatttccttttgtaaatcaatggttctttt

SEQ ID NO: 3708 - DNA, 353 bp, Homo sapiens
cgaattcggctcgagcggctcgagcggctcgaggcacaatcatcactgattagaagatcacagcagaatacccttggattagagagaagttcgtaccttgcatttctctgaattctagtctctcataagcactgctttgctggatgattttcactgctttgtgttaatgactttgagcgatctctcacatgatggggttctttagtacatggtaacagccatgtcatcttacacacctagcattgtgaatgctgtagtgacatcctttataggcaccttacagctcaaaacttttgtttcatttcatgccttacttatcaaaaaggcaggaaagtaggtatgatctctaaagt

SEQ ID NO: 3709 - DNA, 247 bp, Homo sapiens
tggatcccccgggctgcaggaattcggcacgagatttaattagaaaagttattttcttttgttctgtatcaaactgcagaacagctatatacttggtattttgtacgtgaataacgttttagcttttgtgcccttttgagcttgaagggttatcctcaaaggggaaaactatgaaggggaagaagacaaacctaagataccataaagtaaaggttgacattacatattttcattcacaatgcccatt

SEQ ID NO: 3710 - DNA, 593 bp, Homo sapiens
catacaacatccagtgatgtctggagctttgggatactcatgtgggaagtgatgagttatggagaacggccttactgggacatgagtgagcaggaggtactaaatgcaatagagcaggagttccggctgcccccgcctccaggctgtcctcctggattacatctacttatgttggacacttggcagaaggaccgtgcccggcggcctcattttgaccagctggtggctgcatttgacaagatgatccgcaagccagataccctgcaggctggcggggacccaggggaaaggccttcccaggcccttctgacccctgtggccctggactttccttgtctggactcaccccaggcctggctttcagccattggactggagtgctaccaggacaacttctccaagtttggcctctgtaccttcagtgatgtggctcagctcagcctagaagacctgcctgccctgggcatcaccctggctggccaccagaagaagctgctgcaccacatccagctccttcagcaacacctgaggcagcagggctcagtggaggtctgagaatgacgatacccgtgactcagccctggacactggtc

SEQ ID NO: 3711 - DNA, 628 bp, Homo sapiens
atagggaatttggccctcgaggccaagaattcggcacgaggacgaggacccctgtcaggccatccgagaacttgcccgggaagtcgatcctgcttatatcaagattgaggaggtcattgggacaggctcttttggagaagtgcgccagggccgcctgcagccacggggacggagggagcagactgtggccatccaggccctgtgggccgggggcgccgaaagcctgcagatgaccttcctgggccgggccgcagtgctgggtcagttccagcaccccaacatcctgcggctggagggcgtggtcaccaagagccaacccctcatggtgctgacggagttcatggagcttggccccctggacagcttcctcaggcagcgggagggccagttcagcagcctgcagctggtggccatgcagcggggagtggctgctgccatgcagtacctgtccagctttgccttcgtccatcgctcgctgtctgcccacagcgtgctggtgaatagccacttggtgtgcaaggtggcccgtcttggccacagtcctcagggcccaagttgtttgcttcgctgggcagccccagaggtcattgcacatggaaagcatacaacatccagtgatgtctggagc

SEQ ID NO: 3712 - DNA, 557 bp, Homo sapiens
cggcacgagtattatagcaggccaagataaaattttgacagctctttaagcccacatgcagcagtgggtcagataaccctgtggcagtgacacgggcaaattggcatttgaataaagccctgggaccacctcaacatgcgtagcctcttgtcttaaatgtactccccatggcagcatggagggaggcaagacctgtgggtcaattttgaactggccttactttgatttttaaaacaagagactcagggaaagtactaaaccaaaatctctgattttactttgcgttttctgtagtttttgttttactgagatgcttttgtaaaggaaaataatactgtgacagtttagtaattctacagattcttaatatttctccatcatggccttttacttcaattttctgaagtctgaattcaattacaatttttttttaccaatttaatctcaaatgttgtttaactgctttaaattcatatacgtagagtattataaactgcagagatgaaaaatgtgttttcacgggatttatattgtgaactaaactaagcctacttttt

SEQ ID NO: 3713 - DNA, 537 bp, Homo sapiens
tcttcaaacaccttctttcaattcatcctgagtgactttgtaagggagatttttagccaaaagtgttctcgcatctcgctctttcttactgtcttttccttttggtttctctagtttaatttcattgccaaagactttcaaaccagtgagttccaacgctttctccaggtcttcagcagggatgggaaaagtaaagggattgcttatattgaatttaagacagaagctgatgcagagaaaacctttgaagaaaagcagggaacagagatcgatgggcgatctatttccctgtactatactggagagaaaggtcaaaatcaagactatagaggtggaaagaatagcacttggagtggtgaatcaaaaactctggttttaagcaacctctcctacagtgcaacagaagaaactcttcaggaagtatttgagaaagcaacttttatcaaagtaccccagaaccaaaatggcaaatctaaagggtatgcatttatagagtttgcttcattcgaagacgctaaagaagctttaaattcctgt

SEQ ID NO: 3714 - DNA, 237 bp, Homo sapiens
tagtggatcccccgggctgcaggaattcggcacgaggtgcttagccctgcaatatcagggcctcactggtgggagctgcctcgggctgggttgcttggtcatagagccatagaaggaagctgtcagcccggagtgcctgccacctagacactgatgccattgtgtgctgcctcaagactgctggagtcaggacattttatagagccttttccagttttactaaaaaatttttccatt

SEQ ID NO: 3715 - DNA, 502 bp, Homo sapiens
tggtacgcctgcaggtaccggtccggaattcccgggtcgacccacgcgtccgtggaaatcagttgtgtttggcaggagaatcaataaaaatctttgattcagacagcttatggggtattttaagcattcttagactagttgaacatctcactttgccccagttacaaaaatagtagaacaagcaacataaaacaatgaaggaaaacctcacttgaaggcccaggtcaacatctaagcctgttgagacttagataatcgagtctacctcttcagtaggtttgtgtggatggcctggagggcaggtgccctctgctccccagtgctacctctctcttccctagggccttttgtggattgacagtagtcccctccgtaggagctcacagtctagattagaagtgttttaatttctacacacccatagtgcacacttgtatattgaaaagatagggaagagagaaacatttatggaatcagtcgttggcacccttcatacttcatg

SEQ ID NO: 3716 - DNA, 533 bp, Homo sapiens
tggtacgcctgcaggtaccggtccggaattcccgggtcgacccacgcgtccgctctatataataggtaccaccgataatgctattagcccaaaccgtgggtgttttctaaatattaataggggggcttgattcaacaaagccacagacttaacgttgaaattttcttcaggaattttctagtaacccaggtctaaagtagctacagaaaggggaatattatgtgtgattatttttcttcttatgctatatccccaagtttttcagactcatttaagtaaaggctagagtgagtaaggaatagagccaaatgaggtaggtgtctgagccatgaagtataaatactgaaagatgtcacttttattcaggaaatagggggagattcaagtcgtatagattcctactcgaaaatcttgacacctgactttccaggatgcacattttcatacgtagaccagtttcctcttggtttcttcagttaagtcaaaacaacacgttcctctttccccatatattcatatatttttgctcgtta

SEQ ID NO: 3717 - DNA, 519 bp, Homo sapiens
tggtacgcctgcaggtaccggtccggaattcccgggtcgacccacgcgtccggtgaagagggagctctattgccaccatgagtttctccggcaagtaccaactgcagagccaggaaaactttgaagccttcatgaaggcaatcggtctgccggaagagctcatccagaaggggaaggatatcaagggggtgtcggaaatcgtgcagaatgggaagcacttcaagttcaccatcaccgctgggtccaaagtgatccaaaacgaattcacggtgggggaggaatgtgagctggagacaatgacaggggagaaagtcaagacagtggttcagttggaaggtgacaataaactggtgacagctttcaaaaacatcaagtctgtgaccgaactcaacggcgacataatcaccaataccatgacattgggtgacattgtcttcaagagaatcagcaagagaatttaaacaagtctgcatttcatattattttagtgtgtaaaattaatgtaataaagtgaacttt

SEQ ID NO: 3718 - DNA, 406 bp, Homo sapiens; identical to SEQ ID NO: 2719

SEQ ID NO: 3719 - DNA, 671 bp, Homo sapiens
  misc_feature 120: n = A,T,C or G
ttttctgaatcaaagatttttattgattctcctgccaaacacaactgatttccatctacaattactttttaaggtaagaaacagtaagtcaactgaacaaagagctgggctttgggcctnggaacgtgattacacaccgactgagaaatgcaggacctcagggtggggtctagtcaggctggccgcagcagggcacgaacctgcctcagtgggccttctccaagaacgctctgcagcacctgacacactgctggtacaccgtctcaaagtcagagtcattcccataatagggatcttcaataataagttgtttttgtggatcatagctcccaagtagttcaattttagctttgcaggttttaacttgattactttttctattcaaatctctcagattgctttcatccatacatagtatataatcaaatgtggcaaaatcttctttggtaatctgccgggcaacgtggctcatgggaatgccgtgcctcttcatgcagctctgccctcggtagtcaggggggttcctatctcatacccggaagttgccgcgctgtctaccctccaattctctgagatgttttgatcggttacaagtttcctgaaaactgcttctgcaatgggtgatcgacaatgttacccagacacccaaacagcacggacttggtagcctg

SEQ ID NO: 3720 - DNA, 103 bp, Homo sapiens
actccagctgaggactggtggggactgtgtgtgctgctctacaagatgctggttggcgagtccccattcccaggggatgatgaggaggaggtcttccacagca

SEQ ID NO: 3721 - DNA, 468 bp, Homo sapiens
  misc_feature 48: n = A,T,C or G
taccggtccggaattcccgggtcgacccacgcgtccgggcactgtggngaacagacacagagatggagaagcagggacatgctgagaggacgaagccaaggaaattagggaggagagtcaaagggatcaaggagagttggggatttgagctgcagcagagagggatgagggatttagccctctgccctaaggtgccattgaaaagggacaggacccttcggaggtgcctgtgaggagaggggagcaggacctctccctcctccagatccctgcctcctagtgccagcccctcacacgccttcatagctgaaacaggaagaggacggcaccaagttgggggtgctggatgaaagagacgaggggtgatctgtgagtcccatgtaaactttgtacattggaatatttatgtttgtgtacatatttgatgtgtgtgtgtatgatgagccaataaaccagactgtgtgcgtg

SEQ ID NO: 3722 - DNA, 51 bp, Homo sapiens
tggtacgcctgcaggtaccggtccggaattcccgggtcgacccacgcgtcc

SEQ ID NO: 3723 - DNA, 413 bp, Homo sapiens
ctggtacgcctgcaggtaccggtccggaattcccgggtcgacccacgcgtccgggagcctggacactgccatctctagagcagagtggaggcctggactccctttgctcactccattcgggtccacagctgaggttgcctctgacaagatgaatgggcactgcctgcccttctagtgaaaaggcttggctatggccctgtgtgactccaggtcccaggaaccttgccttcgtcatctgtggatccatccagaacagcggtatctgaagcccaggccatactccctgcctcctttcttctgcctaccagaggctccagagttgagcttgtccttatctagaaacatgtgaagatgcccaagagcctggaggcactgctgtccttcctgcagaaacagtttctcctcctcccctc

SEQ ID NO: 3724 - DNA, 227 bp, Homo sapiens
tcctttattggctctgcgcgggagcagttacttgaagctctccaggacttgggactgctgcagtctggctctatttcaggccttaagattccagctcatcactagaggcagccctccatggacccatgaaaactgagatgaggaccttggtactagggagggagggaaggacgtgggaatgttttcttattggatctgagagatgatacatgataccagatgaaaag

SEQ ID NO: 3725 - DNA, 466 bp, Homo sapiens
  misc_feature 4, 75, 79, 450: n = A,T,C or G
aganaaacgcagtaccatggtcggaacgccatactggatggcaccagagttggttacacggaaagcttatggccntaangtcgacatatggtctctgggtatcatggctattgagatggtagaaggagagcctccatacctcaatgaaaatcccttgagggccttgtacctaatagcaactaatggaaccccagaacttcagaatccagagaaactttccccaatatttcgggatttcttaaatcgatgtttggaaatggatgtggaaaaaaggggttcagccaaagaattattacagcatcctttcctgaaactggccaaaccgttatctagcttgacaccactgatcatggcagctaaaagaagcaaatgaagagtaaccgttaacatcactgctgtggcctcatactcttttttccattttctacaagaagccttttagtatatganaattattactcttttg

SEQ ID NO: 3726 - DNA, 463 bp, Homo sapiens
tggccctcgaggccaagaattcggcacgaggatgctatatcttattgccataaactccatgtggttcacagagacttaaaaccagagaatgtagtcttctttgaaaaacaaggtcttgtaaagttgacagactttgggttcagcaacaaatttcaaccagggaagaagctcactacaagctgtggatctcttgcatattccgctccagaaattctgcttggtgatgagtatgatgcacctgcagtaggtaggtaacctcggtccagtatttggccatttgaattctgccagctagagttggtcagatcggttgtttatctaaaaatgatttctagagaatttctgttaaattggccttaactagcaaattgggtttcataaatgccatatatgcctaaagctggcatttcgtttatttcaacctttagatggcaaatgtctaaagtatatttgtgagtacaaa

SEQ ID NO: 3727 - DNA, 465 bp, Homo sapiens; identical to SEQ ID NO: 946

SEQ ID NO: 3728 - DNA, 438 bp, Homo sapiens
gcctgcaggtacccggtccggaaattcccgggtcgacccacgcgtccgaaaataagatgaagttagacaactttagattttgtgtggtgtgtacatctatgtgcacagtatgtaaattatcttttattgtattgcttaatagaataaagaagtagaaatttaattcctgtgtgtctatacaatattatagcacatcataaacttaaaaccttatttaaatattcctttctgaattctttcctgtaatcatacatgtatcatcaggtatttgacttgtgctggagtttgaatttgtgatatctgtattctgtagttttatctgaataaaggagaaatatatatgagaaaataaaagtatgaagtaactagttatatgagaaattaatcgtaattctgaacctttattgaaaattgatgttccaaaggttttatctttgg

SEQ ID NO: 3729 - DNA, 551 bp, Homo sapiens
tggtacgcctgcaggtaccggtccggaattcccgggtcgacccacgcgtccggcaaagactaccgagtattgcccaggataggctatctttgtccaaaggatttaaagcctgtctgtggtgacgatggccaaacctacaacaatccttgcatgctctgtcatgaaaacctgatacgccaaacaaatacacacatccgcagtacagggaagtgtgaggagagcagcaccccaggaaccaccgcagccagcatgcccccgtctgacgaatgacaggaagattgttgaaagccatgagggaaaaaataaaccccagttctgaatcacctaccttcaccatctgtatatacaaagaattcttcggagcttgtcttatttgctatagaaaacaatacagagcttttgggaatggactcactgattttcagtcttttccatctctttcctcctagactctgtgatctgagggtataaagacatctccaccaagtctgagccctcaaaatgtcctgattacaatgctgtctgtccaactgcctgttcaataaagtaaa

SEQ ID NO: 3730 - DNA, 609 bp, Homo sapiens
ccgcaccaatttgcgcgctctctttctgctgctccccagctctcggatacagccgacaccatgggtttcggagacctgaaaagccctgccggcctccaggtgctcaacgattacctggcggacaagagctacatcgaggggtatgtgccatcacaagcagatgtggcagtatttgaagccgtgtccagcccaccgcctgccgacttgtgtcatgccctacgttggtataatcacatcaagtcttacgaaaaggaaaaggccagcctgccaggagtgaagaaagctttgggcaaatatggtcctgccgatgtggaagacactacaggaagtggagctacagatagtaaagatgatgatgacattgacctctttggatctgatgatgaggaggaaagtgaagaagcaaagaggctaagggaagaacgtcttgcacaatatgaatcaaagaaagccaaaaaacctgcacttgttgccaagtcttccatcttactagatgtgaaaccttgggatgatgagacagatatggcgaaattagaggagtgcgtcagaagcattcaagcagacggcttagtctggggctcatctaaactagttccagtgggatacgga

SEQ ID NO: 3731 - DNA, 759 bp, Homo sapiens
  misc_feature 498, 730: n = A,T,C or G
ttgaaagaatcactgttataataactttaatttatcttgcattttacagaagtctatgaacgattttaaaaaagcacctccttaccccatatcacgtttctctgacaggtgttaaagtaggcaatgagtatgtcaacagcttgagcatcagcgtcttgcaaggacttcagaccaaccactcgccaaaaatcttggcagcttttttatcttgtttttaatacaacggtatatccactctgatggcaaacctgtccagccacatctccacaacaagctttgcaaaatcagtgattagcaaattagttagctttggcacggagctgtgctcgcttgcccgtgacagcctggaagccggttttgatactggcaacagaacatctagaatgacaagtttcgcactgtaggaaatagagtcgtgtgtccttctgcaggattgtgtccggtgatcggcatgtgtgacaagtgacatattccttgatatatcttctcaagacattntctatctgtttctgttggaatcttcctttgattacaagttggttattaccatctatagaaccacttgtacccaattcagccaacaaaaatgcaaggagatgtttgggctgacgatgtaatagtttacagatatctgtaaagttgacaaaagaagttttcttggttcctactccgacgactggtggaggttcatgacaaatttccttttctcccccacaaccatttctggaancttttccttcatgatgttgaacactcgat

SEQ ID NO: 3732 - DNA, 687 bp, Homo sapiens
gaatttggccctcgaggccaagaattcggcacgaggagcatcgtgtgtcgatttgtccaggatcactttgaccacaacatcagccctactattggggcatcttttatgaccaaaactgtgccttgtggaaatgaacttcacaagttcctcatctgggacactgctggtcaggaacggtttcattcattggctcccatgtactatcgaggctcagctgcagctgttatcgtgtatgatattaccaagcaggattcattttataccttgaagaaatgggtcaaggagctgaaagaacatggtccagaaaacattgtaatggccatcgctggaaacaagtgcgacctctcagatattagggaggttcccctgaaggatgctaaggaatacgctgaatccataggtgccatcgtggttgagacaagtgcaaaaaatgctattaatatcgaagagctctttcaaggaatcagccgccagatcccacccttggacccccatgaaaatggaaacaatggaacaatcaaagttgagaagccaaccatgcaagccagccgccggtgctgttgacccaagggccgtggtccacggtacttgaagaagccagagcccacatcctgtgcactgctgaaggaccctacgctcggtggcctggcacctcactttgagaagagtgagcacactggctttgca

SEQ ID NO: 3733 - DNA, 465 bp, Homo sapiens
tggtacgcctgcaggtaccggtccggaattcccgggtcgacccacgcgtccgagaagatatgaggctaagagaatatcaagtccccaggtctggaagaaaagtagaaaagagtagtacttttaccactttcatgacattggacaatagtgggaaccagtgtgctttgaaaccaaattagaaacacattccttgggaaggcaaagttttctgggacttgatcatacattttatatggttgggacttctctcttcgggagatgatatcttgtttaaggagacctcttttcagttcatcaagttcatcagatatttgagtgcccactctgtgcccaaataaatatgagctggggattaaatacgaataagacatggtttctgccatcaaagatggctggtgggagagagagatacacccttattaagtgctttgtgttagtttattcatagctattgttatatatgtc

SEQ ID NO: 3734 - DNA, 424 bp, Homo sapiens
tggtacgcctgcaggtaccggtccggaattcccgggtcgacccacgcgtccggcgctcacggccttcgctggtctctacgtggcactcgcggttggagtcagcgaggagagcgaggcctggatcctggcagtggccaccggcctgttcctctacgtagcactctgcgacatgctcccggcgatgttgaaagtacgggacccgcggccctggctcctcttcctgctgcacaacgtgggcctgctgggcggctggaccgtcctgctgctgctgtccctgtacgaggatgacatcaccttctgataccctgccctagtcccccacctttgacttaagatcccacacctcacaaacctacagcccagaaaccagaagcccctatagaggccccagtcccaactccagtaaagacactcttgtccttgg

SEQ ID NO: 3735 - DNA, 407 bp, Homo sapiens
tggtacgcctgcaggtaccggtccggaattcccgggtcgacccacgcgtccggccctgggtgaggaagtagcattgctgctggatgagaaacgcctgcgctgctctgttagactggtgctgaaacaaaaggttaaggctaggttgaagtctagaatgaaagaaatctgaatccatgtcattcataaccccttgatctgtagtgtcatgggtgctgccgcaggcagggagtgagctgggggtgcctgcagccttccactcctgccccgcctcaccccacatgctccctgtttctcatgctttctctaacttcctcaccccttaaccaaaaaggtgtgttttcttttgtgcatatagccattcttaaatatcagtgatgtaaacctcactttattaaaaattatccagc

SEQ ID NO: 3736 - DNA, 598 bp, Homo sapiens
taccggtccggaattcccgggtcgacccacgcgtccggccgtccagtcctgatagtctgtggatttcggatccttctcaggaagcttcatgtctaatggagactataattataactcctgttctgcatagagcatttgcatcaaaggctttccatacccctccctcccctggtcctcataagatccttgaagcaggttcctattcctcattggcaacatggcaaacagatcacaggagtcaaagggccttgctcaaggtccccagcttcagccccaggccctaagccagcgtcagaacagtcaatctgcatttttcatcagtcattctatagtgacatcatcccagactgccttctgtattcccctgagtacagtctccttctgtttctaggtttagaagttcagaggtgactgtgtttctccatttccacagccaaatgggggaagaggtgaggctaggggagtgctgtgctgattctccagccatggtcagacaggtcacccaggagcctcgaggaaagccctggagggaatcacatgtgtactttttcatgaagctttttgcaaagcacatctgtgatacactagtttattgaac

SEQ ID NO: 3737 - DNA, 443 bp, Homo sapiens
ctgtgactgtttttctctgtttcacgttcgttgagtgtaagcaatgaaaatgtcccaaataagttttttaagttttactttaataagattaatttcagtaaacattctagttgttcagtgtaacctttttatcttgatgcattgtaagtaaaatgaatcatttactcttgaaatgccagtcattgactgatgtagataatttaggattttcatataaaaatagctgtttaggaaggtgaaatacattcactgtctctgttggtggtacatcttgttgaattcaatattagaaagtatttctttttggggtaatataacttagaattaaatccctgtttctctatgtagtctggcagtataaatataaatatttaccatataatcttggaataagtattagttaatgttaccaaaatctgtattaaataatgttttcaaatgct

SEQ ID NO: 3738 - DNA, 489 bp, Homo sapiens
gctgcttcagagtccagattaaggaaggagaggcctgggcagtcagaaaggaagagaagccggatgtggtggcttgtatcttcaatcccagcactttgagaggccaaggtgggaggatcacttgagcccaggagttcaaaaccagcttgggcaacatagtgagactcccatctctccaaaaaaatttaaaaaccagccaggtagactgggcgcagtggctcacgcctgtaatcccagaactttgggaggccgaggcaggcagatcacgaggtcaagagttagagaccagcctgaccaacatggtgaaaccccgtctctactaaaaatacaaaacttagccaggcctgtggtgatgcgcacctgtagtctcagctactcaggaggctgaggcaggagaatcgcttgaacccgggaggcagaggttgcactgagctgagatcacgccactgcactccagcctgggcaacagagtgagactccgtctcaaac

SEQ ID NO: 3739 - DNA, 420 bp, Homo sapiens
gggcttccgccacggccgtctctggagagcagcagccatggccctacgctaccctatggccgtgggcctcaacaagggccacaaagtgaccaagaacgtgagcaagcccaggcacagccgacgccgcgggcgtctgaccaaacacaccaagttcgtgcgggacctgattcgggaggtgtgtggctttgccccgtacgagcggcgcgccatggagttactgaaggtctccaaggacaaacgggccctcaaatttatcaagaaaagggtggggacgcacatccgcgccaagaggaagcgggaggagctgagcaacgtactggccgccatgaggaaagctgctgccaagaaagactgagcccctcccctgccctctccctgaaataaagaacagcttgacagaagccctggctctcctgctgt

SEQ ID NO: 3740 - DNA, 315 bp, Homo sapiens; identical to SEQ ID NO: 340

SEQ ID NO: 3741 - DNA, 493 bp, Homo sapiens
gagtaacccgaccgccgctggtcttcgctggacaccatgaatcacactgtccaaaccttcttctctcctgtcaacagtggccagccccccaactatgagatgctcaaggaggagcacgaggtggctgtgctgggggcgccccacaaccctgctcccccgacgtccaccgtgatccacatccgcagcgagacctccgtgcccgaccatgtcgtctggtccctgttcaacaccctcttcatgaacccctgctgcctgggcttcatagcattcgcctactccgtgaagtctagggacaggaagatggttggcgatgtgaccggtgcccaggcctatgcctccaccgccaagtgcctgaacatctgggccctgattctgggcatcctcatgaccattctgctcatcgtcatcccagtgctgatcttccaggcctatggatagatcacgaggcatcactgaggccaggagctctgcccatgacctgtatcccacgtac

SEQ ID NO: 3742 - DNA, 336 bp, Homo sapiens
ggacagggccgggtccgaggccgcggagctcgcggaggcaaggccgacgataaggagtggatgcccgtcaccaagttgggccgcttggtcaaggacatgaagatcaagtccctggaggagatctatctcttctccctgcccattaaggaatcagagatcattgatttcttcctgggggcctctctcaaggatgaggttttgaagattatgccagtgcataagcagacccgtgccggccagcgcaccaggttcaaggcatttgttgctatcggggactacaatggccacgtcggtctgggtgttaagtgctccaaggaggtggccaccgccatccgt

SEQ ID NO: 3743 - DNA, 369 bp, Homo sapiens
gtctcttttccggttagcgcggcgtgagaagccatgagcagcaaagtctctcgcgacccctgtacgaggcggtgcgggaagtcctgcgcgggaaccagcgcacgcgccgcaagttcctggagacggcggagttgcatatcagcttgaagaactatgatccccagaaggacaagcgcttctcgggcaccgtcaggcttaagtccactccccgccctaagttctctgtgtgtgtcctgggggaccagcagcactgtgacgaggctaaggccgtggatatcccccacatggacatcgaggcgctgaataaactcaacatgaataaaaaactggtcaagaagctggccaagaagtatgatgcgtttttggcct

SEQ ID NO: 3744 - DNA, 125 bp, Homo sapiens
cactaagctgtttgccttccaaagtgtttacaccttaagccttaacatgtatcttcattcagaaaacagttatattgtcataccatagtagggaagaaaaacctttatttggaatatacactact

SEQ ID NO: 3745 - DNA, 196 bp, Homo sapiens
ttctgaatgtgatctctcacgcccgtctctggcagaccactgaggaaatccccaacagagagacctactgcccggtcatagaggacaacctaatacagctgtgtaaatctcagattctcaagcatacttctctggccaggaggatctgtgtccaaaactccacgttttctgctacctggaaccgatagtctcttct

SEQ ID NO: 3746 - DNA, 333 bp, Homo sapiens
gagccagcctgacattagacagaataccctttgttatacattaggaaatttttactcatgcctttttgtttaggataaataggtaagcacaaagagctcttcaaaatcagaaaaaacaataggagtccttccttgtcttttctgtgatctctgtccttgtttctgagactttctctaccattaagctctatttcagctttcagatattctagtttgtttcccatggaatctgtcctaaactggtgtttttgtcagtgacagtcttgccagtcagcaattgctaacagcattataaatgagtttgatgtacagtaaatattgatgacaatgaca

SEQ ID NO: 3747 - DNA, 467 bp, Homo sapiens
gactcagaagtcagagttgagagacagaggcaccccggacagagacgtgaagcactgaataaatagatcagaatgactgaaaaagccccagagccacatgtggaggaggatgacgatgatgagctggacagcaagctcaattataagcctccaccacagaagtccctgaaagagctgcaggaaatggacaaagatgatgagagtctaattaagtacaagaaaacgctgctgggagatggtcctgtggtgacagatccgaaagcccccaatgtcgttgtcacccggctcaccctggtttgtgagagtgccccgggaccaatcaccatggaccttactggagatctggaagccctcaaaaaggaaaccattgtgttaaaggaaggttctgaatatagagtcaaaattcacttcaaagtgaacagggatattgtgtcaggcctgaaatacgttcagcacacctacaggac

SEQ ID NO: 3748 - DNA, 446 bp, Homo sapiens
acgccgtggagggacgagacctgaccttgcagtacaacatctacaatgttggctcaagtgctgcattagacgtggaactatctgatgattccttccctccagaagactttggcattgtgtctggaatgctcaatgtcaaatgggaccggattgcccctgctagcaatgtctcccacactgtggtcctgcgccctctcaaggctggttatttcaactttacctcggcaacaattacttacctggcccaggaggatgggcccgttgtgattggctctaccagtgcacctggacagggaggaatcctggctcagcgggagtttgacaggcgattctcccctcattttctggactgggcagcctttggggtcatgacccttccctccatcggcatccccctgctattgtggtactccagcaagaggaaatatgacactcccaaaacgaag

SEQ ID NO: 3749 - DNA, 342 bp, Homo sapiens
caggtgatttaataataatttaaaactactatagaaactgcagagcaaaggaagtggcttaatgatcctgaagggatttcttctgatggtagcttttgtattatcaagtaagattctattttcagttgtgtgtaagcaagtttttttttagtgtaggagaaatacttttccattgtttaactgcaaaacaagatgttaaggtatgcttcaaaaattttgtaaattgtttattttaaacttatctgtttgtaaattgtaactgattaagaattgtgatagttcagcttgaatgtctcttagagggtgggcttttgttgatgagggaggggaaacttttttttt

SEQ ID NO: 3750 - DNA, 378 bp, Homo sapiens
gaggcattgaggcagccagcgcaggggcttctgctgagggggcaggcggagcttgaggaaaccgcagataagtttttttctctttgaaagatagagattaatacaactacttaaaaaatatagtcaataggttactaagatattgcttagcgttaagtttttaacgtaattttaatagcttaagattttaagagaaaatatgaagacttagaagagtagcatgaggaaggaaaagataaaaggtttctaaaacatgacggaggttgagatgaagcttcttcatggagtaaaaaatgtatttaaaagaaaattgagagaaaggactacagagccccgaattaataccaatagaagggcaatgcttttagattaaaatga

SEQ ID NO: 3751 - DNA, 355 bp, Homo sapiens
atttctgtggatcccagcttggttccaggaattttgtgtgattggcttaaatccagttttcaatcttcgacagctgggctggaacgtgaactcagtagctgaacctgtctgacccggtcacgttcttggatcctcagaactctttgctcttgtcggggtgggggtgggaactcacgtggggagcggtggctgagaaaatgtaaggattctggaatacatattccatgggactttccttccctctcctgcttcctcttttcctgctccctaacctttcgccgaatggggcagcaccactgacgtttctgggcggccagtgcggctgccaggttcctgtactactgccttgtacttt

SEQ ID NO: 3752 - DNA, 518 bp, Homo sapiens; identical to SEQ ID NO: 2824

SEQ ID NO: 3753 - DNA, 491 bp, Homo sapiens
gatagccgcagcctctgcgcgtcgccctccacggttaccccggctctccgcccctccttctcgcggcgctcgagggaccatggccgatcctcgcgtgagacagatcaagatcaagaccggcgtggtgaagcggttggtcaaagaaaaagtgatgtatgaaaaagaggcaaaacaacaagaagaaaagattgaaaaaatgagagctgaagacggtgaaaattatgacattaaaaagcaggcagagatcctacaagaatccaggatgatgatcccagattgccagcgcaagttggaagccgcatatttggatcttcaacggatactagaaaatgaaaaagacttggaagaagctgaggaatataaagaagcacgtttagtactggattcagtgaagttagaagcctgaaacttttctcgtatggggtggtttttgcattaaatcctggggtccattttacaatccattatttttgaccactgctatgtgttca

SEQ ID NO: 3754 - DNA, 491 bp, Homo sapiens
gatccctgactcggggtcgcctttggagcagagaggaggtaatggccaccatggagaacaaggtgatctgcgccctggtcctggtgtccatgctggccctcggcaccctggccgaggcccagacagagacgtgtacagtggccccccgtgaaagacagaattgtggttttcctggtgtcacgccctcccagtgtgcaaataagggctgctgtttcgacgacaccgttcgtggggtcccctggtgcttctatcctaataccatcgacgtccctccagaagaggagtgtgaattttagacacttctgcagggatctgcctgcatcctgacgcggtgccgtccccagcacggtgattagtcccagagctcggctgccacctccaccggacacctcagacacgcttctgcagctgtgcctcggctcacaacacagattgactgctctgactttgactactcaaaattggcctaaaaattaaaagggatcgatacc

SEQ ID NO: 3755 - DNA, 511 bp, Homo sapiens
acagaaggggccctcttttccgtggcgcctcggaggcgttcagctgcttcaagatgaagctgaacatctccttcccagccactggctgccagaaactcattgaagtggacgatgaacgcaaacttcgtactttctatgagaagcgtatggccacagaagttgctgctgacgctctgggtgaagaatggaagggttatgtggtccgaatcagtggtgggaacgacaaacaaggtttccccatgaagcagggtgtcttgacccatggccgtgtccgcctgctactgagtaaggggcattcctgttacagaccaaggagaactggagaaagaaagagaaaatcagttcgtggttgcattgtggatgcaaatctgagcgttctcaacttggttattgtaaaaaaaggagagaaggatattcctggactgactgatactacagtgcctcgccgcctgggccccaaaagagctagcagaatccgcaaacttttcaatctctctaaagaagatgatgt

SEQ ID NO: 3756 - DNA, 497 bp, Homo sapiens
tcatcgacaaagaatctgaagtttacaagatgcttcaggagaaacaggagttgaatgagcccccgaaacagtccacgtctttcttggttttgcaggaaatcctggagtctgaagaaaaaggggatcccaacaagccctcaggattcagaagtgttaaagctcctgtcactaaagtggctgcgtcgattggaaatgctcagaagttgcctatgtgtgacaaatgtggcactgggattgttggtgtgtttgtgaagctgcgggaccgtcaccgccatcctgagtgttatgtgtgcactgactgtggcaccaacctgaaacagaagggccatttctttgtggaggatcaaatctactgtgagaagcatgcccgggagcgagtcacaccacctgagggttatgaagtggtcactgtgttccccaagtgagccagcagatctgaccactgttctccagcaggcctctgctgcagctttttctctcagtgttctggccctctc

SEQ ID NO: 3757 - DNA, 490 bp, Homo sapiens
tagcaggggacctcctcgcccacgacctgccccagcatttggagaggctgaagataaagaaaatcagcaagccaccagtggtccaaaccagccgtctgttcgccgtggataccggcgtccctacaattaccggcgtcgcccgcgtcctcctaacgctccttcacaagatggcaaagaggccaaggcaggtgaagcaccaactgagaaccctgctccacccacccagcagagcagtgctgagtaacaccaggctcctcaggcaccttcaccatcggcaggtgacctaaagaattaatgaccattcagaaataaagcaaaaagcaggccacaaccttaaccaacaccaaagaaacatccaagcaataaagtggaagactaaccaagatttggacattggaatgtttactgttattctttaagaaacaactacaaaaagaaaatgtcaacaaatttttccagcaagctgagaacctgggaattcctgcacgga

SEQ ID NO: 3758 - DNA, 487 bp, Homo sapiens; identical to SEQ ID NO: 2786

SEQ ID NO: 3759 - DNA, 523 bp, Homo sapiens; identical to SEQ ID NO: 959

SEQ ID NO: 3760 - DNA, 271 bp, Homo sapiens; identical to SEQ ID NO: 2516

SEQ ID NO: 3761 - DNA, 534 bp, Homo sapiens
acagaaggggggtggtgctgctgctgcttctgaggcactggggctggggcctgtgccttatcggctggaacgagttcatcctgcagcccatccacaacctgctcatgggtgacaccaaggagcagcgcatcctgaaccatgtgctgcagcatgcggagcccgggaacgcacagagcgtgctggaggccattgacacctactgcgagcagaaggagtgggccatgaacgtgggcgacaagaaaggcaagatcgtggacgccgtgattcaggagcaccagccctccgtgctgctggagctgggggcctactgtggctactcagctgtgcgcatggcccgcctgctgtcaccaggggcgaggctcatcaccatcgagatcaaccccgactgtgccgccatcacccagcggatggtggatttcgctggcatgaaggacaaggtcacccttgtggttggagcgtccccggacatcatcccccagctgaagaagaagtatgatgtggacacactggacatggtcttcctcgaccactgga

SEQ ID NO: 3762 - DNA, 353 bp, Homo sapiens
gaagggcagcactcaaaactcagggtcaagttttaacaaaagaggtatgtagtcacagtaaatactaagatggcatttctatctcagagggccaaagtgaatcacaccagtttctgaaggtcctaaaaatagctcagatgtcctaatgaacatgcacctacatttaataggagtacaataaaactgttgtcagcttttgttttacagagaacgctagatattaagaattttgaaatggatcatttctacttgctgtgcattttaaccaataatctgatgaatatagaaaaaaatgatccaaaatatggatatgattggatgtatgtaacacatacatggagtatggaggaaat

SEQ ID NO: 3763 - DNA, 315 bp, Homo sapiens
ctctctggcgtggtgaccaagatgaagatgcagaggaccattgtcatccgccgagactatctgcactacatccgcaagtacaaccgcttcgagaagcgccacaagaacatgtctgtacacctgtccccctgcttcagggacgtccagatcggtgacatcgtcacagtgggcgagtgccggcctctgagcaagacagtgcgcttcaacgtgctcaaggtcaccaaggctgccggcaccaagaagcagttccagaagttctgaggctggacatcggcccgctccccacaatgaaataaagttattttctcattcaca

SEQ ID NO: 3764 - DNA, 241 bp, Homo sapiens
ggaattgcaaagaacctgctctacgcgcctctcggtgctccaaatggacatcacgaggccagtgcagataaaagatgcttacagcaaggttgcagcaatgctgcaggacagaggactgtgggctgtgatcaacactgctggggtgcttggctttccaactgatggggagcttcttcttatgactgactacaaacaatgcatggccgtgaacttctttggaactgtggaggtcacaaagacc

SEQ ID NO: 3765 - DNA, 401 bp, Homo sapiens
gaagggggagggtagccatgacggcctacgtgctgcgaagtatctcgctagccctgcgcccgactagcgggcttctgggaacttggcagacgcagcttagagagactcaccagcgagcgtcattgttgtctttctgggaactcattcccatgagatcagaacctcttcgaaaaaagaagaaggtagatcctaaaaaagaccaagaagcaaaggagcgcttgaaaaggaagatccgaaaactggaaaaggctactcaagagctaattcctattgaagattttattacccctctaaagttcttggataaagcaagagagcggcctcaggtggagctcacctttgaggagactgagaggagagctctgcttctgaagaagtggtccttgtacaagcagcaagag

SEQ ID NO: 3766 - DNA, 335 bp, Homo sapiens
gaaaaaatcaaagcctggtccctagcgaagaaagcgctttaatgtgctcctcccgctcccgggtgcgagattcctgcccagctactaggccacgactggctggtacaggacgagaacgtgcgcggggtgatcaccatgaacgaggagtacgagacgaggttcctgtgcaactcttcacaggagtggaagagactaggagtcgagcagctgcggctcagcacagtagacatgactgggatcccaccttggacaacctccagaagggagtccaatttgctctcaagtaccagtcgctgggccagtgtgtttacgtgcattgtaaggctgggcgctcc

SEQ ID NO: 3767 - DNA, 444 bp, Homo sapiens
gagtcagtctcagtcaggacacagcatggacatgggggtccccgctcagctcctggggctcctgctactctggctccgaggttccagatgtgacatccagatgacccagtctccctcctccctgtctgcatctgtgggagacagagtcatcatgacttgccggacaagtcactatataagcagttatttaaattggtatcagcagataccagggacagcccctaagctcctgatctatgctgcatccagtttgcaaagtggggtcccatcaaggttcagtggcagtggatctgggacaaatttcactctcaccatcagcagtctgcaacctgaagattttgcaacttattactgtcaacagttttatagtaccattattaatttcggcccagggacacgactggagattcaacgaactgtggctgcaccatctgtcttcatctt

SEQ ID NO: 3768 - DNA, 210 bp, Homo sapiens
gaagggggttttgcagacgccaccgccgaggaaaaccgtgtactattagccatggtcaaccccaccgtgttcttcgacattgccgtcgacggcgagcccttgggccgcgtgtgctttgagctgtttgcagacaaggtcccaaagacagcagaaaattttcgtgctctgagcactggagagaaaggatttggttataagggttcctgcttt

SEQ ID NO: 3769 - DNA, 462 bp, Homo sapiens
ggttcccgggggagatactccagtcgtagcaagagtctcgaccactgaatggaagaaaaggacttttaaccaccattttgtgacttacagaaaggaatttgaataaagaaaactatgatacttcaggcccatcttcactccctgtgtcttcttatgctttatttggcaactggatatggccaagaggggaagtttagtggacccctgaaacccatgacattttctatttatgaaggccaagaaccgagtcaaattatattccagtttaaggccaatcctcctgctgtgacttttgaactaactggggagacagacaacatatttgtgatagaacgggagggacttctgtattacaacagagccttggacagggaaacaagatctactcacaatctccaggttgcagccctggacgctaatggaattatagtggagggtccagtccctatcaccatagaagtg

SEQ ID NO: 3770 - DNA, 456 bp, Homo sapiens
accaaaaggatttatatgtactgttgacaccataaaagattctgacgaagagctggacaacaatcagatagaagtactggaccagccaatcaataccacagacctgcctttccacattgactggaatgatgatcttcctctcaacattgaggtccccaaaatcagcctccacagcctcattctcgacttttcagcagtgtcctttcttgatgtttcttcagtgaggggccttaaatcgattttgcaagaatttatcaggatcaaggtagatgtgtatatcgttggaactgatgatgacttcattgagaagcttaaccggtatgaattttttgatggtgaagtgaaaagctcaatatttttcttaacaatccatgatgctgttttgcatattttgatgaagaaagattacagtacttcaaagtttaatcccagtcaggaaaaagatggaaaaattga

SEQ ID NO: 3771 - DNA, 285 bp, Homo sapiens
ccgcatcctatggctctactttgagacgggtacctgggtgtatcctgtgtttgccaaactcagcctcttgggtctagcagctttcttctctctcagctacgtcttcatcgccagcatctacctacttggagagaagctcaaccactggaaatggggtgacatgaggcagccacggaagaagaggaagtaattgcacaccattttccaagaaccaagaaagaagaaaacacaagagatttttctcatctttttttttttttttccggggggggggggggggggggg

SEQ ID NO: 3772 - DNA, 375 bp, Homo sapiens
gagagtacgagtctgaggcggagggagtaatggcaggacaagcgtttagaaagtttcttccactctttgaccgagtattggttgaaaggagtgctgctgaaactgtaaccaaaggaggcattatgcttccagaaaaatctcaaggaaaagtattgcaagcaacagtagtcgctgttggatcgggttctaaaggaaagggtggagagattcaaccagttagcgtgaaagttggagataaagttcttctcccagaatatggaggcaccaaagtagttctagatgacaaggattatttcctatttagagatggtgacattcttggaaagtacgtagactgaaataagtcactattgaaatggcatcaacatgatgctg

SEQ ID NO: 3773 - DNA, 461 bp, Homo sapiens
gcagcagtggcagtggattgatggggccatgtatctgtacagatcctggtctggcaagtccatgggtgggaacaagcactgtgctgagatgagctccaataacaactttttaacttggagcagcaacgaatgcaacaagcgccaacacttcctgtgcaagtaccgaccatagagcaagaatcaagattctgctaactcctgcacagccccgtcctcttcctttctgctagcctggctaaatctgctcattatttcagaggggaaacctagcaaactaagagtgataagggccctactacactggcttttttaggcttagagacagaaactttagcattggcccagtagtggcttctagctctaaatgtttgccccgccatccctttccacagtatccttcttccctcctcccctgtctctggctgtctcgagcagtctagaagagtgcatctccagcctat

SEQ ID NO: 3774 - DNA, 465 bp, Homo sapiens
caccttgctgcattgtgaccagcacctacggctggacagccaatatggagcggatcatgaaagcccaggcacttcgggacaactccaccatgggctatatgatggccaaaaagcacctggagatcaaccctgaccaccccattgtggagacgctgcggcagaaggctgaggccgacaagaatgataaggcagttaaggacctggtggtgctgctgtgagaaaccgccctgctatcttctggcttttcccttgaggatccccagacccactccaaccgcatctatcgcatgatcaagctaggtctaggtattgatgaagatgaagtggcagcagaggaacccaatgctgcagttcctgatgagatcccccctctcgagggcgatgaggatgcgtctcgcatggaagaagtcgattaggttaggagttcatagttggaaaactagtgcccttgtatagtgtccccat

SEQ ID NO: 3775 - DNA, 382 bp, Homo sapiens
tataatatcttggcagccaggagtggtggctcacacctgtaatcccaggactttgggaggctgagatgggcagatcacctgaggtcaggagtttgagaccagcctggccaacatggtgaaactccgtctctactaaaaatacaaaaattagctgggcttggtggcgtgtctgtaatcccagttacttgggagtctgaggaaggagaattgcttgaacctgggaggcgcaggttgcagtgagccgagactgtgccactgccctccaacctgggcaacagagtaagaccctgtctcaaaaaataaataaataaaacaaaagaatgtacaaacatgtacaattgaaaaacctgatagaagaggccaggcatggtagctcatgcct

SEQ ID NO: 3776 - DNA, 336 bp, Homo sapiens; identical to SEQ ID NO: 961

SEQ ID NO: 3777 - DNA, 374 bp, Homo sapiens
gactggaggcactgaagaaggcaggggcccttagagtcttggttgccaaacagatttgcagatcaaggagaacccaggagtttcaaagaagcgctagtaaggtctctgagatccttgcactagctacatcctcagggtaggaggaagatggcttccagaagcatgcggctgctcctattgctgagctgcctggccaaaacaggagtcctgggtgatatcatcatgagacccagctgtgctcctggatggttttaccacaagtccaattgctatggttacttcaggaagctgaggaactggtctgatgccgagctcgagtgtcagtcttacggaaacggagcccacctggcatctatcctgagtttaaaggaagc

SEQ ID NO: 3778 - DNA, 463 bp, Homo sapiens
gggtagtgagaacccttccggtgggctaggtactgagcgcgcgaggctctacagagtgaaggtttaaatccaaggtcatggcaaaacatctgaagttcatcgccaggactgtgatggtacaggaagggaacgtggaaagcgcatacaggaccctaaacagaatcctcactatggatgggctcattgaggacattaagcatcggcggtattatgagaagccatgccgccggcgacagagggaaagctatgaaaggtgccggcggatctacaacatggaaatggctcgcaagatcaacttcttgatgcgaaagaatcgggcagatccgtggcagggctgctgaggcctgtgggtgggacacccagtgcgaaaccctcatccagttttctctccatctcttttctttgtacaatcccatttcctattaccattctctgcaataaactcaaatcacatgtctgcaag

SEQ ID NO: 3779 - DNA, 520 bp, Homo sapiens
gggagacgagaccagaggccgaactcgggttctgacaagatggccgggctgccccgcaggatcatcaaggaaacccagcgtttgctggcagaaccagttcctggcatcaaagccgaaccagatgagagcaacgcccgttattttcatgtggtcattgctggccctcaggattccccctttgagggagggacttttaaacttgaactattccttccagaagaatacccaatggcagcccctaaagtacgtttcatgaccaaaatttatcatcctaatgtagacaagttgggaagaatatgtttagatattttgaaagataagcggtccccagcactgcagatccgcacagttctgctatcgatccaggcctcgttaagtgctcccaatccagatgatccattagcaaatgatgtagcggagcagtggaagaccaacgaagcccaagccatagaaacagctagagcatggactaggctatatgccatgaataatatttaaattgatacgatcatcaagtgtg

SEQ ID NO: 3780 - DNA, 430 bp, Homo sapiens
ctcgtcgctattaaagcatgaagactttctgaaacctgccctagagctgggatattgtttgtgggcaatattttttattgtctcttgtttaaaaagtgaacagtgcctagtgaagttaggtgacttttacaccttttacgatgactacttttggtggagttgaaatgctgttttcattctgcatttatgtagtttggtgctttgttccaagttaagtgttttcagaaaagtatgttttgcatgtatttttttacagtctaaattttgactgctgagaagtttctattgtacaaaacttcatttaaaaggtttttctactgaatccagggtattctgaagatcgaagcctgtgtaaaatgctaccaaatggcaaaaagcaacaataaacagtttgatttttacttttctttctaacatatcaatgcttagc

SEQ ID NO: 3781 - DNA, 431 bp, Homo sapiens
tattcctggactgactgatactacagtgcctcgccgcctgggccccaaaagagctagcagaatccgcaaacttttcaatctctctaaagaagatgatgtccgccagtatgttgtaagaaagcccttaaataaagaaggtaagaaacctaggaccaaagcacccaagattcagcgtcttgttactccacgtgtcctgcagcacaaacggcggcgtattgctctgaagaagcagcgtaccaagaaaaataaagaagaggctgcagaatatactaaacttttggccaagagaatgaaggaggctaaggagaagcgccaggaacaaattgcgaagagacgcagactttcctctctgcgagcttctacttctaagtctgaatccagtcagaaataagattttttgagtaacaaataaataagatcagagtcggaaa

SEQ ID NO: 3782 - DNA, 534 bp, Homo sapiens; identical to SEQ ID NO: 964

SEQ ID NO: 3783 - DNA, 570 bp, Homo sapiens
gaatttggccctcgaggccaagaattcggcacgaggcgccagccaatgagatgacgcgggcagagttgccgaaattattgagaagaatctcaaaagtgctagtagtaaaaccgaggtccatatcagacccaagtcttggattgaggaacaggcaatgggatcattcctcagtgtggccaaaggatctgacgagcccccagtcttcttggaaattcactacaaaggcagccccaatgcaaacgaaccacccctggtgtttgttgggaaaggaattacctttgacagtggtggtatctccatcaaggcttctgcaaatatggacctcatgagggctgacatgggaggagctgcaactatatgctcagccatcgtgtctgctgcaaagcttaatttgcccattaatattataggtctggcccctctttgtgaaaatatgcccagcggcaaggccaacaagccgggggatgttgttagagccaaaaacgggaagaccatccaggttgataacactgatgctgaggggaggctcatactggctgatgcgctctgttacgcacacacgtttaaccc

SEQ ID NO: 3784 - DNA, 623 bp, Homo sapiens
gaatttggccctcgaggccaagaattcggcacgagggactttctgaaaagtgatgagggcaggggcagccattgccaaaactcattgacttctcagcccagattgcagaaggcatggccttcatcgagcagaggaactacatccaccgagacctccgagctgccaacatcttggtctctgcatccctggtgtgtaagattgctgactttggcctggcccgggtcattgaggacaacgagtacacggctcgggaaggggccaagttccccatcaagtggacagctcctgaagccatcaactttggctccttcaccatcaagtcagacgtctggtcctttggtatcctgctgatggagatcgtcacctacggccggatcccttacccagggatgtcaaaccctgaagtgatccgagctctggagcgtggataccggatgcctcgcccagagaactgcccagaggagctctacaacatcatgatgcgctgctggaaaaaccgtccggaggagcggccgaccttcgaatacatccagagtgtgctggatgacttctacacggccacagagagccagtaccaacagcagccatgatagggaggaccagggcagggccagggggtgccc

SEQ ID NO: 3785 - DNA, 592 bp, Homo sapiens
gaatttggccctcgaggccaagaattcggcacgaggcctcggagcagtgaggggccgctctccttcccagtcctggtctcctgcgcctaccaggtggcccgaggcatgcagtatctggagtcccggaagtgtatccaccgggacctggctgcccgcaatgtgctggtgactgaggacaatgtgatgaagattgctgactttgggctggcccgcggcgtccaccacattgactactataagaaaaccagcaacggccgcctgcctgtgaagtggatggcgcccgaggccttgtttgaccgggtgtacacacaccagagtgacgtgtggtcttttgggatcctgctatgggagatcttcaccctcgggggctccccgtatcctggcatcccggtggaggagctgttctcgctgctgcgggagggacatcggatggaccgacccccacactgccccccagagctgtacgggctgatgcgtgagtgctggccgtctctgaggagtacctcgacctccgcctgaccttcggaccctattccccctctggtggggacgccagcagcacctgctcctccagcgattctgtcttcagcca

SEQ ID NO: 3786 - DNA, 481 bp, Homo sapiens
accgagacatcaagcctgccgacgtgtgcatcacagccacgggcgtcgtgaagctcggtgaccttggtctgggccgcttcttcagctctgagaccaccgcagcccactccctagtggggacgccctactacatgtcaccggagaggatccatgagaacggctacaacttcaagtccgacatctggtccttgggctgtctgctgtacgagatggcagccctccagagccccttctatggagataagatgaatctcttctccctgtgccagaagatcgagcagtgtgactaccccccactccccggggagcactactccgagaagttacgagaactggtcagcatgtgcatctgccctgacccccaccagagacctgacatcggatacgtgcaccaggtggccaagcagatgcacatctggatgtccagcacctgagcgtggatgcaccgtgccttatcaaagccagcaccactttgccttac

SEQ ID NO: 3787 - DNA, 381 bp, Homo sapiens
gcttactttccaacttggacgctgcataatggctcccgcacagaagggtggctagaacaaaaagggccgttctgccatcaacgaagtggtaacccgagaatacaccatcaacattcacaagcgcattcatggagtggactcgaataagcgtgcacctcgggcactcaaagagattcggaaatctgccatgaaggagatgggaactccagatgtgcgcattgacaccaggctcaacaaagctctctgggccaaaggaataaggaatgtgccataccgaatccgtgtgcggatgtccaaaacacgtgctgatgatgaagattcaccaagtaagctatatactcttggttacctatgtacctgttaccactttcaaaagtaagt

SEQ ID NO: 3788 - DNA, 86 bp, Homo sapiens
aacccttcagtcagcacgtgagaaaactgcgagccagcattacccccgggaccattctgatcatcctcactggacgccacaggggc

SEQ ID NO: 3789 - DNA, 344 bp, Homo sapiens
gtctctttccagccagcgccgagcgatgggcatctttcgggacaactggcacaagcgccgcaaaaccggtggcaagagaaagccctaccacaagaagcggaagtatgagttggggcgcccagctgccaacaccaagattggcccccgccgcatccacacagtccgtgtgcggggaggtaacaagaaataccgtgccctgaggttggacgtggggaatttctcctggggctcagagtgttgtactcgtataacaaggatcatcgatgttgtctacaatgcatctaataacgagctggttcgtaccaagaccctggtgaagaattgcatcgtgctcatcgacagcg

SEQ ID NO: 3790 - DNA, 474 bp, Homo sapiens
tgcatttaactacaaaaaaagtttatgtttacttaggtagaggtgttatgtataatgctttgttaaagaaccccctttccgtgccactggtgaatatggattgatgaatggaaagagtttagtcaaaccagtaaacccgtcctggattccttgaacatgttcccatgtatgaggtaaaaccaattctggaagtgtctatcaactttcataaataactttaattttagtataatgatggtcttggattgtctgacctcagtagctattaaataacttcaagtaacttctgtatcatgccctacatagaacatacagttgagtgggagtcaacaaaaagataaacatgcgtgttaatggctgttcgacagaaatctgaataaaagcctaaacaggaactacttcatcacagtgttgatgttggacacatagatggtgatggcacacgtttataacacattattttcaaagactaaa

SEQ ID NO: 3791 - DNA, 320 bp, Homo sapiens
caagtggggcatgagccggaagatctggcgaagcttaggcaaaaacaccaccaatcacgtggaagttaattttataaaaaaatttacgtcagaaagagattttcacccatccatcagctgctccatcacctggttcttgtcctggagtccctgctgggaatgctcccaggctattagagagtttctgagtcggcaccctggtgtgactctagtgatctacgtagctcggcttttttggcacatggatcaacaaaatcggcaaggtctcagggaccttgttaacagtggagtaactattcagattatgagagcatcagagt

SEQ ID NO: 3792 - DNA, 347 bp, Homo sapiens
  misc_feature 340: n = A,T,C or G
atgtctctctgccaagatccatctaaactggagtgatgttagcagacccagcttagagttcttctttctttcttaagccctttgctctggaggaagttctccagcttcagctcaactcacagcttctccaagcatcaccctgggagtttcctgagggttttctcataaatgagggctgcacattgcctgttctgcttcgaagtattcaataccgctcagtattttaaatgaagcgattctaagatttggtttgggatcaataggaaagcatatgcagccaaccaagatgcaaatgttttgaaatgatatgaccaaaattttaagtaggaaagtcacccanacacttt

SEQ ID NO: 3793 - DNA, 338 bp, Homo sapiens
ctaaatccatgaagtttgtggatggcctgatgatccacagcggagaccctgttaactactacgttgacactgctgtgcgccacgtgttgctcaaacagggtgtgctgggcatcaaggtgaagatcatgctgccctgggacccaactggtaagattggccctaagaagcccctgcctgaccacgtgagcattgtggaacccaaagatgagatactgcccaccacccccatctcagaacagaagggtgggaagccagagccgcctgccatgccccagccagtccccacagcataacagggtctccttggcagctgtattctggagtctggatgttgctct

SEQ ID NO: 3794 - DNA, 343 bp, Homo sapiens
ataaccaagcataatataggcaaggactaacccctataccttctgcataatgaattaactagaaataactttgcaaggagagccaaagctaagacccccgaaaccagacgagctacctaagaacagctaaaagagcacacccgtctatgtagcacaatagtgggaagatttataggtagaggcgacaaacctaccgagcctggagatagctggttgtccaagatagaatcttagttcaactataaatttgcccacagaaccctataaatccccttgaaaatttaactgttagtccaaagaggaacagctctttggacactaagaaaaaaccttgccgagagag

SEQ ID NO: 3795 - DNA, 194 bp, Homo sapiens
ggggtggcggcgacgacccattcgaacgtctgccctatcaactttcgatggtagtcgccgtgcctaccatggtgaccacgggtgacggggaatcacggttcgattccggagagggagcctgagaaacggtaccacatccaaggaaggcagcaggcgcgcaaattacccactcccgacccggggaggtagtgacg

SEQ ID NO: 3796 - DNA, 313 bp, Homo sapiens
tccttcaacaagaaggggagagtcggctcaatctggtgcagagaaatgttaatgtcttcaaattcattattcctcagatcgtcaagtacagtcctgattgcatcataattgtggtttccaacccagtggacattcttacgtatgttacctggaaactaagtggattacccaaacaccgcgtgattggaagtggatgtaatctggattctgctagatttcgctaccttatggctgaaaaacttggcattcatcccagcagctgccatggatggattttgggggaacatggcgactcaagtgtggctgtgtggag

SEQ ID NO: 3797 - DNA, 402 bp, Homo sapiens; identical to SEQ ID NO: 967

SEQ ID NO: 3798 - DNA, 222 bp, Homo sapiens
ttctgcctcagcctcccaagcagctgggactacaggcacatgccgccacacctggctaattttttgtattttaatacagacggggtttcactgtgtcacccaggctggtctcgaactcctgagctcaggcaatccacctgcctcggcctcccaaagtgctgcgattacaggcgtgagccaccgtgcccagccttacttagatatcttataggcacctcaaat

SEQ ID NO: 3799 - DNA, 442 bp, Homo sapiens; identical to SEQ ID NO: 968

SEQ ID NO: 3800 - DNA, 284 bp, Homo sapiens
gcttttacctcgttgcactgctgagagcaagatgggtcaccagcagctgtactggagccacccgcgaaaattcggccagggttctcgctcttgtcgtgtctgttcaaaccggcacggtctgatccggaaatatggcctcaatatgtgccgccagtgtttccgtcagtacgcgaaggatatcggtttcattaagttggactaaatgctcttccttcagaggattatccggggcatctactcaatgaaaaaccgtgataattctttgtatataaaataaacattcg

SEQ ID NO: 3801 - DNA, 419 bp, Homo sapiens
agcgccacaaagaatgacataggaccctatgaatgtgaaatacagaacccagtgggtgccagccgcagtgacccagtcaccctgaatgtccgctatgagtcagtacaagcaagttcacctgacctctcagctgggaccgctgtcagcatcatgattggagtactggctgggatggctctgatatagcagccttggtgtagtttctgcatttcgggaagagtgactggactggattcttctagctccttcaatcccattttctcctgtggcatcactaagtataagacctgctctcttcctgaagacctataagctggaggtggacaactcaatgtaaatttcaaggaaaaaccctcatgcctgagatgtgggccactcagagctaaccaaaatgttcaacaccataactagagacactc

SEQ ID NO: 3802 - DNA, 449 bp, Homo sapiens
aggggctctttttccggctggaaccatggagggtgtagaagagaagaagaaggaggttcctgctgtgccagaaacccttaagaaaaagcgaaggaatttcgcagagctgaagatcaagcgcctgagaaagaagtttgcccaaaagatgcttcgaaaggcaaggaggaagcttatctatgaaaaagcaaagcactatcacaaggaatataggcagatgtacagaactgaaattcgaatggcgaggatggcaagaaaagctggcaacttctatgtacctgcagaacccaaattggcgtttgtcatcagaatcagaggtatcaatggagtgagcccaaaggttcgaaaggtgttgcagcttcttcgccttcgtcaaatcttcaatggaacctttgtgaagctcaacaaggcttcgattaacatgctgaggattgtagagccatatattgcat

SEQ ID NO: 3803 - DNA, 405 bp, Homo sapiens; identical to SEQ ID NO: 970

SEQ ID NO: 3804 - DNA, 494 bp, Homo sapiens
accgtaagcctttggtcataatcgctgaagatgttgatggagaagctctaagtacactcgtcttgaataggctaaaggttggtcttcaggttgtggcagtcaaggctccagggtttggtgacaatagaaagaaccagcttaaagatatggctattgctactggtggtgcagtgtttggagaagagggattgaccctgaatcttgaagacgttcagcctcatgacttaggaaaagttggagaggtcattgtgaccaaagacgatgccatgctcttaaaaggaaaaggtgacaaggctcaaattgaaaaacgtattcaagaaatcattgagcagttagatgtcacaactagtgaatatgaaaaggaaaaactgaatgaacggcttgcaaaactttcagatggagtggctgtgctgaaggttggtgggacaagtgatgttgaagtgaatgaaaagaaagacagagttacagatgcccttaatgctacaagagctgct

SEQ ID NO: 3805 - DNA, 524 bp, Homo sapiens
ggtaacattgatgactcgctcattggtggaaatgcctccgctgaaggccccgagggcgaaggtaccgaaagcacagtaatcactggtgtcgatattgtcatgaaccatcacctgcaggaaacaagtttcacaaaagaagcctacaagaagtacatcaaagattacatgaaatcaatcaaagggaaacttgaagaacagagaccagaaagagtaaaaccttttatgacaggggctgcagaacaaatcaagcacatccttgctaatttcaaaaactaccagttctttattggtgaaaacatgaatccagatggcatggttgctctattggactaccgtgaggatggtgtgaccccatatatgattttctttaaggatggtttagaaatggaaaaatgttaacaaatgtggcaattattttggatctatcacctgtcatcataactggcttctgcttgtcatccacacaacaccaggacttaagacaaatgggactgatgtcatcttgagctcttcatttattttga

SEQ ID NO: 3806 - DNA, 532 bp, Homo sapiens
cagaagggactctagaggagaccaaggcccgttacagcagccagttagccaacctccagtcgctgttgagctctctggaggcccaactgatgcagattcggagtaacatggaacgccagaacaacgaataccatatccttcttgacataaagactcgacttgaacaggaaattgctacttaccgccgccttctggaaggagaagacgtaaaaactacagaatatcagttaagcaccctggaagagagagatataaagaaaaccaggaagattaagacagtcgtgcaagaagtagtggatggcaagggtcgtgtcatctgaagtcaaagaggtggaagaaaatatctaaatagctaccagaaggagatgctgctgaggttttgaaagaaatttggctataatcttatctttgctccctgcaagaaatcagccataagaaagcactattaatactctgcagtgattagaaggggttggggtggcgggaatcctatttatcagactctgtaattgaatataaatgttttactcag

SEQ ID NO: 3807 - DNA, 513 bp, Homo sapiens
gggagagcttccgggctgcgctcttcgttgcccagtttccgctcagtggtcgcgtctccgccccccacccaccagtcccgctgcattctcggccgggctctaggcgccatggctccccgcgggaggaagcgtaaggctgaggccgcggtggtcgccgtagccgagaagcgagagaagctggcgaacggcggggagggaatggaggaggcgaccgttgttatcgagcattgcactagctgacgcgtctatgggcgcaacgccgcggccctgagccaggcgctgcgcctggaggccccagagcttccagtaaaggtgaacccgacgaagccccggaggggcagcttcgaggtgacgctgctgcgcccggacggcagcagtgcggagctctggactgggattaagaaggggcccccacgcaaactcaaattccctgagcctcaagaggtggtggaagagttgaagaagtacctgtcgtagggagatttgggtagaagccctcatgctgagctttgt

SEQ ID NO: 3808 - DNA, 79 bp, Homo sapiens
gaggtggttatgacaactatggagtaggaaattatggaagtggaaattacaatgattttggaaattataaccagcaacc

SEQ ID NO: 3809 - DNA, 509 bp, Homo sapiens
accgaagggtcaaggcagtggcagaagatgtcagtcacctctgataactggaaaaatgggtctcttgggccctggcactggttctccatggcctcagccacagggtccccttggaccccctctcttccctccagatcccagccctcctgcttggggtcactggtctcattctggggctaaaagtttttgagactggctcaaatcctcccaagctgctgcacgtgctgagtccagaggcagtcacagagacctctggccaggggatcctaactgggttcttggggtcttcaggactgaagaggagggagagtggggtcagaagattctcctggccaccaagtgccagcattgcccacaaatccttttaggaatgggacaggtaccttccacttgttgtatttattagtgtagcttctcctttgtctcccatccactctgacacctaagccccactcttttcccattagatatatgtaagtagttgtagtagagataataattgacatttc

SEQ ID NO: 3810 - DNA, 410 bp, Homo sapiens
agcgtcagcagcgagcaggtgttgaaattccgtaaacttaacttcaatggggagggtgaacccgaagaactgatggtggacaactggcgcccagctcagccactgaagaacaggcaaatcaaagcttccttcaaataagatggtcccatagtctgtatccaaataatgaatcttcgggtgtttccctttagctaagcacagatctaccttggtgatttggaccctggttgctttgtgtctagttttctagacccttcatctcttacttgatagacttactaataaaatgtgaagactagaccaattgtcatgcttgacacaactgctgtggctggttggtgctttgtttatggtagtagtttttctgtaacacagaatataggataagaaataagaataaagtaccttga

SEQ ID NO: 3811 - DNA, 466 bp, Homo sapiens
gagcggtagcgatggacactctggatcgagtagtaaagcccaaaacgaaaagagccaagagattccttgagaagagagaaccgaaactcaatgaaaatgttaaaaatgccatgctgattaaagggggaaatgcaaatgcaacagtgacaaaagtacttaaagatgtgtatgcactgaaaaaaccatacggtgtactatataaaaagaaaaatattacaagaccttttgaggatcagacatcactggaattcttttcaaagaagtcagattgttctttattcatgtttggctcccataataagaagcggccaaataatctagtaataggtcgtatgtatgactaccatgtgctggatatgattgaattaggtattgagaattttgtctctctaaaagacattaagaacagtaaatgtcctgagggaacaaaacccatgctgatatttgctggcgatgatttcgatgt

SEQ ID NO: 3812 - DNA, 314 bp, Homo sapiens
gcacagctgaagttttcaagaagcatggagtgtacaaccccaacataatcttcggcgtgacgaccctggacatcgtcagagccaacacctttgttgcaaagctgaagggtttggatccagctcgagtcaacgtccctgtcattggtggccatgctgggaagaccatcatacccctgatctctcagtgcacccccaaggtggactttccccaggaccagctgacagcactcactgggcggatccaggaggccggcacggaggtggtcaaggctaaagccggagcaggctctgccaccctctccatggcgtatgcc

SEQ ID NO: 3813 - DNA, 472 bp, Homo sapiens
agaggtaggaaggacagcagagctgacagtcacagcagccctgacaagagagttcctggagcccaagctcttctccacagaggacaagcaggcagcagagaccatggggtccccttcagcctgtccatacagagtgtgcattccctggcaggggctcctgctcacagcctcgcttttaaccttctggaacctgccaaacagtgcccagaccaatattgatgtcgtgccgttcaatgtcgcagaagggaaggaggtccttctagtagtccataatgagtcccagaatctttatggctacaactggtacaaaggggaaagggtgcatgccaactatcgaattataggatatgtaaaaaatataagtcaagaaaatgccccagggcccgcacacaacgatcgagagacaatataccccaatggaaccctgctgatccagaacgtcacccacaatgacgcaggaatctatacccta

SEQ ID NO: 3814 - DNA, 463 bp, Homo sapiens
cagctaacctcaccctccacccctcaatgtagggaggtacatggtcagtggagaaggtgatccaggtgccccccaagaaagtgaagggctggctgctgcccgaaatgccaggcctgatcaccgacatcctgctctccctggacgaccgcttcctctacttcagcaactggctgcatggggacctgaggcagtatgacatctctgacccacagagaccccgcctcacaggacagctcttcctcggaggcagcattgttaagggaggccctgtgcaagtgctggaggacgaggaactaaagtcccagccagagcccctagtggtcaagggaaaacgggtggctggaggccctcagatgatccagctcagcctggatgggaatcgcctctacatcaccacgtcgctgtacagtgcctgggacaagcagttttaccctgatctcatcagggaaggctctgtgatgct

SEQ ID NO: 3815 - DNA, 391 bp, Homo sapiens
gctttccggacctggaagagcaggaggcgccatcatgggagtggacatccgccataacaaggaccgaaaggttcggcgcaaggagcccaagagccaggatatctacctgaggctgttggtcaagttatacaggtttctggccagaagaaccaactccacattcaaccaggttgtgttgaagaggttgtttatgagtcgcaccaaccggccgcctctgtccctttcccgaatgatccggaagatgaagcttcctggccgggaaaacaagacggccgtggttgtggggaccataactgatgatgtgcgggttcaggaggtacccaaactgaaggtatgtgcactgcgcgtgaccagccgggcccgcagccgcatcctcagggcagggggcaag

SEQ ID NO: 3816 - DNA, 468 bp, Homo sapiens
aaggcgatcttttaaaaagagattaaaccgaaggtgattaaaagaccttgaaatccatgacgcagggagaattgcgtcatttaaagcctagttaacgcatttactaaacgcagacgaaaatggaaagattaattgggagtggtaggatgaaacaatttggagaagatagaagtttgaagtggaaaactggaagacagaagtacgggaaggcgaagaaaagaatagagaagatagggaaattagaagataaaaacatacttttagaagaaaaaagataaatttaaacctgaaaagtaggaagcagaagaaaaaagacaagctaggaaacaaaaagctaagggcaaaatgtacaaacttagaagaaaattggaagatagaaacaagatagaaaatgaaaatattgtcaagagtttcagatagaaaatgaaaaacaagctaagacaagtattggagaagtatagaagatag

SEQ ID NO: 3817 - DNA, 463 bp, Homo sapiens
acctctagcatcaccagtattagaggcaccgcctgcccagtgacacatgtttaacggccgcggtaccctaaccgtgcaaaggtagcataatcacttgttccttaagtagggacctgtatgaatggctccacgagggttcagctgtctcttacttttaaccagtgaaattgacctgcccgtgaagaggcgggcataacacagcaagacgagaagaccctatggagctttaatttattaatgcaaacagtacctaacaaacccacaggtcctaaactaccaaacctgcattaaaaatttcggttggggcgacctcggagcagaacccaacctccgagcagtacatgctaagacttcaccagtcaaagcgaactactatactcaattgatccaataacttgaccaacggaacaagttaccctagggataacagcgcaatcctattctagagtccatatcaacaata

SEQ ID NO: 3818 - DNA, 435 bp, Homo sapiens
ggtcgccaccgaggtcgcacgcgtgagacttctccgccgcctccgccgcagacgccgccgcgatgcgctacgtcgcctcctacctgctggctgccctagggggcaactcctcccccagcgccaaggacatcaagaagatcttggacagcgtgggtatcgaggcggacgacgaccggctcaacaaggttatcagtgagctgaatggaaaaaaacattgaagacgtcattgcccagggtattggcaagcttgccagtgtacctgctggtggggctgtagccgtctctgctgccccaggctctgcagcccctgctgctggttctgcccctgctgcagcagaggagaagaaagatgagaagaaggaggagtctgaagagtcagatgatgacatgggatttggcctttttgattaaattcctgctcccctgcaaataaag

SEQ ID NO: 3819 - DNA, 269 bp, Homo sapiens
actggctgtcgcttgtcttctattcaccatggcttcttctgatatccaggtgaaagaactggagaagcgtgcctcaagccaggctttggagctgattctcagccctcggtcaaaagaatctgttccagacttccccctttcccctccaaagaagaatgatctttccctggaggaaattcatatgaaattagaagctgcagaagaaagacgcaagtcccatgaagctgaggtcttgaagcagctggctgagaaacgagagcacgagaaag

SEQ ID NO: 3820 - DNA, 253 bp, Homo sapiens; identical to SEQ ID NO: 2557

SEQ ID NO: 3821 - DNA, 392 bp, Homo sapiens
gctctttccctgccgccgccgagtcgcgcggaggcggaggcttgggtgcgttcaagattcaacttcacccgtaacccaccgccatggccgaggaaggcattgctgctggaggtgtaatggacgttaatactgctttacaagaggttctgaagactgccctcatccacgatggcctagcacgtggaattcgcgaagctgccaaagccttagacaagcgccaagcccatctttgtgtgcttgcatccaactgtgatgagcctatgtatgtcaagttggtggaggccctttgtgctgaacaccaaatcaacctaattaaggttgatgacaacaagaaactaggagaatgggtaggcctttgtaaaattgacagagaggggaaaccccgtaaagtg

SEQ ID NO: 3822 - DNA, 347 bp, Homo sapiens
gctaaacctagccccaaacccactacaccttactaccagacaaccttagccaaaccatttacccaaataaagtataggcgatagaaattgaaacctggcgcaatagatatagtaccgcacgggaaagatgaaaaattataaccaagcataatatagcaaggactaacccctataccttgtgcataatgaattaactagaaataactgtgctaggagagccaaagctaagacccccgaaaccagacgagctacctaagaacagctaagagagcacacccgtctatgtagcacaatagcgggaagatttataggtagaggcgacatacctaccgagcctggagatagct

SEQ ID NO: 3823 - DNA, 434 bp, Homo sapiens; identical to SEQ ID NO: 978

SEQ ID NO: 3824 - DNA, 500 bp, Homo sapiens
attaccctcactgtcaacccaacacaggcatgctcataaggaaaggttaaaaaaagtaaaaggaactcggcaaatcttaccccgcctgtttaccaaaaacatcacctctagcatcaccagtattagaggcaccgcctgcccagtgacacatgtttaacggccgcggtaccctaaccgtgcaaaggtagcataatcacttgttccttaattagggacctgtatgaatggctccacgagggttcagctgtctcttacttttaaccagtgaaattgacctgcccgtgaagaggcgggcataacacagcaagacgagaagaccctatggagctttaatttattaatgcaaacagtacctaacaaacccacaggtcctaaactaccaaacctgcattaaaaatttcggttggggcgacctcggagcagaacccaacctccgagcagtacatgctaagacttcaccagtcaaagcgaactactatactcaattgatccaataactt

SEQ ID NO: 3825 - DNA, 554 bp, Homo sapiens
gcatgaggcgtgaagcccctcaaccccaacttctgcttcttgcagtgtaccagcgcatacccgctccagcctgaggacgtcaacctgcgggtcatctcggaatatcagaagctctttcctgacattcccatagggtattctgggcatgaaacaggcatagcgatatctgtggccgcagtggctctgggggccaaggtgttggaacgtcacataactttggacaagacctggaaggggagtgaccactcggcctcgctggagcctggagaactggccgagctggtgcggtcagtgcgtcttgtggagcgtgccctgggctccccaaccaagcagctgctgccctgtgagatggcctgcaatgagaagctgggcaagtctgtggtggccaaagtgaaaattccggaaggcaccattctaacaatggacatgctcaccgtgaaggtgggtgagcccaaaggctatcctcctgaagacatctttaatctagtgggcaagaaggtcctggtcactgttgaagaggatgacaccatcatggaagaattggtagataatca

SEQ ID NO: 3826 - DNA, 470 bp, Homo sapiens
gacagaagggggagctgtggatggaggcttgtctatccctcacagtaccaaacgattccctggttatgattctgaaagcaaggaatttaatgcagaagtacatcggaagcacatcatgggccagaatgttgcagattacatgcgctacttaatggaagaagatgaagatgcttacaagaaacagttctctcaatacataaagaacagcgtaactccagacatgatggaggagatgtataagaatgctcatgctgctatacgagagaatccagtctatgaaaagaagcccaagaaagaagttaaaaagaagaggtggaaccgtcccaaaatgtcccttgctcagaagaaggatcgggtagctcaaaagaaggcaagcttcctcagagctcaggagcgggctgctgagagctaaacccagcaattttctatgattttttcagatatagataataaacttatgaacagcaact

SEQ ID NO: 3827 - DNA, 441 bp, Homo sapiens
ctagtctttccgcttcttgaatttctctctgtaaaggagatatataatgaaaaggaattattacaaggtaaattaccttcttagtgataccaacatggtagactgtgctatggatgtatacaaaaacctttattctgatgatattcctcatgctttgagagagaaaagaaccacagtggttgcacaactgaaacagcttcaggcagaaacagaaccaattgtgaagatgtttgaagatccagaaactacaaggcaaatgcagtcaaccagggatggtacgatgctctttgactacctggcggacaagcatggttttaggcaggaatatttagatacactctacagatatgcaaaattccagtacgaatgtgggaattactcacgagcagcagaatatctttatttttttagagtgctggttccagcaacagatagaaatgc

SEQ ID NO: 3828 - DNA, 424 bp, Homo sapiens
gagcgccgagcgatgggcatctctcgggacaactggcacaagcgccgcaaaaccgggggcaagagaaagccctaccacaagaagcggaagtatgagttggggcgcccagctgccaacaccaagattggcccccgccgcatccacacagtccgtgtgcggggaggtaacaagaaataccgtgccctgaggttggacgtggggaatttctcctggggctcagagtgttgtactcgtaaaacaaggatcatcgatgttgtctacaatgcatctaataacgagctggttcgtaccaagaccctggtgaagaattgcatcgtgctcatcgacagcacaccgtaccgacagtggtacgagtcccactatgcgctgcccctgggccgcaagaagggagccaagctgactcctgaggaagaagagattttaa

SEQ ID NO: 3829 - DNA, 253 bp, Homo sapiens
agccagagaagtgacagggaagctacaggttacaacagatttgtgaactcagccaagcacagtggtggcagggcctagctgctacaaagaagacatgttttagacaaatactcatgtgtatgggcaaaaaactcgaggactgtatttgtgactaattgtataacaggttattttagtttctgttctgtggaaagtgtaaagcattccaacaaagggttttaatgtagatttttttttgcaccccatgctgttg

SEQ ID NO: 3830 - DNA, 368 bp, Homo sapiens
gtggaccagatccacatcaaaccgggggctaaggttctctacctcggggctgcctcggtcaccacggtctcccatgtatctgacatcgttggtccggatggtctagcctatgcagtcgagttctcccaccgctctggccgcgacctcattaacttggccaagaagaggaccaacatcattcctgtgatcgaggatgctcgacacccacacaaataccgcatgctcatcgcaatggtggatgtgatctttgctgatgtggcccaaccagaccagacccggattgtggccctgaatgcccacaccttcctgcgtaatggacgacactttgtgatttccattaaggccaactgcattgactacacagcctc

SEQ ID NO: 3831 - DNA, 281 bp, Homo sapiens; identical to SEQ ID NO: 985

SEQ ID NO: 3832 - DNA, 472 bp, Homo sapiens
gcctttcctttcagcggagcgcggcggcaagatggcagtgcaaatatccaagaagaggaagtttgtcgctgatggcatcttcaaagctgaactgaatgagtttcttactcgggagctggctgaagatggctactctggagttgaggtgcgagttacaccaaccaggacagaaatcattatcttagccaccagaacacagaatgttcttggtgagaagggccggcggattcgggaactgactgctgtagttcagaagaggtttggctttccagagggcagtgtagagctttatgctgaaaaggtggccactagaggtctgtgtgccattgcccaggcagagtctctgcgttacaaactcctaggagggcttgctgtgcggagggcctgctatggtgtgctgcggttcatcatggagagtggggccaaaggctgcgaggttgtggtgtctgggaaactccgaggacagagggct

SEQ ID NO: 3833 - DNA, 509 bp, Homo sapiens
ttctctctttcgctcaggcccgtggcgccgacaggatgggcaagtgtcgtggacttcgtactgctaggaagctccgtagtcaccgacgagaccagaagtggcatgataaacagtataagaaagctcatttgggcacagccctaaaggccaacccttttggaggtgcttctcatgcaaaaggaatcgtgctggaaaaagtaggagttgaagccaaacagccaaattctgccattaggaagtgtgtaagggtccagctgatcaagaatggcaagaaaatcacagcctttgtacccaatgacggttgcttgaactttattgaggaaaatgatgaagttctggttgctggatttggtcgcaaaggtcatgctgttggtgatattcctggagtccgctttaaggttgtcaaagtagccaatgtttctcttttggccctatacaaaggcaagaaggaaagaccaagatcataaatattaatggtgaaaacactgtagtaataaattttcatatgc

SEQ ID NO: 3834 - DNA, 341 bp, Homo sapiens
gagagtcggctcaatctggtgcagagaaatgttaatgtcttcaaattcattattcctcagatcgtcaagtacagtcctgattgcatcataattgaggtttccaacccagtggacattcttacgtatgttacctggaaactaagcggattacccaaacaccgcgtgattggaagtggatgtaatctggattctgctagatttcgctaccttatggctgaaaaacttggcattcatcccagcagctgccatggatggattttgggggaacatggcgactcaagtgtggctgtgtggagaggtgagaatgtggcaggtgtttctctccaggaattgaatccaga

SEQ ID NO: 3835 - DNA, 411 bp, Homo sapiens; identical to SEQ ID NO: 986

SEQ ID NO: 3836 - DNA, 338 bp, Homo sapiens
gctctttccagccagcgccgagcgatgggcatctctcgggacaactggcacaagcgccgcaaaaccgggggcaagagaaagccctaccacaagaagcggaagtatgagttggggcgcccagctgccaacaccaagattggcccccgccgcatccacacagtccgtgtgcggggaggtaacaagaaataccgtgccctgaggttggacgtggggaatttctcctggggctcagagtgttgtactcgtaaaacaaggatcatcgatgttgtctacaatgcatctaataacgagctggttcgtaccaagaccctggtgaagaattgcatcgtgctcatcga

SEQ ID NO: 3837 - DNA, 331 bp, Homo sapiens
atatgcccacgtcaagacgcttgtgtcagattataagataggttcggcgcagtggcttacacctgtaatcctagcactttgggaggctgaggtgggtggatcacctgaggtcaggaatttgagaccagcctgacgaatatggtgaaaccccatctctactaaaaatacaaaaattagctaacttagctgggcgtggtagcctgcacctgcagtcccagctagtcgggaaactgagacaagagaattgcttaaacttgggatgcagaggttgcagtgagccgagatagcgccactgcactccagcctgggtgacagagcgagactccatctc

SEQ ID NO: 3838 - DNA, 86 bp, Homo sapiens
gattaactgaagaagatagggttgatttataaagtttgaattcgaggccaggcacagtggctcatgcctgtaatcccagcacttta

SEQ ID NO: 3839 - DNA, 401 bp, Homo sapiens
tcttaggtgggaagactacaaggcttgcaaagcccatgagctcagccccagctctgctctgcaaaggctgtgaggcctgttgcttaacctctctgaatcttctaggccttagaatgactcaaagtggggccaggcgcggtggctggtaattccagcactttgggaggccgaggtgggcagatcacgaggtcaggagatcgagaccatcctgggtaacacagtgaaacccgtctctactaaaaatacaaaaaattagccaggtgttatagcatgcgcctgtagtcccagctactgaggctgaggcaggagaatcgcttgaactcaggaggcacaggttgcagtgagccaagatcgtgccactgcaatccacagcctgggcgacagagcgagacttggtcttt

SEQ ID NO: 3840 - DNA, 484 bp, Homo sapiens
cgctgcgaaaagacacaccaaaggggggctccgaagcggggaagtgggacaagatggtttacatctcgaacggacaagtgttggacagccggagtcagtctccatggagattatctttgataacagatttcttctggggaatagctgagtttgtggttttgtttttcaaaactctgcttcagcaagatgtgaaaaaaagaagaagctatggaaactcatctgattccagatatgatgatggaagagggccaccaggaaaccctccccgaagaatgggtagaatcaatcatctgcgtggccctagtccccctccaatggctggtggatgaggaaggtaaatgtctgctctaagaagcagacaaccggacatgcgcattcatagcagaaggaaacccatcaagaagtggaaggctgaccatgatgagcagtagatgaatgtgtatgtctaaacaaggactgctctgtgtcctcacagatgaatgag

SEQ ID NO: 3841 - DNA, 475 bp, Homo sapiens
acagaagggaactaaattactgtattcttcaactaatgggacacaatattcttttttttcttttttgagacagagtctcactctgtcgcccaggctggagtgcagtggcatgatctcagctcactgcaacctccacttccagggttcaagctattctcctgcctcagcctccaaagtagctgggattacaggcacgtgccaacacgcctggctaatttttgtattttcagtggagacggggtttcactgtgttagccaggatggtctcgatctcccgacctcatgatccacctgcctcggcctcccaaagtgctgggattacaggcatgagccaccgcgcctggccgtaatatcctttttttaatcccacttggaaatcacaaaggaagcattactaaattatgatttaattctgcatagttaatggaaaaatattttgccatgttttcaccttattacattttctcaatatcag

SEQ ID NO: 3842 - DNA, 237 bp, Homo sapiens
acagaaggggaagaggctcgcctctagtgtcctccgctgtggcaagaagaaggtctggttagaccccaatgagaccaatgaaatcgccaatgccaactcccgtcagcagatccggaagctcatcaaagatgggctgatcatccgcaagcctgtgacggtccattcccgggctcgatgccggaaaaacaccttggcccgccggaagggcaggcacatgggcataggtaagcggaaggg

SEQ ID NO: 3843 - DNA, 468 bp, Homo sapiens
gcttttccggacctggccgagcaggaggcgccatcatgggagtggacatccgccataacaaggaccgaaaggttcggcgcaaggagcccattagccaggatatctacctgaggctgttggtcaagttatacaggtttctggccagaagaaccaactccacattcaaccaggttgtgttgaagaggttgtttatgagtcgcaccaaccggccgcctctgtccctttcccggatgatccggaagatgaagcttcctggccgggaaaacaagacggccgtggttgtggggaccataactgatgatgtgcgggttcaggaggtacccaaactgaaggtatgtgcactgcgcgtgaccagccgggcccgcagccgcatcctcagggcagggggcaagatcctcactttcgaccagctggccctggactcccctaagggctgtggcactgtcctgctctccggtcctcgcaagg

SEQ ID NO: 3844 - DNA, 235 bp, Homo sapiens
gaagctggactgggcccgcgagaggcttgtgcagcaggtacctgtgaaccaagtgtttgggcatgatgagatgatcgacgtcatatgggagaccaagggcaatggctacaaaggggtcaccagtcgttggcacaccaagaagctgccccgcaagacccaccgatgcctgcgcaaggtggcctgtattgcggcatggcatcctgctcgtgtaaccttctctgtgtcacgcgctggg

SEQ ID NO: 3845 - DNA, 416 bp, Homo sapiens
atacccggagctgcccaagccctccatctccagcaacaactccaaccctgtggaggacaaggatgctgtggccttcacctgtgaacctgagactcaggacacaacctacctgtggtggataaacaatcagagcctcccggtcagtcccaggctgcagctgtccaatggcaacaggaccctcactctactcagtgtcacaaggaatgacacaggaccctatgagtgtgaaatacagaacccagtgagtgcgaaccgcagtgacccagtcaccttgaatgtcacctatggcccggacacccccaccatttccccttcagacacctattaccgtccaggggcaaacctcagcctctcctgctatgcagcctctaacccacctgcacagtactcctggcttatcaatggaacattccagc

SEQ ID NO: 3846 - DNA, 324 bp, Homo sapiens
gcagcaatctgtcaatcaccttgttaaagagattgatatgctgctgaaagaatatttactctctggagacatatctgaagctgaacattgccttaaggaactggaagtacctcattttcaccatgagcttgtatatgaagctattataatggttttagagtcaactggagaaagtacatttaagatgattttggatttattaaagtccctttggaagtcttctaccattactgtagaccaaatgaaaagaggttatgagagaatttacaatgaaattccggacattaatctggatgtcccacattcatactctgtgctggagcg

SEQ ID NO: 3847 - DNA, 480 bp, Homo sapiens
acgacagaagggcctcatccattccaaaatatgcccggtgctatccgcccagctgctcctagaccaccatttagtactatgagaccagcttcttcacaggttccacgagtcatgtcaacacagcgtgttgctaacacatcaacacagacaatgggtccacgtcctgcagctgcagccgctgcagctactcctgctgtccgcaccgttccacagtataaatatgctgcaggagttcgcaatcctcagcaacatcttaatgcacagccacaagttacaatgcaacagcctgctgttcatgtacaaggtcaggaacctttgactgcttccatgttggcatctgcccctcctcaagagcaaaagcaaatgttgggtgaacggctgtttcctcttattcaagccatgcaccctactcttgctggtaaaatcactggcatgttgttggagattgataattcagaacttcttcatatgctcgagtct

SEQ ID NO: 3848 - DNA, 254 bp, Homo sapiens
acctaccggattcaagcgattctcatgcctcagtctgctgagtagctaggatttacaggtgcccaccaccatgcccggctaatttttttgtatttttagtagagatgggatttcaccatgttggccaggctggtctcaaactcctgagcttaggtgatccatctgccttggccccacaaagtgctgggattacaggtgtgagccacctcgccctgccaggtttatttattcttgagagggagtcttgccctgtt

SEQ ID NO: 3849 - DNA, 444 bp, Homo sapiens
gaattgacaggatttagattttgcttagtttttctgctttttaatgtttctatcccccatctcagtgttttctttatccatcccagtgatgccttatttgaaactgggcttaaactgcaaaaagaatgaagttggatttaggaagctgttagatcattgagtggtgttgagagtgaagtttcactagcagggaagtttccttgagcctaaaataaaaagaaaaaattaaaaagaatcagttttcttaattaaaaaaatagaaagctgttaggctcctaattcgtggggttttttttgtaaaaacagtttagataatcctgaatgcaatcattaacttggttgctaattacaagaatgaaaattataatggaaaaggacaaaataatataccagctggtttgttattatagtccgtgtattaaaatactattgaaatacgttaaa

SEQ ID NO: 3850 - DNA, 222 bp, Homo sapiens
gactggtgttctcaaacccggtatggtggtcacctttgctccagtcaacgttacaacggaagtaaaatctgtcgaaatgcaccatgaagctttgagtgaagctcttcctggggacaatgtgggcttcaatgtacagaatgtgtctgtcaaggatgtacgtcgtggcaacgttgctggtgacagcaaaaatgacccaccaatggaagcagctggcttcactgc

SEQ ID NO: 3851 - DNA, 448 bp, Homo sapiens
aagctctggcctgacatgccaggcagctggctgcccaccaggccgtgtatgtgaggtcaaggctgaagcccggaactgctgggccacccgtggtctctgtgtcctgtctgtgggtgccaacctcaccacctttgatggggcccgtggtgccaccacctctcctggtgtctatgagctctcttcccgctgcccaggactacagaataccatcccctggtaccgtgtagttgccgaagtccagatctgccatggcaaaacggaggctgtgggccaggtccacatctccttccaggatgggatggtgacgttgactccaaacaagggtgtgtgggtgaatggtctccgagtggatctcccagctgagaagttagcatctgtgtccgtgagtcgtacacctgatggctccctgctagtccgccagaaggcaggggtccaggtgtggcttgga

SEQ ID NO: 3852 - DNA, 520 bp, Homo sapiens
ttcgtaaatttagggatcttcccaaaatgtggagtattagtagaatggatacagttatctggtttgttactatgctgtcctctgcactgctaagtactgaaataggcctacttgttggggtttgtttttctatattttgtgtcatcctccgcactcagaagccaaagagttcactgcttggcttggtggaagagtctgaggtctttgaatctgtgtctgcttacaagaaccttcagactaagccaggcatcaagattttccgctttgtagcccctctctactacataaacaaagaatgctttaaatctgctttatacaaacaaactgtcaacccaatcttaataaaggtggcttggaagaaggcagcaaagagaaagatcaaagaaaaagtagtgactcttggtggaatccaggatgaaatgtcagtgcaactttcccatgatcccttggagctgcatactatagtgattgactgcagtgcaattcaatttttagatacagcagggatccacacactgaa

SEQ ID NO: 3853 - DNA, 503 bp, Homo sapiens
gagtacattgagctccatagagacagcgccggggcaagtgagagccggacgggcactgggcgactctgtgcctcgctgaggaaaaataactaaacatgggcaaaggagatcctaagaagccgagaggcaaaatgtcatcatatgcattttttgtgcaaacttgtcgggaggagcataagaagaagcacccagatgcttcagtcaacttctcagagttttctaagaagtgctcagagaggtggaagaccatgtctgctaaagagaaaggaaaatttgaagatatggcaaaagcggacaaggcccgttatgaaagagaaatgaaaacctatatccctcccaaaggggagacaaaaaagaagttcaaggatcccaatgcacccaagaggcctccttcggccttcttcctcttctgctctgagtatcgcccaaaaatcaaaggagaacatcctggcctgtccattggtgatgttgcgaagaaactgggagagatgtggaataacact

SEQ ID NO: 3854 - DNA, 414 bp, Homo sapiens
aagctctggcctgacatgccaggcagctggctgcccaccaggccgtgtatgtgaggtcaaggctgaagcccggaactgctgggccacccgtggtctctgtgtcctgtctgtgggtgccaacctcaccacctttgatggggcccgtggtgccaccacctctcctggtgtctatgagctctcttcccgctgcccaggactacagaataccatcccctggtaccgtgtagttgccgaagtccagatctgccatggcaaaacggaggctgtgggccaggtccacatcttcttccaggatgggatggtgacgttgactccaaacaagggtgtgtgggtgaatggtctccgagtggatctcccagctgagaagttagcatctgtgtccgtgagtcgtacacctgatggctccctgctagt

SEQ ID NO: 3855 - DNA, 443 bp, Homo sapiens
attgggggctattgtctgtatcagtggacgtaaaaaggcaaatgcggcatgtcctaacttacaagaggggctaaataataggtacacatggacatagaatgtgaggctaggtgcagtggctcactcctataatcccagcactttggaaggccgaggtgggcagatcacttgaggccaggagttcgagaccagcctggtcaacatggtgaaaccctgtctctactaaaaatacaaaaatgagcctggtgtagtggcgggtgcctgtaatcccagttactagggaggctgaggcacgaaaatctcctgaacccaggaggcagagattactgtgagctgagattgcgccactgcactccagcctagacgacagagtgagactctgtctcaaaacaaacaagcaaaaacatggtcatagagtgtgaaataacagacactggagactc

SEQ ID NO: 3856 - DNA, 214 bp, Homo sapiens
acacattttaatttttgtaactgcttatttatgtgaaaagggttatttttacttagcttagctatgtcagccaatccgattgccttaggtgaaagaaaccaccgaaatccctcaggtcccttggtcaggagcctctcaagattttttttgtcagaggctccaaatagaaaataagaaaaggttttcttcattcatggctagagctagatttaac

SEQ ID NO: 3857 - DNA, 346 bp, Homo sapiens
aaccactagaggccgggcattgtggctcatgcctgtaatcccagcactttgggagaccaaggcaggcggattgcctgaggtcagaagtttgagaccagcctggccaacatagtgaaaccccatctctactaaatatacaaaaaaaattagccaggtgtgctggtgggcacctgtagtcccagctattcaagaggctgaggcaagagaatcccttgaacctgggaggcggaggttgcagtgagccgagattgtgccactgcactccagcctggtgacagagtgagactccgtctcaaaaaaaacaaaacaaaaacaaaaaaaccccactagatagaggtagaaatgg

SEQ ID NO: 3858 - DNA, 368 bp, Homo sapiens
tacggctgttagaagactacagaagggggccgaggcaggcggatcacctttggtcaagagttccgacaccagcctcgccaacatagtgaaatcccatctctactaaagatacaaaaattagctgggcatggtggtacatgcctgcagttccagctactcaagaggctgaggcaggagaatggcttgaacccaggaggcggaggttgcagtgagccaagatcatgccactgcactccaacctgggagatagagcgagactctgtctcaaaattaagaaacattagcacttaaactagaagaacgaatgaaatccacggcaagcagaaggaacaaggttgaaaagcagaaatcaatgaatcagaaaacag

SEQ ID NO: 3859 - DNA, 419 bp, Homo sapiens
tgaaatgaagttgatggatttagatgttgaacaacttggaattccagaacaggagtacagctgtgtagtaaagatgccttctggtgaatttgcacgtatatgccgagatctcagccatattggagatgctgttgtaatttcctgtgcaaaagacggagtgaaattttctgcaagtggagaacttggaaatggaaacattaaattgtcacagacaagtaatgtcgataaagaggaggaagctgttaccatagagatgaatgaaccagttcaactaacttttgcactgaggtacctgaacttctttacaaaagccactccactctcttcaacggtgacactcattatgtctgcagatgtaccccttgttgtagagtataaaattgcggatatgggacacttaaaatactacttggctccca

SEQ ID NO: 3860 - DNA, 466 bp, Homo sapiens
ggtgtgaccagcacctacggctggacagccaatatggagcggatcatgaaagcccaggcacttcgggacaactccaccatgggctatatgatggccaaaaagcacctggagatcaaccctgaccaccccattgtggagacgctgcggcagaaggctgaggccgacaagaatgataaggcagttaaggacctggtggtgctgctgtttgaaaccgccctgctatcttctggcttttcccttgaggatccccagacccactccaaccgcatctatcgcatgatcaagctaggtctaggtattgatgaagatgaattggcagcagaggaacccaatgctgcagttcctgatgagatcccccctctcgagggcgatgaggatgcgtctcgcatggaagaagtcgattaggttaggagttcatagttggaaaacttgtgcccttgtatagtgtccccatgggctcccactg

SEQ ID NO: 3861 - DNA, 440 bp, Homo sapiens
ttaggaaaaaccaattcttcttaaatttagttcatctttctttaaaagaacattaaatgtaaccattttgtcagatccatgtattttggagcataaaatgtatgctggtgtgaccaataaatataaaatatggtaattggaattaactccacaccatagtatgcattgttatacatactgtgtacctaattatgtatagcagtgtagtctcaattatatctgaaagtaattgtgactaacaagtatgctttgccttatttccacatttaaactacctgttaatataagggatttgtagtatcagcttgttgagcaatgactttgaatctagttttcaatgatcagaagcagcagttatttgagtgtatgaatggaatgatgatcactgtgctataatgtactgaaaccaccatattacagaaatatttactacatatttt

SEQ ID NO: 3862 - DNA, 406 bp, Homo sapiens
gctctctcgagtcactccggcgcagtgttgggactgtctgggtatcggaaagcaagcctacgttgctcactattacgtataatccttttcttttcaagatgcctgaggaagtgcaccatggagaggaggaggtggagatttttgcctttcaggcagaaattgcccaactcatgtccctcatcatcaataccttctattccaacaaggagattttccttcgggagttgatctctaatgcttctgatgccttggacaagattcgctatgagagcctgacagacccttcgaagttggacagtggtaaagagctgaaaattgacatcatccccaaccctcaggaacgtaccctgactttggtagacacaggcattggcatgaccaaagctgatctcataaataatttggg

SEQ ID NO: 3863 - DNA, 533 bp, Homo sapiens
gttgttaagcaaccttttccacgggatggataagaatactcctgtaagatacacagtgtattgcagccttattaaagtggcagcatcttgtggggccatccagtacatcccaactgagctggatcaagttagaaaatggatttctgactggaatctcaccactgaaaaaaagcacacccttttaagactactttatgaggcacttgtggattgtaagaagagtgatgctgcttcaaaagtcatggtggaattgctcggaagttacacagaggacaatgcttcccaggctcgagttgatgcccacaggtgtattgtacgagcattgaaagatccaaatgcatttctttttgaccaccttcttactttaaaaccagtcaagtttttggaaggcgagcttattcatgatcttttaaccatttttgtgagtgctaaattggcatcatatgtcaagttttatcagaataataaagacttcattgattcacttggcctgttacatgaacagaatatggcaaaaatgagactacttactt

SEQ ID NO: 3864 - DNA, 480 bp, Homo sapiens
caggccgggagacagatgaggcgagaggaggaggaggaggaggagaaggctctgggctcctctgcaaaaataaaaataaaaaaataaataaaattttaaaaataataaaaattcactatatacacatataaagaaataaaaagaagtctcagttgcagctatttgtcaaaattaatatccatttctttttatatacggcgaatattgcgcaattatagatctggattttgaaccacttaatgaagcggcaacaccaggtgttttgaggtgttggcattcttcgctgatttggctgttcccaatgtttacattatttaatcttgcaaaaatggttctgtgcacttggatgtgaaatgctgtccagttttattttttttatgttgttatccttggatgtacaaaaaattcagaaaatgatctctgtagatattctgttttattttggtcatctttagaagttatcaggaatgtgtttaaaac

SEQ ID NO: 3865 - DNA, 318 bp, Homo sapiens; identical to SEQ ID NO: 987

SEQ ID NO: 3866 - DNA, 479 bp, Homo sapiens
gcctttctcgttccccggccatcttagcggctgctgttggttgggggccgtcccgctcctaaggcaggaagatggtggccgcaaagaagacgaaaaagtcgctggagtcgatcaactctaggctccaactcgttatgaaaagtgggaagtacgtcctggggtacaagcagactctgaagatgatcagacaaggcaaagcgaaattggtcattctcgctaacaactgcccagctttgaggaaatctgaaatagagtactatgctatgttggctaaaactggtgtccatcactacagtggcaataatattgaactgggcacagcatgcggaaaatactacagagtgtgcacactggctatcattgatccaggtgactctgacatcattagaagcatgccagaacagactggtgaaaagtaaaccttttcacctacaaaatttcacctgcaaaccttaaacctgcaaaattttcctttaata

SEQ ID NO: 3867 - DNA, 232 bp, Homo sapiens; identical to SEQ ID NO: 988

SEQ ID NO: 3868 - DNA, 477 bp, Homo sapiens
gagggtgagctctgcccggctgcagggatggcggggaggggtaagctcatcgcagtgatcgggacgaggacacggtgactggtttcctgctgggcggcataggggagcttaacaagaaccgccatcccaatttcctggtggtggagaaggatacaaccatcaatgagatcgaagacactttccggcaatttctaaaccgggatgacattggcatcatcctcatcaaccagtacatcgcagagatggtgcggcatgccctggacgcccaccagcagtccatccccgctgtcctggagatcccctccaaggagcacccatatgacgccgccaaggactccatcctgcgcagggccaggggcatgttcactgccgaagacctgcgctaggggactcctcatagccctcagcccttccctcgtttccaggcctctccccaggcttgccatcagccttctttactttttgagcctctgattt

SEQ ID NO: 3869 - DNA, 372 bp, Homo sapiens
ggcccagacgaccccaccatttccccctcatacacctattaccgtccaggggtgaacctcagcctctcctgccatgcagcctctaacccacctgcacagtattcttggctgattgatgggaacatccagcaacacacacaagagctctttatctccaacatcactgagaagaacagcggactctatacctgccaggccaataactcagccagtggccacagcaggactacagtcaagacaatcacagtctctgcggagctgcccaagccctccatctccagcaacaactccaaacccgtggaggacaaggatgctgtggccttcacctgtgaacctgaggctcagaacacaacctacctgtggtgggtaaat

SEQ ID NO: 3870 - DNA, 322 bp, Homo sapiens
gggtgccgaggctcacgcctgtaatcccagcactttgggaggccaaggcaggcggagcacaaggtcaagagatcgagaccatcctggctaacacggtgaaaccccgtctctactaaaaatacaaaaacttacccgggtgtggtggtgggtgcctgtagtcccagctactagggaggctgaggcaggagaatggcttgaacccgggaggcggagcttgcagtgagccaagatcgcgccaccgcactccagcctgggtgacagagcaagacctccatctcaaaaaaaaaatacatgcagggccgggggcagaggctcacgcctg

SEQ ID NO: 3871 - DNA, 70 bp, Homo sapiens
agctgacgcaaacatgcagatctttgtgaagaccctcactggcaaaaccatcacccttgaggtcgggccc

SEQ ID NO: 3872 - DNA, 61 bp, Homo sapiens
tatctcatttggtctcagagctgtgaatcagccagcaatattttagttgcaaatcactgaa

SEQ ID NO: 3873 - DNA, 377 bp, Homo sapiens; identical to SEQ ID NO: 2896
  misc_feature 349: n = A,T,C or G

SEQ ID NO: 3874 - DNA, 424 bp, Homo sapiens
ggcttcctgcttcgcctccgcgcctcgcgctatgggacagagcccccgatccgccagcaccacctgaggatccagaaaccgccccggcgatggaagaggatcaggagctggagagaaaaatatctggattgaagacctcaatggctgaaggcgagaggaagacagccctggaaatggtccaggcagctggaacagatagacactgtgtgacatttgtattgcacgaggaagaccataccctaggaaattccctacgttacatgatcatgaagaacccggaagtggaattttgtggttacactacgacccatccttcagagagcaaaattaatttacgcattcagactcgaggtacccttccagctgttgagccatttcagagaggcctgaatgagctcatgaatgtctgccaacatgtgcttga

SEQ ID NO: 3875 - DNA, 422 bp, Homo sapiens
tggctggatgggcttggactgtggtcctgaaagcagcaagaagtatgctgaggctgtcactcgggctaagcagattgtgtggaatggtcctgtgggggtatttgaatgggaagcttttgcccggggaaccaaagctctcatggatgaggtggtgaaagccacttctaggggctgcatcaccatcataggtggtggagacactgccacttgctgtgccaaatggaacacggaggataaagtcagccatgtgagcactgggggtggtgccagtttggagctcctggaaggtaaagtccttcctggggtggatgctctcagcaatatttagtactttcctgccttttagttcctgtgcacagcccctaagtcaacttagcattttctgcatctccacttggcattagctaaaaccttccatgtca

SEQ ID NO: 3876 - DNA, 57 bp, Homo sapiens
ctcttgaaaggacacagttgtactaccccgcaatgcaaatgcctgcttgcgaaatgt

SEQ ID NO: 3877 - DNA, 434 bp, Homo sapiens
ggtcgagaagcagctacccaagctccaggagcttccgaagaaacaggaccagagagggaaggtgacctgaaagtcacagaataattttttagagctgaacaagaatccaagcctggaactgcagagacgagagatctttctgctgtctatactcttggaaagcacatcctaagatctttgcagattatcctgtggaaggaaaatgcctaaagtcaaaagaagccggaaagcacccccagatggctgggagttgattgagccaacactggatgaattagatcaaaagatgagagaagctgaaacagaaccgcatgagggaaagaggaaagtggaatctctgtggcccatcttcaggatccaccaccagaaaacccgctacatcttcgacctcttttacaagcggaaagccatcagcagagaactctatgaatatt

SEQ ID NO: 3878 - DNA, 459 bp, Homo sapiens
gtacgggaaggcgaagaggagatagagaagatagggaaattagaagataaaaacatacttttagaagaaaaaagataaatttaaacctgaaaagtaggaggcagacgaaaaaagacaggctatgaaacaaaaagctaagggcaaaatgtacaaacttagaagaaaattggaagatacaaacaagatggaaaatgaagatattgacaggagtttcagatagaaaatgaacaacaagctaagacatgtattggagaagtatagaagatagagaaatgtaaagccaagaattggatgaaatagcactgaaaaaatgaggagattattggtaaccaatctattttaaaagcccatcaatttaatttctggtggtgcagaagttagaaggcaaagcttgagaagatgagggtgtttacgtagaccagaaccaatttagaagaatacttgaagctagaaggggaa

SEQ ID NO: 3879 - DNA, 460 bp, Homo sapiens
caaatcaccgacctgaaggcggaaattcacgggggcagtctcattaatctgacttggacagctcctggggatgattatgaccatggaacagctcacaagtatatcattcgaataagtacaagtattcttgatctcagagacaagttcaatgaatctcttcaagtgaatactactgctctcatcccaaaggaagccaactctgaggaagtctttttgtttaaaccagaaaacattacttttgaaaatggcacagatcttttcattgctattcaggctgttgataaggtcgatctgaaatcagaaatatccaacattgcacgagtatctttgtttattcctacacagactccgccagagacacctagtcctgatgaaacgtctgctccttgtcctaatattcatatcaacagcaccattcctggcattcacattttaaaaattatgtggaagtggataggag

SEQ ID NO: 3880 - DNA, 446 bp, Homo sapiens
ggggaggctatctatgcctccaaaccatggcgggtgcaatgggaaaagaacacaacatctgtatggtatacctcaaagggatcggctgtttatgccatttttctgcactggccagaaaatggagtcttaaaccttgaatcccccataactacctcaactacaaagataacaatgctgggaattcaaggagatctgaagtggtccacagatccagataaaggtctcttcatctctctaccccagttgccaccctctgctgtccccgcagggtttgcttggactataaagctgacaggagtgaagtaatcatttgagtgcaagaagaaagaggcgctgctcactgttttcctgcttcagtttttctcttatagtaccatcactataatcaacgaacttctcttctccacccagagatggcttttccaacacattttaattaaaggaac

SEQ ID NO: 3881 - DNA, 292 bp, Homo sapiens
tatttaaattattgttaaagaatacacaatttggggtattgggatttttctccttttctctgagacattccaccattttaatttttgtaactgcttatttatgtgaaaagggttatttttacttagcttagctatgtcagccaatccgattgccttaggtgaaagaaaccaccgaaatccctcaggtcccttggtcaggagcctctcaagattttttttgtcagaggctccaaatagaaaataagaaaaggttttcttcattcatggctagagctagatttaactcagtttc

SEQ ID NO: 3882 - DNA, 349 bp, Homo sapiens
  misc_feature 349: n = A,T,C or G
gagaccgcgctgggttgccgctgccgctgccgccatcgtgccagcccctcgggtctccgtgaggccgggtgacgctccagaatgggagacaagccaatttgggagcagattggatccagcttcattcaacattactaccagttatttgataatgatagaacccaactaggcgcaatttacattgacgcgtcatgccttacgtgggaaggacaacagttccaggggaaagctgccattgtggagaagttgtctagccttccgttccagaaaattcagcacagcatcaccgcgcaggaccatcagcccactccagatagctgcatcatcagcatggttgtgggccagcttn

SEQ ID NO: 3883 - DNA, 349 bp, Homo sapiens; identical to SEQ ID NO: 3882
  misc_feature 349: n = A,T,C or G

SEQ ID NO: 3884 - DNA, 292 bp, Homo sapiens
gaaggggcctgggtgacagagtgagactccacctcaaaaataaccccatctctactaaaaatacaaacttagccgagcatggtggtgcatgcctgtaatcctagctattcgggaggctgaggcaggagaatcgtttgaacccgggaggcagaggttgcagtgagctgagatcatgccaccgcactctagcctggacaacaagagggaagctgcctctgaataaaaaaagaaaaataatttgaaacggtgcccagtcccaaaatgtttaaatctacctattacctgggagcgt

SEQ ID NO: 3885 - DNA, 504 bp, Homo sapiens
gcagagagtaaaaaacatgacctggtagaaggaagagaggcaaaggaaactgggtggggaggatcaattagagaggaggcacctgggatccaccttcttccttaggtcccctcctccatcagcaaaggagcacttctctaatcatgccctcccgaagactggctgggagaaggtttaaaaacaaaaaatccaggagtaagagccttaggtcagtttgaaattggagacaaactgtctggcaaagggtgcgagagggagcttgtgctcaggagtccagccgtccagcctcggggtgtaggtttctgaggtgtgccattggggcctcagccttctctggtgacagaggctcagctgtggccaccaacacacaaccacacacacacaaccacacacacaaatgggggcaaccacatccagtacaagcttttacaaatgttattagtgtccttttttatttctaatgccttgtcctcttaaaagttattttatttgtcattattattt

SEQ ID NO: 3886 - DNA, 464 bp, Homo sapiens
ataatccggctgtaccagcgtcctggtcccggaactgccaaagccaagaactgaccggggccagggctgccatggtctccttgcctgctccaaggcacaggatacagtgggaatcttgagactctttggccatttcccatggctcagactaagctccaagcccttcaagagttccaagggaacacttgaaccatggacaagactctctcaagatggcaaatggctaattgaggttctgaagttcttcagtacattgctgtaggtcctgaggccagggatttttaattaaatggggtgatgggtggccaataccacaattcctgctgaaaaacactcttccagtccaaaagcttcttgatacagaaaaaagagcctggatttacagaaacatatagatctggtttgaattccagatcgagtttacagttgtgaaatcttgaaggtattacttaacttcactacag

SEQ ID NO: 3887 - DNA, 360 bp, Homo sapiens
gcctttttgctgtaagcccgggtggttgctgccgaaatgggcaagttcatgaaacctgggaaggtggtgcttgtcctggctggacgctactccggacgcaaagctgtcatcgtgaagaacattgatgatggcacctcagatcgcccctacagccatgctctggtggctggaattgaccgctacccccgcaaagtgacagctgccatgggcaagaagaagatcgccaagagatcaaagataaaatcttttgtgaaagtgtataactacaatcacctaatgcccacacggtactctgtggatatccccttggacaaaactgtcgtcaataaggatgtcttcagagatcctgctcttaaacgc

SEQ ID NO: 3888 - DNA, 355 bp, Homo sapiens; identical to SEQ ID NO: 990

SEQ ID NO: 3889 - DNA, 426 bp, Homo sapiens
gagatggagtctcactgtgacacccaggctggagtgcaatggcgctgtctcggctcactgcaacctcctcctcccgggttcaagcgattctccagcttcagcctcctgagcagctgggattacaggcgcccgccaccacgcccggctaatttttgtatttttagtagagacgggggtttcaccacattggtcaggctagtcttgaactcctgacctcaagtgatctgcccgcttcgacctcccaaagtgctgggattacaggcgtaagccatcgcaccccaccattctagtttttttttttggagacagggtctctgtcgcccaggctggaatggcagtgggcagtggcacaccctcctccactattgcctgtctggcccaaactagtgtcatctttcctctcagcaccacagcctcctctttggt

SEQ ID NO: 3890 - DNA, 591 bp, Homo sapiens
tcggcacgaggctgctttctccaatgagtgtaaatgcagtgatgaaagtgattgacccagccacagccaccagtgtagatcttagagatattaaaatagttaagaagcttggtgggacaattgatgactgtgagttggtggaagggctggttctcacccaaaaagtgtcaaattctggcataaccagagttgaaaaggccaagattgggcttattcagttttgcttatctgctcccaaaacagacatggataatcaaatagtggtttctgactatgcccagatggaccgagtgctgcgagaagagagagcctatattttaaatttagtgaagcaaattaaaaaaacaggatgtaatgtccttctcatacagaaatctattctaagagatgctcttagtgatcttgcattacactttctgaataaaatgaagatcatggtgattaaggatattgaaagagaagacattgaattcatttgtaagacaattggaaccaagccagttgctcatattgaccaatttactgctgacatgctgggttctgctgagttagctgaggaggtcaatttaaatggttctggcaaactgctca

SEQ ID NO: 3891 - DNA, 598 bp, Homo sapiens
ggaatttggccctcgaggccaagaattcggcacgagccaggctttaggtatcaccacggaaaggtccaggggcaccattgaaatcctgagtgatgtgcagctgatcaagactggagacaaagtgggagccagcgaagccacgctgctgaacatgctcaacatctcccccttctcctttgggctggtcatccagcaggtgttcgacaatggcagcatctacaaccctgaagtgcttgatatcacagaggaaactctgcattctcgcttcctggagggtgtccgcaatgttgccagtgtctgtctagattggctacccaactgttgcatcagtaccccattctatcatcaacgggtacaaacgagtcctggccttgtctgtggagacggattacaccttcccacttgctgaaaaggtcaaggccttcttggctgatccatctgcctttgtggctgctgcccctgtggctgctgccaccacagctgctcctgctgctgctgcagccccagctaaggttgaagccaaggaagagtcggaggagtcggacgaggatatgggatttggtctctttgactaatcaccaaaaagcaaccaacttag

SEQ ID NO: 3892 - DNA, 311 bp, Homo sapiens
gctctttccgccatctttccgcgccgccacaatggtgcgcatgaatgtcctggcagatgctctcaagagtatcaacaatgccgaaaagagaggcaaacgccaggtgcttattaggccgtgctccaaagtcatcgtccggtttctcactgtgatgatgaagcatggttacattggcgaatttgaaatcattgatgaccacagagctgggaaaattgttgtgaacctcacaggcaggctaaacaagtgtggggtgatcagccccagatttgacgtgcaactcaaagacctggaaaaatggcagaataatctgc

SEQ ID NO: 3893 - DNA, 458 bp, Homo sapiens
gggtaggaacctgcttggtcgcgtctgagggggcttgtaggtggctctggctgaaacaggcgcctgcgagagtctgtaggagggaaaccgccatggacgatcagggttgccctcggtgtaagaccaccaaatatcggaacccctccttgaagctgatggtgaatgtgtgcggacacactctctgtgaaagttgtgtatatttactgtttgtgagaggagctggaaactgccctgagtgtggtactccactcagaaagggcaacttcagggtacaactctttgaagatcccactgttgacaaggaggttgacatcaggaaaaaagtgctaaagatatacaataaaagggaagaagatcttcctagtctaagagaatacaatgatttcttggaagaagtggaagaaattgttttcaacttgaccaacaatgtggatttggacaacaccaaaaagaaaatg

SEQ ID NO: 3894 - DNA, 428 bp, Homo sapiens
gggtaccggaccctgcagccgcagagatgttgatgcctaagaagaaccggattgccatttatgaactcctttttaaggagggagtcatggtggccaagaaggatgtccacatgcctaagcacccggagctggcagacaagaatgtgcccaaccttcatgtcatgaaggccatgcagtctctcaagtcccgaggctacgtgaaggaacagtttgcctggagacatttctactggtaccttaccaatgagggtatccagtatctccgtgattaccttcatctgcccccggagattgtgcctgccaccctacgccgtagccgtccagagactggcaggcctcggcctaaaggtctggagggtgagcgacctgcgagactcacaagaggggaagctgacagagatacctacagacggagtgctgtgccacct

SEQ ID NO: 3895 - DNA, 508 bp, Homo sapiens
gtgcacttactttcatattttgcagctgttaatagaagtcttaaacatttaaaatttaactaattcacacaacctccaccaagtatcagtaaataaacttctaaacaataaaaatggataaacatggtcaggttgttaggttaagagctaaaaatttcattttgcttccatggttgcaaccatgagtcttaaggccttcaaagcataaacatcacagaacacctatcacaaaccacaaaccaaccacgggaaaaccctttttatactgtgtatcttctgtatttcattaaacctaataagccatcagttgtaagatgcatcctaattcagagatgtcacaaagtgaaataagtatctctggatcaataaaatatggtatgtatatatacccgagatatgagaggaaactatttaccagtttgaattacttccatactattgtgccaaacaacaattaagtgtcaaaacattgaaattttatgtaggtaagctttttattattggtttc

SEQ ID NO: 3896 - DNA, 226 bp, Homo sapiens
gggaggggctctgcgttctgtagtggcgctgcttgggcccgtggcggattgtaagctgctggttttgcggctgggaagagcggcgagagggttcggcatttttcgtcgggatccccgcaaggatgagtgctgccagagagtctcacccgcatggggtgaagcgttcagcctccccagacgacgatctgggatctagcaattgggaggcagcagacttgggtaatga

SEQ ID NO: 3897 - DNA, 158 bp, Homo sapiens
ggtcttccggtctttctggtctcggccgcagaagcgagatgacgaagggaacgtcatcgtttggaaagcgtcgcaataagacgcacacgttgtgccgccgcttgggctctaaggcctaccaccttcaaaagtcgacctgtggcaaatgtggctaccct

SEQ ID NO: 3898 - DNA, 403 bp, Homo sapiens
ggattctgctttccaactgcctgactgcttgttcgtctcactggtgtgagctccagcatcccctttgctcgaaatggaccccaactgctcttgcgccactggtggctcctgcacgtgcgccggctcctgcaagtgcaaagagtgcaaatgcacctcctgcaagaagagctgctgttcctgctgccccgtgggctgtgccaagtgtgcccagggctgcgtctgcaaaggggcatcggagaagtgcagctgctgtgcctgatgtgggaacagctcttctcccagatgtaaatagaacaacctgcacaacctggatttttttaaaaatacaacactgagccatttgctgcatttctttttatactaaatatgtgactgacaataaaaacaattttgactttataaa

SEQ ID NO: 3899 - DNA, 116 bp, Homo sapiens
ggcggcgacgacccattcgagcgtctgccctatcaactttcgatggtagtcgccgtgcctaccatggtgaccacgggtgacggggaatcacggttctattccggagagggagcctg

SEQ ID NO: 3900 - DNA, 62 bp, Homo sapiens
tcaccattacaggccatgctgagacaaagcagctgacagaaatgctacccagcatcttaaac

SEQ ID NO: 3901 - DNA, 411 bp, Homo sapiens
gggcttctttttaatttaagcatctgcagctgtaagcttccctttagcatgggtttgagatctttcttctttttaatttaaggatctgtagctgtaagcttccctttagcatgggtttgagatctttcttctttttaatttaagcatctggagctgtaagcttccctttagcactgcctttgttgcctcctcctgagtttgggtatgtcatggtttcgttttcatttgcttaaacattttttgtcctattgtaatataattgtgttgtttttaataaaggtaattaatgaaacacataatgaattgtacttctgtttttataacattttaagcattcttaactcagaaatgtaaattttagaaaaaaattccaggccaggcacagtggctcacacctgtaatcccagcact

SEQ ID NO: 3902 - DNA, 215 bp, Homo sapiens
gtagatactatgtttgtaagtctatagctaagcaacttaagccaaaaaggtctttcaactgaagctttaatcaacttattttggagatgttctcttcccttatctcatgcgtcatccctaaaataataagatacatgggatcaaatagcccttgccttatcaacacaaatcagttggaaaattatggtttgagtcctgttgctgccatggcttct

SEQ ID NO: 3903 - DNA, 467 bp, Homo sapiens
gacacagtgctggcgcccaagccgccgccgccagatcggtgccgattcctgccctgccccgaccgccagcgcgaccatgtcccatcactgggggtacggcaaacacaacggacctgagcactggcataaggacttccccattgccaagggagagcgccagtcccctgttgacatcgacactcatacagccaagtatgacccttccctgaagcccctgtctgtttcctatgatcaagcaacttccctgaggatcctcaacaatggtcatgctttcaacgtggagtttgatgactctcaggacaaagcagtgctcaagggaggacccctggatggcacttacagattgattcagtttcactttcactggggttcacttgatggacaaggttcagagcatactgtggataaaaagaaatatgctgcagaacttcacttggttcactggaacaccaaatatggggattttg

SEQ ID NO: 3904 - DNA, 422 bp, Homo sapiens
gtagtttttagtaggaaagtgccattcctgtccttaaggcacagtctcatcagaagtctaatacctgggcaggtttataacatcctgagagccagcctgacattagacagaataccctttgtaatacattggaaatttttactcatgcctttttgtttaggataaataggtaagcacaaagagctcttcaaaatcagaaaaaacaataggagtccttccttgtcttttctgtgatctctgtccttgtttctgagactttctctaccattaagctctattttagctttcagttattctagtttgtttcccatggaatctgtcctaaactggtgtttttgtcagtgacagtcttgccagtcaacaatttctaacagcattttaaatgagtttgatgtacagtaaatattgatgacaatgacagc

SEQ ID NO: 3905 - DNA, 512 bp, Homo sapiens; identical to SEQ ID NO: 995

SEQ ID NO: 3906 - DNA, 274 bp, Homo sapiens
gctttttttgctgcgtctactgcgagaatgaagactattctcagcaatcagactgtcgacattccagaaaatgtcgacattactctgaagggacgcacagttatcgtgaagggccccagaggaaccctgcggagggacttcaatcacatcaatgtagaactcagccttcttggaaagaaaaaaaagaggctccgggttgacaaatggtggggtaacagaaaggaactggctaccgttcggactatttgtagtcatgtacagaacatgatcaagg

SEQ ID NO: 3907 - DNA, 499 bp, Homo sapiens
cagaaggggctctttcccttcggtgtgccactgaagatcctggtgtcgccatgggccgccgccccgcccgttgttaccggtattgtaagaacaagccgtacccaaagtctcgcttctgccgaggtgtccctgatgccaagattcgcatttttgacctgggtcggaaaaaggcaaaagtggatgagtttccgctttgtggccacatggtgtcagatgaatatgagcagctgtcctctgaagccctggaggctgcccgaatttgtgccaataagtacatggtaaaaagttgtggcaaagatggcttccatatccgggtgcggctccaccccttccacgtcatccgcatcaacaagatgttgtcctgtgctggggctgacaggctccaaacaggcatgcgaggtgcctttggaaagccccagggcactgtggccagggttcacattggccaagttatcatgtccatccgcaccaagctgcagaacaaggagcatgtgattga

SEQ ID NO: 3908 - DNA, 442 bp, Homo sapiens
gattgatcgccgttctggtaaaaagctggaagatggccctaaattcttgaagtctggtgatgctgccattgttgatatggttcctggcaagcccatgtgtgttgagagcttctcagactatccacctttgggtcgctttgctgttcgtgatatgagacagacagttgcggtgggtgtcatcaaagcagtggacaagaaggctgctggagctggcaaggtcaccaagtctgcccagaaagctcagaaggctaaatgaatattatccctaatacctgccaccccactcttaatcagtggtggaagaacggtctcagaactgtttgtttcaattggccatttaagtttagtagtaaaagactggttaatgataacaatgcatcgtaaaaccttcagaaggaaaggagaatgttttgtggaccactttggttttcttttttgcgtg

SEQ ID NO: 3909 - DNA, 328 bp, Homo sapiens
tgtctctagggtgatacgtgggtgagaaaggtcctggtccgcgccagagcccagcgcgcctcgtcgccatgcctcggaaaattgaggaaatcaaggacttcctgctcacagcccgacgaaaggatgccaaatctgtcaagatcaagaaaaataaggacaacgtgaagtttaaagttcgatgcagcagatacctttacaccctggtcatcactgacaaagagaaggcagagaaactgaagcagtccctgccccccggtttggcagtgaagtaactgaaatgaaccagacacactgattggaactgtattatattaaaatactaaaaatc

SEQ ID NO: 3910 - DNA, 365 bp, Homo sapiens
gagctcgcccaccgcccgccccagcagtggctgcaccatgcacgtgaacggcaaagtggcgctggtgaccggcgcggctcatggcataggcagagcctttgcagaggcgctgctgcttaagggcgccaaggtagcgctggtggattggaatcttgaagcaggtgtacagtgtaaagctgccctggatgagcagtttgaacctcagaagactctgttcatccagtgcgatgtggctgaccagcaacaactgagagacacttttagaaaagttgtagaccactttggaagactggacattttggtcaataatgctggagtgaatgatgagaaaaactgggaaaaaactctgcaaattaatttggttt

SEQ ID NO: 3911 - DNA, 469 bp, Homo sapiens
caagtgtcgtggacttcgtactgctaggaagctccgtagtcaccgacgagaccagaagtggcatgataaacagtataagaaagctcatttgggcacagccctaaaggccaacccttttggaggtgcttctcatgcaaaaggaatcgtgctggaaaaagtaggagttgaagccaaacagccaaattctgccattaggaagtgtgtaagggtccagctgatcaagaatggcaagaaaatcacagcctttgtacccaatgacggttgcttgaactttattgaggaaaatgatgaagttctggttgctggatttggtcgcaaaggtcatgctgttggtgatattcctggagtccgctttaaggttgtcaaagtagccaatgtttctcttttggccctatacaaaggcaagaaggaaagaccaagatcataaatattaatggtgaaaacactgtagtaataaattttcatatga

SEQ ID NO: 3912 - DNA, 410 bp, Homo sapiens
aatgggggcctcaaagatagtaatttcttatgtcctaagctagggggtatgcatatgggagttcgttttattgccattctgtatgactcacacatgtcagaaatattctttggtcttgtattttaaaatacaagtgggccaggtgtggtggctcacacctgtaatcccagcactttgggaggccgagtcaagcggatcatctgaggtcaggagttcaagaccagcctggccaacatggtgaaaccccgtctctactaaaaatagaaaaattagctgggtgtggtggcacacacctgtaaccccttgggagactgagggaggagaatcccttgaacccaggaggtggaggttgcagtcagctgagattgcgccactgcactccagcctgggtgacagagtgagactctgtc

SEQ ID NO: 3913 - DNA, 335 bp, Homo sapiens
acagcaagactctaatagacacacagacagataaattttaaagtttccattaaaaataagaactattggcagggtgcggtggctcacacctgtaatgccagcactttgggaggccaaggtgggcggatcatgaggtcaggagatcgagaccatcctggctaacacggtgaaaccccatctctactgaaaatacaaaaaaattagccaggcgtggtggtgggtgcctgtagtcccagctactcgggaggctgaggcaggagaatggcgtgaaccctggaggcggagcttgcagtgagccgaggtcgtgccactgtgctccagcctgggcgacagag

SEQ ID NO: 3914 - DNA, 494 bp, Homo sapiens
gactgccgcggcgccttgagtctccgggccgccttgccatggctgcccgtggtgtcatcgctccagttggcgagagtttgcgctacgctgagtacttgcagccctcggccaaacggccagacgccgacgtcgaccagcagggactggtaagaagtttgatagctgtaggactgggtgttgcagctcttgcatttgcaggtcgctacgcatttcggatctggaaacctctagaacaagttatcacagaaactgcaaagaagatttcaactcctagcttttcatcctactataaaggaggatttgaacagaaaatgagtaggcgagaagctggtcttattttaagtgtaagcccatctgctggcaaggctaagattagaacagctcataggagagtcatgattttgaatcacccagataaaggtggatctccttacgtagcagccaaaataaatgaagcaaaagacttgctataaacaaccaccaaacattgatgc

SEQ ID NO: 3915 - DNA, 506 bp, Homo sapiens
ggcacgaggggccgcacctcaggggtgatggagccgcagagctgactgatgagggcgagttggtgctgctccgtgttgccctgcatgatggggctgcgggtccacatctctgccatgatgcacccagcaccccacaggtcaatgggggggccgtagtcccgctccccgagcaacagctccgggggccggtaccagagtgtcaccacacggttggtgtagcggttgggctggctgttcttggccaggctgaaggcccgggccagcccaaagtctgccagcttcaggaccccatcacgagtgataagcacattagcagccttcatgtccctatgcaggatcttgtttctgtggatgtactaaaggccgttaagcagcatctgcatcaccctcttgatctcagacagcgtgaacttgaccaaaacattgctcaacagcccatcaaggtcatgctcgcagaagtcgaacaccaggtatatactacccttgcagaggttatagggggaagc

SEQ ID NO: 3916 - DNA, 609 bp, Homo sapiens
actatagggaatttggccctcgaggccaagaattcggcacgagggacataccacgtaggagaacagtggcagaaggaatatctcggtgccatttgctcctgcacatgctttggaggccagcggggctggcgctgtgacaactgccgcagacctgggggtgaacccagtcccgaaggcactactggccagtcctacaaccagtattctcagagataccatcagagaacaaacactaatgttaattgcccaattgagtgcttcatgcctttagatgtacaggctgacagagaagattcccgagagtaaatcatctttccaatccagaggaacaagcatgtctctctgccaagatccatctaaactggagtgatgttagcagacccagcttagagttcttctttctttcttaagccctttgctctggaggaagttctccagcttcagctcaactcacagcttctccaagcatcaccctgggagtttcctgagggttttctcataaatgagggctgcacattgcctgttctgcttcgaagtattcaataccgctcagtattttaaatgaagtgattctaagatttggtttgggatcaataggaaagcatatgc

SEQ ID NO: 3917 - DNA, 553 bp, Homo sapiens
gaatttggccctcgaggccaagaattcggcacgaggtttcctgcgcaggagccgcagggccgtaggcagccatggcgcccagccggaatggcatggtcttgaagccccacttccacaaggactggcagcggcgcgtggccacgtggttcaaccagccggcccggaagatccgcagacgtaaggcccggcaagccaaggcgcgccgcatcgctccgcgccccgcgtcgggtcccatccggcccatcgtgcgctgccccacggttcggtaccacacgaaggtgcgcgccggccgcggcttcagcctggaggagctcagggtggccggcattcacaagaaggtggcccggaccatcggcatttctgtggatccgaggaggcggaacaagtccacggagtccctgcaggccaacgtgcagcggctgaaggagtaccgctccaaactcatcctcttccccaggaagccctcggcccccaagaagggagacagttctgctgaagaactgaaactggccacccagctgaccggaccggtcatgcccgtccggaacgtcta

SEQ ID NO: 3918 - DNA, 480 bp, Homo sapiens
gacagaagggccgaaagcacagtaatcactggtgtcgatattgtcatgaaccatcacctgcaggaaacaagtttcacaaaagaagcctacaagaagtacatcaaagattacatgaaatcaatcaaagggaaacttgaagaacagagaccagaaagagtaaaaccttttatgacaggggctgcagaacaaatcaagcacatccttgctaatttcaaaaactaccagttctttattggtgaaaacatgaatccagatggcatggttgctctattggactaccgtgaggatggtgtgaccccatatatgattttctttaaggatggtttagaaatggaaaaatgttaacaaatgtggcaattattttggatctatcacctgtcatcataactggcttctgcttgtcatccacacaacaccaggacttaagacaaatgggactgatgtcatcttgagctcttcatttattttgactgtgattta

SEQ ID NO: 3919 - DNA, 506 bp, Homo sapiens
gactcggcgggcgctgttgagggagtcgggccgcgactgtggtcgtttttataccttcccgcgcggacgccggcgctgccaacggaagggcggagacggagtttcgtcatgttggccaggcccatttgagatctttgaagatatcctcaacgtgaggctctgctgccatgaaggtgaagattaagtgctggaacggcgtggccacttggctctgggtggccaacgatgagaactgtggcatctgcaggatggcatttaacggatgctgccctgactgcaaggtgcccggcgacgactgcccgctggtgtggggccagtgctcccactgcttccacatgcattgcatcctcaagtggctgcacgcacagcaggtgcagcagcactgccccatgtgccgccaggaatggaagttcaaggagtgaggcccgacctggctctcgctggaggggcatcctgagactccttcctcatgctggcgccgatggctgctggggacagcgcccctg

SEQ ID NO: 3920 - DNA, 499 bp, Homo sapiens
agtttgctcaatttgaaaaggagaaaatgaatgccaaatgggacacgggtgaaaatcctatttataagagtgccgtatcaactgtggtcaatccgaagtatgagggaaaatgagtactgcccgtgcaaatcccacaacactgaatgcaaagtagcaatttccatagtcacagttaggtagctttagggcaatattgccatggttttactcatgtgcaggttttgaaaatgtacaatatgtataatttttaaaatgttttattattttgaaaataatgttgtaattcatgccagggactgacaaaagacttgagacaggatggttattcttgtcagctaaggtcacattgtgcctttttgaccttttcttcctggactattgaaatcaagcttattggattaagtgatatttctatagcgattgaaagggcaatagttaaagtaatgagcatgatgagagtttctgttcatcatgtattaaaactgatttttagctttac

SEQ ID NO: 3921 - DNA, 498 bp, Homo sapiens
gcgtgctaagctagcgccgtcgtcgtctcccttcagtcgccatcatgattatctaccgggacctcatcagccacgatgagatgttctccgacatctacaagatccgggagatcgcggacgggttgtgcctggaggtggaggggaagatggtcagtaggacagaaggtaacattgatgactcgctcattggtggaaatgcctccgctgaaggccccgagggcgaatgtaccgaaagcacagtaatcactggtgtcgatattgtcatgaaccatcacctgcaggaaacaagtttcacaaaagaagcctacaagaagtacatcaaggattacatgaaatcaatcagagggaaacttgaagaacagagaccagaaagagtaaaaccttttatgacaggggctgcagaacaaatcaagcacatccttgctaatttcaaaaactaccagttctttattggtgaaaacatgaatccagatggcatggttgctctattggactacc

SEQ ID NO: 3922 - DNA, 447 bp, Homo sapiens
cagaagggcaatggcagcatctacaaccctgaagtgcttgatatcacagaggaaactctgcattctcgcttcctggagggtgtccgcaatgttgccagtgtctgtctgcagattggctacccaactgttgcatcagtaccccattctatcatcaacgggtacaaacgagtcctggccttgtctgtggagacggattacaccttcccacttgctgaaaaggtcaaggccttcttggctgatccatctgcctttgtggctgctgcccctgtggctgctgccaccacagctgctcctgctgctgctgcagccccagctaaggttgaagccaaggaagagtcggaggagtcggacgaggatatgggatttggtctctttgactaatcaccaaaaagcaaccaacttagccagttttatttgcaaaacaaggaaataaaggcttacttcttt

SEQ ID NO: 3923 - DNA, 522 bp, Homo sapiens
cagaagggggccttttccgcccgctcccccctccccccgagcgccgctccggctgcaccgcgctcgctccgagtttcaggctcgtgctaagctagcgccgtcgtcgtctcccttcagtcgccatcatgattatctaccgggacctcatcagccacgatgagatgttctccgacatctacaagatccgggagatcgcggacgggttgtgcctggaggtggaggggaagatggtcagtaggacagaaggtaacattgatgactcgctcattggtggaaatgcctccgctgaaggccccgagggcgaaggtaccgaaagcacagtaatcactggtgtcgatattgtcatgaaccatcacctgcaggaaacaagtttcacaaaagaagcctacaagaagtacatcaaagattacatgaaatcaatcaaagggaaacttgaagaacagagaccagaaagagtaaaaccttttatgacaggggctgcagaacaaatcaagcacatccttgctaatttcaaaaactacc

SEQ ID NO: 3924 - DNA, 352 bp, Homo sapiens
  misc_feature 40, 51: n = A,T,C or G
aacagagtctctgtctgttgtgcaggctggagtgcaatgncacgatctcanctcactgcaacctccgcctcccaggttcaagcaattctcctgcttcagccttctgagtagctgggattacaggcgcctgccacctcacctggctaatttttgtatttttgtagagaaggggtttcaccatgttggccacgttagttatgaactcctggactcaagcgatctgactgcttcagcctcacaaagggctgggaccacaggcttgagccaccgtgcctggcactactcccacttctataaccccttcatctctctgatccttttatcctcatgacagctttacccaagcccctga

SEQ ID NO: 3925 - DNA, 325 bp, Homo sapiens
ggtttcctcttttaccaaggacccgccaacatgggccgcgttcgcaccaaaaccgtgaagaaggcggcccgggtcatcatagaaaagtactacacgcgcctgggcaacgacttccacacgaacaagcgcgtgtgcgaggagatcgccattatccccagcaaaaagctccgcaacaagatagcaggttatgtcacgcatctgatgaagcgaattcagagaggcccagtaagaggtatctccatcaagctgcaggaggaggagagagaaaggagagacaattatgttcctgaggtctcagccttggatcaggagattattgaagtag

SEQ ID NO: 3926 - DNA, 310 bp, Homo sapiens
gacagaaggggaacagctaaaagagcacacccgtctatgtagcaaaatagtgggaagatttataggtagaggcgacaaacctaccgagcctggtgatagctggttgtccaagatagaatcttagttcaactttaaatttgcccacagaaccctctaaatccccttgtaaatttaactgttagtccaaagaggaacagctctttggacactaggaaaaaaccttgcagagagagtaaaaaatttaacacccatagtaggcctaaaagcagccaccaattaagaaagcgttcaagctcaacacccactaccc

SEQ ID NO: 3927 - DNA, 460 bp, Homo sapiens
gctctctttccagccagcgccgagcgatgggcatctctcgggacaactggcacaagcgccgcaaaaccgggggcaagagaaagccctaccacaagaagcggaagtatgagttggggcgcccagctgccaacaccaagattggcccccgccgcatccacacagtccgtgtgcggggaggtaacaagaaataccgtgccctgaggttggacgtggggaatttctcctggggctcagagtgttgtactcgtaaaacaaggatcatcgatgttgtctacaatgcatctaataacgagctggttcgtaccaagaccctggtgaagaattgcatcgtgctcatcgacagcacaccgtaccgacagtggtacgagtcccactatgcgctgcccctgggccgcaagaagggagccaagctgactcctgaggaagaagagattttaaacaaaaaacgatctaaaaaaat

SEQ ID NO: 3928 - DNA, 480 bp, Homo sapiens
gcgcgcagtgcatggcgattccaggcgctgaacaactcccctggacccttgggcctgcatctgactcccagctgcagagtcagaagctgagtccaggcaactgcttggccactcccgatcgctcctccctggacacccggttaccaaagtcagcaaagaagatgcggtaatcgccgcctgatctccacatggtgaacacaacactcccaccaacacctccttgactggtcggtcttcagcaccgggggtgggcaggcaggtgttctgtgttgacgagaattgcacaggctaaacacaaacacggaaccagagtgagaacacctcactcacggcagcccaggctgctccctaccaggtgacggagcgcgccggggctgtgggtgccaggggctgagtgctagggactcgtcatgagtggggatccccacgttcctgtcactgctgtcaaacagaaggtaaacagtcttatgaatgtatttc

SEQ ID NO: 3929 - DNA, 481 bp, Homo sapiens
ggacctcccggctcgacatgcggcgcgggcggcggtaaaatgtcggttccaggaccttaccaggcggccactgggccttcctcagcaccatccgcacctccatcctatgaagagacagtggctgttaacagttattaccccacacctccagctcccatgcctgggccaactacggggcttgtgacggggcctgatgggaagggcatgaatcctccttcgtattatacccagccagcgcccatccccaataacaatccaattaccgtgcagacggtctacgtgcagcaccccatcacctttttggaccgccctgtccaaatgtgttgtccttcctgcaacaagatgatcgtgagtcagctgtcctataacgccggtgctctgacctggctgtcctgcgggagcctgtgcctgctggggtgcatagcgggctgctgcttcatccccttctgcgtggatgccctgcaggacgtggaccattact

SEQ ID NO: 3930 - DNA, 458 bp, Homo sapiens
gcaatgcttttagattaaaatgaaggtgacttaaacagcttaaagtttagtttaaaagttgtaggtgattaaaataatttgaaggcgatcttttaaaaagagattaaaccgaaggtgattaaaagaccttgaaatccatgacgcagggagaattgcgtcatttaaagcctagttaacgcatttactaaacgcagacgaaaatggaaagattaattgggagtggtaggatgaaacaatttggagaagatagaagtttgaagtggaaaactggaagacagaagtacgggaaggcgaagaaaagaatagagaagatagggaaattacaagataaaaacatacttttagaagaaaaaagataaatttaaacctgaaaagtaggaagcagaagaaaaaagacaagctaggaaacaaaaagctaagggcaaaatgtacaaacttagaagaaaattggaagatag

SEQ ID NO: 3931 - DNA, 448 bp, Homo sapiens
gacacagtgcaggcgcccaagccgccgccgccagatcggtgccgattcctgccctgccccgaccgccagcgcgaccatgtcccatcactgggggtacggcaaacacaacggacctgagcactggcataaggacttccccattgccaagggagagcgccagtcccctgttgacatcgatactcatacagccaagtatgacccttccctgaagcccctgtctgtttcctatgatcaagcaacttccctgaggatcctcaacaatggtcatgctttcaacgtggagtttgatgactctcaggacaaagcagtgctcaagggaggacccctggatggcacttacagattgattcagtttcactttcactggggttcacttgatggacaaggttcagagcatactgtggataaaaagaaatatgctgcagaacttcacttggttcactggaac

SEQ ID NO: 3932 - DNA, 456 bp, Homo sapiens
gggcagagccgcaggtcagtcgtgaagagggagctctattgccaccatgagtttctccggcaagtaccaactgctgagccaggaaaactttgaagccttcatgaaggcaatcggtctgccggaagagctcatccataaggggaaggatatcaagggggtgtcggaaatcgtgcagaatgggaagcacttcaagttcaccatcaccgctgggtccaaagtgatccaaaacgaattcacggtgggggaggaatgtgagctggagacaatgacaggggagaaagtcaagacagtggttcagttggaaggtgacaataaactggtgacagctttcaaaaacatcaagtctgtgaccgaactcaacggcgacataatcaccaataccatgacattgggtgacattgtcttcaagagaatcagcaggagaatttaaacaagtctgcatttcatattatttta

SEQ ID NO: 3933 - DNA, 284 bp, Homo sapiens
gctaaacctagccccaaacccactacaccttactaccagacaaccttagccaaaccatttaccctaataaagtataggcgatagaaattgaaacctggcgcaatagatatagtaccgcgcgggaaagatgaaaaattataaccaagcataatatagcgaggactaacccctataccttgtgcataatgaattaactagaaataactttgcaaggagagccaaagctaaacctagccccaaacccactccaccttactaccagacaaccttagccaaaccattta

SEQ ID NO: 3934 - DNA, 369 bp, Homo sapiens
agtgcagtggcatgatctcggctcactgcaagctccgcctcccatgttcaccccattctcctgcctcagcctcctgagtagctgggactacaggcgcccaccaccatgcccggctaattttttttgtatttttagtaagacggggtttcaccatgttagccaggatggtctagatctcctgacctggtgatctgcccccctcggcctcccaaagtgctgggattacaggtgtgagccacctcacctggccaatacaatcactcttaatcccatccctcgtcaatgatcctctttggctgaccccctttgatatttggaggagttgggtctcctctcagtcctctgtatctggcattcacttctagccct

SEQ ID NO: 3935 - DNA, 449 bp, Homo sapiens
atggagtctcactctattgcccaggctggagtgcagtggcacgatcttggctcaccacaacctctgcctcccaggttcaagcaattctcttgcctcagcctcccgagtagctgggactacaggcatgcgccaccatgctgggctaatttttgtatttttagtagagacggggtttcactatcttggacaggctggtctcgaactcctgaccttgtgatccacctgcctcagcctcccaaattactgggattacaggcgtgagccaccgcgctcggcctgacttcaaattttttaagctcactgaaggcataatataaacttgttaacttaattctttatccttaacaatacaagtgaacgggaagatcattatgatacctataataattaaacaatattaaacatgtctcaagtacaataaagttccatttatgaaataactttctggt

SEQ ID NO: 3936 - DNA, 111 bp, Homo sapiens
gacccctctctgtctcactctcctcactctttgcataggttctgtggcttcttctgacctgactcatgaccctgctgtgtctgcggccttcgggacaaacagtcacgatca

SEQ ID NO: 3937 - DNA, 304 bp, Homo sapiens
gggattaaaacactgaactgacaattaacagcccaatatctacaatcaaccaacaagtcattattaccctcactgtcaacccaacacaggcatgctcataaggaagggttaaaaaaagtaaaaggaactcggcaaatcttaccccgcctgtttaccaaaaacataacctgtagcataaaacagtgtgggaggcaccgactgcccagtgacacatgtttaacggccggggtaccctaaccgtgcaaaggtagcataatcacttggtccttaattagggacctgtatgaatggctccacgagggtt

SEQ ID NO: 3938 - DNA, 458 bp, Homo sapiens
gcaagtttgctgagctgaaggaaaagattgatcgccgttctggtaaaaagctggaagatggccctaaattcttgaagtctggtgatgctgccattgttgatatggttcctggcaagcccatgtgtgttgagagcttctcagactatccacctttgggtcgctttgctgttcgtgatatgagacagacagttgcggtgggtgtcatcaaagcagtggacaagaaggctgctggagctggcaaggtcaccaagtctgcccagaaagctcagaaggctaaatgaatattatccctaatacctgccaccccactcttaatcagtggtggaagaacggtctcagaactgtttgtttcaattggccatttaagtttagtagtaaaagactggttaatgataacaatgcatcgtaaaaccttcagaaggaaaggagaatgttttgtggaccactttggttttctt

SEQ ID NO: 3939 - DNA, 340 bp, Homo sapiens
taatcccagcactttgggaggccaaggcgggcggatcacgaggtcaggagattgagaccatcctgcctaacacggtgaaaccccgtctctactaaaaaaatacagaacattagcctgacgcggtggcgggtgcctgtagtcccagctactcggggggctgaggcaggagaatggcgtgaacccaggaggaggagcttgcagtgagccgagatagcgccagcgcactccggcctgggcaaaagagtgagactccgtctcaaaaaaacacaaacaagaaaagaagctagttagctctgtcataactgccagtgattcatagacccacatgtttcagagcagg

SEQ ID NO: 3940 - DNA, 414 bp, Homo sapiens
gctttttcctctcttcagcgtggggcgcccacaatttgcgcgctctctttctgctgctccccagctctcggatacagccgacaccatgggtttcggagacctgaaaagccctgccggcctccaggtgctcaacgattacctggcggacaagagctacatcgaggggtatgtgccatcacaagcagatgtggcagtatttgaagccgtgtgcagcccaccgcctgccgacttgtgtcatgccctacgttggtataatcacatcaagtcttacgaaaaggaaaaggccagcctgccaggagtgaagaaagctgtgggcaaatatggtcctgccgatgtggaagacactacaggaagtggagctacagatagtaaagatgatgatgacattgacctccttggatctgatgatgagga

SEQ ID NO: 3941 - DNA, 453 bp, Homo sapiens; identical to SEQ ID NO: 1003

SEQ ID NO: 3942 - DNA, 319 bp, Homo sapiens
tactagatggaaagagatctgtagtgggccacagatcctgataaaggtctcttcatctctctaccccagttgccaccctctgctgtccccgcagagtttgcttggactataaagctgacaggagtgaagtaatcatttgagtgcaagaagaaagaggcgctgctcactgatttcctgcttcagtttttctcttatagtaccatcactataatcaacgaacttctcttctccacccaaagatggcttttccaacacattttaattaaaggaactgagtacattaccctgatgtctaaatggaccaaagatctgagatcca

SEQ ID NO: 3943 - DNA, 502 bp, Homo sapiens
gcctttgagagaggtttccgctgtaggagcagagcttccgggctgcgctcttcgttgcccagtttccgctcagtggtcgcgtctccgccccccacccaccagtcccgctgcattctcggccgggctctaggcgccatggctccccgcgggaggaagcgtaaggctgaggccgcggtggtcgccgtagccgagaagcgagagaagctggcgaacggcggggagggaatggaggaggcgaccgttgttatcgagcattgcactagctgacgcgtctatgggcgcaacgccgcggccctgagccaggcgctgcgcctggaggccccagagcttccagtaaaggtgaacccgacgaagccccggaggggcagcttcgaggtgacgctgctgcgcccggacggcagcagtgcggagctctggactgggattaagaaggggcccccacgcaaactcaaattccctgagcctcaagaggtggtggaagagttgaagaagtacctgtcgt

SEQ ID NO: 3944 - DNA, 224 bp, Homo sapiens
gcctgtggcgcggcttctgtgggccggaaccttaaagatagccgcaatggctgaaaatggtgataatgaaaagatggctgccctggaggccaaaatctgtcatcaaattgagtattattttggcgacttcaatttgccacgggacaagtttctaaaggaacagataaaactggatgaaggctgcgtacctttggagataatgataaaattcaacaggttgaacc

SEQ ID NO: 3945 - DNA, 459 bp, Homo sapiens; identical to SEQ ID NO: 1004

SEQ ID NO: 3946 - DNA, 497 bp, Homo sapiens
aggaaattaagaaggagccagagaaaccgatcgaccgcgagaagacatgcccactgttgctacgggtcttcaccaccaataacggccgccaccaccgaatggacgagttctcccggggaaatgtaccgtccagcgagttgcagatctacacttggatggatgcaaccttgaaagaactgacaagcttagtaaaagaagtctacccagaagctagaaagaagggcactcacttcaattttgcaatcgtttttacagatgttaaaagacctggctatcgagttaaggagattggcagcaccatgtctggcagaaaggggactgatgattccatgaccctgcagtcgcagaagttccagataggagattacttggacatagcaattacccctccaaatcgggcaccaccttcttcagggcgcatgagaccatattaaattctatttactatttgttgaatttatttttccgtcagttatgtaaaataaacatactcttct

SEQ ID NO: 3947 - DNA, 432 bp, Homo sapiens
ataatatagtgcagttcatggaacatagtaacacctcaaatatatttgttgagctaatgaatactaagctctgttcatgcaaactcagcctttgtgcttgattgctcatcttagtatggtcatctgctcacaccttaaaaagtaggctgaggccgggcacagtggcttacacctgtaatcccagcacttcgggaggccgaggtgggtggatcacctgaggtcaggaggtcaagaccagcctggccaacatggcgaaaccctgtctctactgaaatataaaaattagccaggcgtggtggtgggcgcctgtaatcccagctactcagggggctgaggcaggagaatcacttgaacccaggaggcagaagttgcagtgagctgagatcgtgccactgcactccagcctgggtaacaagagtgagactccatctc

SEQ ID NO: 3948 - DNA, 272 bp, Homo sapiens
ggctatcacctccgcctgtggatgctgcgcctctccgaacgcaacatgaatgtgctccttgccgacgacctcatcgcggggtccgtcttcttcctgctgctgccgggaccttctgcggccgatgagaacaagaaggggcccaaagtcacacgtcgaggcgtattatgacctacgaagtggagatgaacatgtaagccggatgatcttaggtctcttcggaaagactgttccaaaaacagtgagataattttgtggccttagctacaggagag

SEQ ID NO: 3949 - DNA, 77 bp, Homo sapiens
tgtgtggtactcattatggtgcagtgcgggcatgaaatgaagacacccaaataggcttacagatacgatatgtttta

SEQ ID NO: 3950 - DNA, 400 bp, Homo sapiens
ataatccggctgtaccagcgtcctggtcccggaactgccaaagccaagaactgaccggggccagggctgccatggtctccttgcctgctccaaggcacaggatacagtgggaatcttgagactctgtggccatttcccatggctcagactaagctccaagcccttcaagagttccaagggaacacttgaaccatggacaagactctctcaagatggcaaatggctaattgaggttctgaagttcttcagtacattgctgtaggtcctgaggccagggatttttaattaaatggggtgatgggtggccaataccacaattcctgctgaaaaacactcttccagtccaaaagcttcttgatacagaaaaaacagcctggatttacagaaacatatagatctg

SEQ ID NO: 3951 - DNA, 503 bp, Homo sapiens
cagaagggatccaaataatgaatcttcgggtgtttccctttagctaagcacagatctaccttggtgatttggaccctggttgctttgtgtctagttttctagacccttcatctcttacttgatagacttactaataaaatgtgaagactagaccaattgtcatgcttgacacaactgctgtggctggttggtgctttgtttatggtagtagtttttctgtaacacagaatataggataagaaataagaataaagtaccttgactttgttcacagcatgtagggtgatgagcactcacaattgttgactaaaatgctgcttttaaaacataggaaagtagaatggttgagtgcaaatccatagcacaagataaattgagctagttaaggcaaatcaggtaaaatagtcatgattctatgtaatgtaaaccagaaaaaataaatgttcatgatttcaagatgttatattaaagaaaaactttaaaaattattatatatttatagc

SEQ ID NO: 3952 - DNA, 265 bp, Homo sapiens
attctcgcttcctggagggtgtccgcaatgttgccagtgtctgtctgcagattggctacccaactgttgcatcagtaccccattctatcatcaacgggtacaaacgagtcctggccttgtctgtggagacggattacaccttcccacttgctgaaaaggtcaaggccttcttggctgatccatctgcctttgtggctgctgcccctgtggctgctgccaccacagctgctcctgctgctgctgcagccccagctaaggttgaagc

SEQ ID NO: 3953 - DNA, 283 bp, Homo sapiens
gatgtataaagggttccaagccttaggggatgccgctgacatccgggtcgtctacacccccgccatggagagtgtctgcggatacttccacaggtcccacaaccgcagcgaggagtttctcattgctggaaaactgcaggatggactcttgcacatcactacctgcagttttgtggctccctggaacagcctgagcttaactcaacgccggggcttcaccaagacctacactgttggctgtgaggaatgcacaatgtttccctgtttatacatcccctgcaaa

SEQ ID NO: 3954 - DNA, 219 bp, Homo sapiens; identical to SEQ ID NO: 1009

SEQ ID NO: 3955 - DNA, 51 bp, Homo sapiens
aggggagtactgcggccgtgtgggtgaattggctgcccgtgagttgggtgc

SEQ ID NO: 3956 - DNA, 94 bp, Homo sapiens
gaaggggactgaagcccgcgctggtctgtggggctctggccgcgcctgggctggccgggaccatgtgcgcgttccgggaccactcgcgctgtgt

SEQ ID NO: 3957 - DNA, 220 bp, Homo sapiens
gaggctttcctaggcttttcctatgcgcctcccacggactctttcctctgaaccctgttagggcttggttttaaaggattttatgtgtgtttccgaatgttttagttagccttttggtggagccgccagctgacaggacatcttacaagagaatttgcacatctctggaagcttagcaatcttattgcacactgttcgctggaagctttttgaagagcac

SEQ ID NO: 3958 - DNA, 74 bp, Homo sapiens
tatcagttttgacactgacaggagtggaacagtagacccacaagaattgcagaaggccctgacaacaatgggat

SEQ ID NO: 3959 - DNA, 407 bp, Homo sapiens
acagaaggggcttttccgtgctacctgcagaggggtccatacggcgttgttctggattcccgtcgtaacttaaagggaaactttcacaatgtccggagcccttgatgtcctgcaaatgaaggaggaggatgtccttaagttccttgcagcaggaacccacttaggtggcaccaatcttgacttccagatggaacagtacatctataaaaggaaaagtgatggcatctatatcataaatctcaagaggacctgggagaagcttctgctggcagctcgtgcaattgttgccattgaaaaccctgctgatgtcagtgttatatcctccaggaatactggccagagggctgtgctgaagtttgctgctgccactggagccactccaattgctggccgcttcactcctggaa

SEQ ID NO: 3960 - DNA, 466 bp, Homo sapiens
gctctcgccaggcgtcctcgtggaagtgacatcgtctttaaaccctgcgtggcaatccctgacgcaccgccgtgatgcccagggaagacagggcgacctggaagtccaactacttccttaagatcatccaactattggatgattatccgaaatgtttcattgtgggagcagacaatgtgggctccaagcagatgcagcagatccgcatgtcccttcgcgggaaggctgtggtgctgatgggcaagaacaccatgatgcgcaaggccatccgagggcacctggaaaacaacccagctctggagaaactgctgcctcatatccgggggaatgtgggctttgtgttcaccaaggaggacctcactgagatcagggacatgttgctggccaataaggtgccagctgctgcccgtgctggtgccattgccccatgtgaagtcactgtgccagcccagaacactggtctcgg

SEQ ID NO: 3961 - DNA, 468 bp, Homo sapiens
agggcaatggcatgatctcggctcaccacaacctctacctcccgggttcaagtgattctcttgcctcagcctcccgaacaactgggattacaggcatgcgtcaccacacccggctaattttgtatttttagtagaaatggagtttctccatgttggtcaggctggtctcaaactcccgaactcaggtgatccccctgcctcagcctcccaaagtgctgggattacaggtgtgagccatggcgcccagccccttcggattctttctataagcaaattgtgccttggacataggctttgaatgctttgagagaacctctcttcataagtggaaataaaatcatgatttaattgtatcaaacgcattatggataatctatgggatttaatgaatcaataggtgaggctgagttggtaagaagtgaactttacttctgcatttaaaaaaatacatttaactcaataggaagt

SEQ ID NO: 3962 - DNA, 341 bp, Homo sapiens
gggcaccggaaaagaacagattctcttccgtcgcagagtttcgccatggcccggggccccaagaagcacttaaagcgtgttgcagcgccgaagcattggatgcttgacaaactaacgggtgtatttgcacctcgtccatcgacaggtccccacaagctgagggaatgtcttcctctgatcgtcttcctcaggaatagactcaagtatgcgttgactggagatgaggtaaagaagatatgtatgcaacgtttcatcaaaattgatggcaaggttcgagtggatgtcacataccctgctggattcatggatgtcatcagcatcgagaagacaggtgaacattt

SEQ ID NO: 3963 - DNA, 336 bp, Homo sapiens
gaagggatgtcatcatgtcaaacccaaatatttgacctaagggatcctttattctgcccagtggctaactttaacaacatccctaatacaactgtttattcaaatgcacggtggtccctgttagagttagacctctagactcacctgttctcacgccctgttttaatttaacccagctatgggatgccagataacagaattgctgcctactagctgaacagggaggagtttgtgcagttgctgacacttcttgttgcacataaataaatacagtgggtactatagagactcagttgcaaaaattaacaaatatgctgcttgattaaaatgggtagg

SEQ ID NO: 3964 - DNA, 366 bp, Homo sapiens
gagaggtaggaaggacagcagagctgacagtcacagcagccctgacaagagagttcctggagcccaagctcttctccacagaggacaagcaggcagcagagaccatggggtccccttcagcctgtccatacagagtgtgcattccctggcaggggctcctgctcacagcctcgcttttaaccttctggaacctgccaaacagtgcccagaccaatattgatgtcgtgccgttcaatgtcgcagaagggaaggaggtccttctagtagtccataatgagtcccagaatctttatggctacaactggtacaaaggggaaagggtgcatgccaactatcgaattataggatatgtaaaaaatataagtc

SEQ ID NO: 3965 - DNA, 231 bp, Homo sapiens
gcttttcctccttggctgtctgaagatagatcgccatcatgaacgacaccgtgactatccgcactagaaagttctcgaccaaccgactacttcagaggaaacaaatggtcattgatgtccttcaccccgggaaggcgacagtgcctaagacagaaattcgggaaaaactagccaaaatgtacaagaccacaccggatgtcatctttgtatttggattcagaactcattttg

SEQ ID NO: 3966 - DNA, 466 bp, Homo sapiens
gcttttccggttgcggcgccgcgcggtgaggttgtctagtccacgctcggagccatgccgtccaagggcccgctgcagtctgtgcaggtcttcgtacgcaagaagacagcgacagctgtggcgcactgcaaacgcggcaatggtctcatcaaggtgaacgggcggcccctggagatgattgagccgcgcacgctacagtacaagctgctggagccagttctgcttctcggcaaggagcgatttgctggtgtagacatccgtgtccgtgtaaagggtggtggtcacgtggcccagatttatgctatccgtcagtccatctccaaagccctggtggcctattaccagaaatatgtggatgaggcttccaagaaggagatcaaagacatcctcatccagtatgaccggaccctgctggtagctgaccctcgtcgctgcgagtccaaaaagtttggaggccctggtgccc

SEQ ID NO: 3967 - DNA, 459 bp, Homo sapiens
gagtctgggcctaaggaagcagcactggtggtgcctcagccatggcctggaccgttctcctcctcggcctcctctctcactgcacagggtctgtgacctcctatgcgctggctcaggcgccctcggtgtccgtggccccaggacagacggccacgattacgtgtgggacaaacaacattggagctaagaaagtgcactggtaccaacagaggccaggccaggcccctgtggaggtcgtctatgataatgaccaccggccctcagggatccctgagcgattctctggctccaactttgggaacacggccaccctgaccatcagcagagtcgaagccggggatgagggcgactattactgacacctgtgggatattggtagttctcataaactgttcggcggagggaccaagctgaccgtcctaggtcagcccaaggctgccccctcagtcactctgttcc

SEQ ID NO: 3968 - DNA, 365 bp, Homo sapiens
gcctttcaagtgcatgcagctcactgatttcatcctcaagtttccgcacagtgcccaccagaagtatgtccgacaagcctggcagaaggcagacatcaatacaaaatgggcagccacacgatgggccaagaagattgaagccagagaaaggaaagccaagatgacagattttgatcgttttaaagttatgaaggcaaagaaaatgaggaacagaataatcaagaatgaagttaagaagcttcaaaaggcagctctcctgaaagcttctcccaaaaaagcacctggtactaagggtactgctgctgctgctgctgctgctgctgctgctgctgctgctgctaaagttccagcaaaaaagatcaccg

SEQ ID NO: 3969 - DNA, 444 bp, Homo sapiens
aggattttttgtgcttgatacatggtatccagtttgcatagtatcacttctttgtaatccagttgctgctaagaatgatgtactttaaaggaaaagagaaaactgcatcacagtcccattctccagtgtccatgcaatgaattgctgagcatttaggaagcagcaccaagtctattacaggcatggtgtgaaacttgatgtttgacctgtgatcaaaattgaaccattgtacagtttggcttctgtttgcttcaaaatatgtagaattgtggttgatgattaatttgcgagactaactttgagagtgtaacagttttgaagaaaacattgaatgttttgcaaatgaaggggcttcacggaatgttacaatgttactaatataatttggcttttgttatgcaaattgttaacaccagctattaaaatatattttagtagaaatgc

SEQ ID NO: 3970 - DNA, 465 bp, Homo sapiens
ggttttgcagacgccaccgccgaggaaaaccgtgtactattagccatggtcaaccccaccgtgttcttcgacattgccgtcgacggcgagcccttgggccgagtgtcctttgagctgtttgcagacaaggtcccaaagacagcaaaaaattttcgtgctctgagcactggagagaaaggatttggttataagggttcctgctttcacagaattattccagggtttatgtgtcagggtggtgacttcacacgccataatggcactggtggcaagtccatctatggggagaaatttgaagatgagaacttcatcctaaagcatacgggtcctggcatcttgtacatggcatatgctggacccaacacaaatggttcccagtttttcatctgcactgccaagactgattggttgtatggcaagcatgtggtgtttggcaaagtgaaagaaggcatgaatattgtggag

SEQ ID NO: 3971 - DNA, 456 bp, Homo sapiens
gctctgaccacccctcttttctagagttctgcctcgcttcccggcgcggtcgcagccctcagcccacttaggataatggcgacagctgaggtactgaacattggtaaaaaattatatgagggtaaaacaaaagaagtctacgaattgttagacagtccaggaaaagtcctcctgcagtccaaggaccagattacagcaggaaatgcagctagaaaaaaccacctggaaggaaaagctgcaatctcaaataaaatcaccagttgtatttttcagttattacaggaagcaggtattaaaactgccttcaccagaaaatgtggggagacagctttcattgcaccgcagtgtgaaatgattccaattgaatgggtttgcagaagaatagcaactggttcttttctcaaaagaaatcctggtgtcaaggaaggatataagttttacccacctaaagtggag

SEQ ID NO: 3972 - DNA, 357 bp, Homo sapiens
acagaaggggtagtaatgccagagtaaagccatgacatctagttaacttttaattttagatacacaatgaatgtcttttttcaaaaaagtgtgtatccctgtaatcccagcaatgtgggaggccgagacgggcggatcacgatgtcaggagatccagaccatcctggctaacgcggtgaaaccccgtctctactaaaaaatacaaaaattagctgggcgtggtggcggaagcctgtagtcccagctactcaggaggctgaggcaggagaatggcgtgaacccgggaggcggagcttgcagtgagtggagatcgcgccactgcactccagcctgggcgacagagcgagactgtgtctc

SEQ ID NO: 3973 - DNA, 494 bp, Homo sapiens
atttgtcccacgacgtgctccttttgatctgtttgaaaacagaaagaaaaagaacaatatcaaattgtatgtacgcagagttttcatcatggataactgtgaggagctaatccctgaatatctgaacttcattagaggggtggtagactcggaggatctccctctaaacatatcccgtgagatgttgcaacaaagcaaaattttgaaagttatcaggaagaatttggtcaaaaaatgcttagaactctttactgaactggcggaagataaagagaactacaagaaattctatgagcagttctctaaaaacataaagcttggaatacacgaagactctcaaaatcggaagaagctttcagagctgttaaggtactacacatctgcctctggtgatgagatggtttctctcaaggactactgcaccagaatgaaggagaaccagaaacatatctattatatcacaggtgagaccaaggaccaggtagctaactcag

SEQ ID NO: 3974 - DNA, 391 bp, Homo sapiens
gggaaccgccattctgtctgttaactatggtcttcaactttaacaaggctaacatggcatcaagttctcagcgaaaaagaatgagccctaagcctgagcttactgaagagcaaaagcaggagatccgggaagcttttgatcttttcgatgcggatggaactggcaccatagatgttaaagaactgaaggtggcaatgagggccctgggctttgaacccaacaaagaagatattaagaaaatgataagtgaaattgataaggaagggacaggaaaaatgaactttggtgactttttaactgtgatgacccagaaaatgtctgagaaagatactaaagaagaaatcctgaaagctttcaagctctttgattgatgatgaaactgggaagattt

SEQ ID NO: 3975 - DNA, 439 bp, Homo sapiens
atcgaccagagttggtccgaccagccttggaaaactcactgaaaaaagctcaattggactatgttgacctctatcttattcattctccaatgtctctaaagccaggtgaggaactttcaccaacagatgaaaatggaaaagtaatatttgacatagtggatctctgtaccacctgggaggccatggagaagtgtaaggatgcaggattggccaagtccattggggtgtcaaacttcaaccgcaggcagctggagatgatcctcaacaagccaggactcaagtacaagcctgtctgcaaccaggtagaatgtcatccgtatttcaaccggagtaaattgctagatttctgcaagtcgaaagatattgttctggttgcctatagtgctctgggatctcaacgagacaaacgatgggtggacccgaactccccggtgctctt

SEQ ID NO: 3976 - DNA, 432 bp, Homo sapiens
tgtgtacgtatgtgctcagagcaagggactttctgcatgtggagaaaacgccttttgccctaagaagtctacctcaaaccaaagggatgaagtgatgtatctgtgttgcaacactgggcttgggggaaagtgaagctgtgcttgctttaaaagagctgtgctaagtatctgcagaatagctgctccaaaaatggaatctttattccaggtacttggtttctaatatttttttttctcttgcaagtgtaaccttctgagttttctttctccttgtggacttgtttcttagcaacttattcaaacctacagtacttatatgaatttgcagcccaccagttacacacccataattctacagggacttaagatgtttttacaaaacggtgaaactttgtcgtggaggctcttgggggagttcagtgggttaaaagg

SEQ ID NO: 3977 - DNA, 535 bp, Homo sapiens
agcttgtacaacattactcagagagagctgcaggtctctgctgccgcctagtagttccctgtcacaaagggatgccaaggcttaccgatctgtctgtcaaaaccaaagatgtctgggaaatccctcgagaatccctgcagttgatcaagagactgggaaatgggcagtttggggaagtatggatgggtacctggaatggaaacacaaaagtagccataaagactcttaaaccaggcacaatgtcccccgaatcattccttgaggaagcgcagatcatgaagaagctgaagcacgacaagctggtccagctctatgcagtggtgtctgaggagcccatctacatcgtcaccgagtatatgaacaaaggaagtttactggatttcttaaaagatggagaaggaagagctctgaaattaccaaatcttgtggacatggcagcacaggtggctgcaggaatggcttacatcgagcgcatgaattatatccatagagatctgcgatcagcaaacattctagtggggaatggactcatatg

SEQ ID NO: 3978 - DNA, 465 bp, Homo sapiens
gcctttccgtctggcggcagccatcaggtaagccaagatgggtgcatacaagtacatccaggagctatggagaaagaagcagtctgatgtcatgcgctttcttctgagggtccgctgctggcagtaccgccagctctctgctctccacagggctccccgccccacccggcctgataaagcgcgccgactgggctacaaggccaagcaaggttacgttatatataggattcgtgttcgccgtggtggccgaaaacgcccagttcctaagggtgcaacttacggcaagcctgtccatcatggtgttaaccagctaaagtttgctcgaagccttcagtccgttgcagaggagcgagctggacgccactgtggggctctgagagtcctgaattcttactgggttggtgaagattccacatacaaattttttgaggttatcctcattgatccattccataaagctatcag

SEQ ID NO: 3979 - DNA, 452 bp, Homo sapiens
gctctttccctcggagcgggcggcggcgttggcggcttgtgcagcaatggccaagatcaaggctcgagatcttcgcgggaagaagaaggaggagctgctgaaacagctggacgacctgaaggtggagctgtcccagctgcgcgtcgccaaagtgacaggcggtgcggcctccaagctctctaagatccgagtcgtccggaaatccattgcccgtgttctcacagttattaaccagactcagaaagaaaacctcaggaaattctacaagggcaagaagtacaagcccctggacctgcggcctaagaagacacgtgccatgcgccgccggctcaacaagcacgaggagaacctgaagaccaagaagcagcagcggaaggagcggctgtacccgctgcggaagtacgcggtcaaggcctgaggggcgcattgtcaataaagcacagctggctgag

SEQ ID NO: 3980 - DNA, 451 bp, Homo sapiens
gacagaaggggctgtttttcaggcggccgggaagatggcggacattcagactgagcgtgcctaccaaaagcagccggccatctttcaaaacaagaagagggtgctgctgggagaaactggctaggagaagctcccgcggtactacaagaacatcggtctgggcttcaagacacccaaggaggctattgagggctcctacattgacaagaaatgccccttcactggtaatgtgtccattcagagggcggatcctctctggcgtggtgaccaatatgaacatgcagaggaccattgtcatccgccgagactatctgcactacatacggaagtacaaccgattcgagaagcgccacaagaacatgtctgtacacctgtcccactgcttcacggacgtgcatatcggcgacatcatgacagagggcgagtgccggcctctgagcaagacagagcg

SEQ ID NO: 3981 - DNA, 131 bp, Homo sapiens
aggggctgcatggcctttgcaagcatgaccgaccatgcacggatagtcatcaacagggcccaaggtggagagccacagccaccggctgactggagatgacccggacactgcggactacataacccgctaca

SEQ ID NO: 3982 - DNA, 453 bp, Homo sapiens
gctttttttcaggcggccgggaagatggcggacattcagactgagcgtgcctaccaaaagcagccgaccatctttcaaaacaagaagagggtcctgctgggagaaactggcaaggagaagctcccgcggtactacaagaacatcggtctgggcttcaagacacccaaggaggctattgagggcacctacattgacaagaaatgccccttcactggtaatgtgtccattcgagggcggatcctctctggcgtggtgaccaagatgaagatgcagaggaccattgtcatccgccgagactatctgcactacatccgcaagtacaaccgcttcgagaagcgccacaagaacatgtctgtacacctgtccccctgcttcagggacgtcctgatcggtgacatcgtcacagtgggcgagtgccggcctctgagcaagacagtgcgcttcaacgtgctc

SEQ ID NO: 3983 - DNA, 492 bp, Homo sapiens
gagggcagcgagaggttcgcgggtgcagcgcacaggagatcatgtccgggggcagcagctgcagccagaccccaagccgggccatccccgccactcgccgggtggtgctcggcgacggcgtgcagctcccgcccggggactacagcacgacccccggcggcacgctcttcagcaccaccccgggaggtaccaggatcatctatgaccggaaattcctgatggagtgtcggaactcacctgtgaccaaaacacccccaagggatctgcccaccattccgggggtcaccagcccttccagtgatgagccccccatggaagccagccagagccacctgcgcaatagcccagaagataagcgggcgggcggtgaagagtcacagtttgagatggacatttaaagcaccagccatcgtgtggagcactaccaaggggcccctcagggccttcctgggaggagtcccaccagccaggccttatgaaagtgatcatact

SEQ ID NO: 3984 - DNA, 305 bp, Homo sapiens
ggatggaggagatcgagggcttccgctatcgctgcagggatgccatgcgctcagtgactaagcaggccattcgggaggcaagattgaaggagatcaaggaagagcttctgcattctgagaagcttaagacatactttgaagacaaccctagggacctccagctgctgcggcatgacctacctttgcaccccgcagtggtgaagccccacctgggccatgttcctgactacctggttcctcctgctctccgtggcctggtgcgccctcacaagaagcggaagaagctgtcttcctcttgtaggaag

SEQ ID NO: 3985 - DNA, 337 bp, Homo sapiens
ggcagtcgccacacctttgcccctgctgcgatgaccctgtcgccacttctgctgttcctgccaccgctgctgctgctgctggacgtccccacggcggcggtgcaggcgtcccctctgcaagcgttagacttctttgggaatgggccaccagttaactacaagacaggcaatctatacctgcgggggcccctgaagaagtccaatgcaccgcttgtcaatgtgaccctctactatgaagcactgtgcggtggctgccgagccttcctgatccgggagctcttcccaacatggctgttggtcatggaaatcctcaatgtcacgctggtgccctacggag

SEQ ID NO: 3986 - DNA, 341 bp, Homo sapiens
cggaaagagaagggttcacgggaagagaagcagaagccccaggctgagcggaaggaggagaaaaaggcggctgcccctgctcctgaggaggagatggatgaatgtgagcaggcgctggctgctgagcccaaggccaaggaccccttcgctcacctgcccaagagtacctttgtgttggatgaatttaagcgcaagtactccaatgaggacacactctctgtggcactgccatatttctgggagcactttgataaggacggctggtccctgtggtactcagagtatcgcttccctgaagaactcactcagaccttcatgagctgcaatctcatcactggaat

SEQ ID NO: 3987 - DNA, 393 bp, Homo sapiens
gctcttcctgctctccatcatggcggatcaaggtgaaaaggagaaccccatgcgggaacttcgcatccgcaaactctgtctcaacatctgtgttggggagagtggagacagactgacgcgagcagccaaggtgttggagcagctcacagggcagacccctgtgttttccaaagctagatacactgtcagatcctttggcatccggagaaatgaaaagattgctgtccactgcacagttcgaggggccaaggcagaagaaatcttggagaagggtctaaaggtgcgggagtatgagttaagaaaaaacaacttctcagatactggaaactttggttttgggatccaggaacacatcgatctgggtatcaaatatgacccaagcattggtatcta

SEQ ID NO: 3988 - DNA, 424 bp, Homo sapiens
aagttgcctatgtgtgacaaatgtggcactgggattgttggtgtgtttgtgaagctgcgggaccgtcaccgccaccctgagtgttatgtgtgcactgactgtggcaccaacctgaaacagaagggccatttctttgtggaggatcaaatctactgtgagaagcatgcccgggagcgagtcacaccacctgagggttatgaagtggtcactgtgttccccaagtgagccagcagatctgaccactgttctccagcaggcctctgctgcagctttttctctcagtgttctggccctctcctctcttgaaagttctctgcttactttggttttccctctgcttgtaaaacattgagtcccctccctgccttggttaattgactcacaccagctgtgcgatgcccgcttttacaattaaaggaaaact

SEQ ID NO: 3989 - DNA, 377 bp, Homo sapiens
gcttttccaagcggctgccgaatatggcggaggtgcaggtcctggtgcttgatggtcgaggccatctcctgggccggctggcggccatcgtggctaaacaggtactgctgggccggaaggtggtggtcgtacgctgtgaaggcatcaacatttctggcaatttctacagaaacaagttgaagtacctggctttcctccgcaagcggatgaacaccaacccttcccgaggcccctaccacttccgggcccccagccgcatcttctggcggaccgtgcgaggtatgctgccccacaaaaccaatcgaggccaggccgctctggaccgtctcaaggtgtttgacggcatcccaccgccctacgacaagaaaaagcggatg

SEQ ID NO: 3990 - DNA, 437 bp, Homo sapiens
gggattacagctgtgagccaccgtgcctggccttttattgcttgtttttgagacggagtctcactctgttgcccaagctgaagtgcagtggtgtgatcttggctcactgcaacctctgcctcctggggtcaagcgattctcctgcctcagcctcctgagtagctgggcttacaggcacccaccaccatgcccggctaatctttgtatttttagtagagacggggtttcaccatcttggccaggctggtgtgatcatggctcattgcaaccttgaattcctgggcacaagtgatcctcctgccttagcctccccagtatagctgggactacaggtatgcgccaccacacctggctaatttttttaattttaatttttgtagagatgggggggcaggtctcactatgttgcccaggctgttctctaactcctggccaca

SEQ ID NO: 3991 - DNA, 496 bp, Homo sapiens
gctctaccggcgggatttgatggcgtgatgtctcacagaaagttctccgctcccagacatgggtccctcggcttcctgcctcggaagcgcagcagcaggcatcgtgggaaggtgaagagcttccctaaggatgacccatccaagccggtccacctcacagccttcctgggatacaaggctggcatgactcacatcgtgcgggaagtcgacaggccgggatccaaggtgaacaagaaggaggtggtggaggctgtgaccattgtagagacaccacccatggtggttgtgggcattgtgggctacgtggaaacccctcgaggcctccggaccttcaagactgtctttgctgagcacatcagtgatgaatgcaagaggcgtttctataagaattggcataaatctaagaagaaggcctttaccaagtactgcaagaaatggcaggatgaggatggcaagaagcagctggagaaggacttcagcagcatgaagaagtact

SEQ ID NO: 3992 - DNA, 361 bp, Homo sapiens
gagctgctgtagcgaagagagtttggcgcgatgtctcacaccattttgctggtacagcctaccaagaggccagaaggcagaacttatgctgactacgaatctgtgaatgaatgcatggaaggtgtttgtaaaatgtatgaagaacatctgaaaagaatgaatcccaacagtccctctatcacatatgacatcagtcagttgtttgatttcatcgatgatctggcagacctcagctgcctggtttaccgagctgatacccagacataccagccttataacaaagactggattaaagagaagatctacgtgctccttcgtcggcaggcccaacaggctgggaaataattgtgttggaagcact

SEQ ID NO: 3993 - DNA, 491 bp, Homo sapiens
aaaccacttcctaattttttcctgtttctgaattgtaaaaccccctttgggagtccctggtttcttattgagccaatttctgggttaatcttattgatttttcagcatcagtacaactctacaacctttgagctatatctgctttttcccattgcttccactgccttttaaaactcaacacagctttttgaataatttgagagtcaaattcaatcacaaatgctgagcagaataagagtgaagtacactatacttaaaatggaaatagattaaaaacaacattactgaaacccttcgcaaggcaaaatgtgtctccttttgataataagctgcatatactatcaggtcctctctttctttatatggtgaacatatatttttaatgaaatgtctctcatttttttaataacagatttattgagatataattcacacaccatgaaattcacccttacaaaacgtacaattcagtggtcttcagtatgcttaca

SEQ ID NO: 3994 - DNA, 280 bp, Homo sapiens
ctttgcaaggagagccaaagctaagacccccgaaaccagacgagctacctaagaacagctaaaagagcacacccgtctatgtggcaaaatagtgggaagatttataggtagaggcgacaaacctaccgagcctggtgatagctggttgtccaagatagaatcttagttcaactttaaatttgcccacagaaccctctaaatccccttgtaaatttaactgttagtccaaagaggaacagctctttggacactaagaaaaaaccttgcagagagagtaaaa

SEQ ID NO: 3995 - DNA, 385 bp, Homo sapiens
agtgagacttgatctcaaaaaagagaagggagagagagggagagagggagaggaaagaaaggaagaaaagaaaagaaaaatgcaaagagaggccaggcgcagtggctcttgcctgtaatcccagtactcactctgttgcccaggctggagtgcaatggcgtgatcttggctcgctgcaacccccgcctcccgggttcaaaggattctcctgcctcagcctcccgagtagctgggactacaggcgcctgccaccacgcccagctaatttttatacttttaatagagacggggtttcaccatgttggccaggatggtctcgatctcttgaccttgtgatccgcctgccttggcctcccaaagtgctgggattacaggcatgagtcac

SEQ ID NO: 3996 - DNA, 336 bp, Homo sapiens
aaccaagcataatatagcaaggactaacccctataccttctgcataatgaattaactagaaataactttgcaaggagagccaaagctaagacccccgaaaccagacgagctacctaagaacagctaaaagagcacacccgtctatgtagcaaaatagtgggaagatttataggtagaggcgacaaacctaccgagcctggtgatagctggttgtccaagatagaatcttagttcaactttaaatttgcccacagaaccctctaaatccccttgtaaatttaactgttagtccaaagaggaacagctctttggacactaagaaaaaaccttgcagat

SEQ ID NO: 3997 - DNA, 445 bp, Homo sapiens
caggcattctagctgggaaccgttcttcctcccctcaccagaaccttcagactaaaccaggcatcaagattttccgctttgtagcccctctctactacataaacaaagaatgcttgtgttctgctttatacaaacaaactgtcaacccaatcttaataaaggtggcttggaagaaggcagcaaagagaaagatcaaagaaaaagtagtgactcttggtggaatccaggatgaaatgtcagtgcaactttcccatgatcccttggagctgcatactatagtgattgactgcagtgcaattcaatttttagatacagcagggatccacacactgaaagaagttcgcagagattatgaagccattggaatccaggttctgctggctcagtgcaatcccactgtgagggattccctaaccaacggagaatattgcaaaaaggaagaaga

SEQ ID NO: 3998 - DNA, 319 bp, Homo sapiens
cttccagtaattcgccaaaatgacgaacacaaagggaaagaggagaggcacccgatatatgttctctaggccttttagaaaacatggagttgttcctttggccacatatatgcgaatctataagaaaggtgatattgtagacatcaagggaatgggtactgttcaaaaaggaatgccccacaagtgttaccatggcaaaactggaagagtctacaatgttacccagcatgctgttggcattgttgtaaacaaacaagttaagggcaagattcttgccaagagaattaatgtgcgtattgagcacattaagcactctaag

SEQ ID NO: 3999 - DNA, 174 bp, Homo sapiens; identical to SEQ ID NO: 1022

SEQ ID NO: 4000 - DNA, 330 bp, Homo sapiens
gccctcactcgccgccgacgacctgtctcgccgagcgcacgccttgctgccgccccgcagaaatgcttcggttacccacagtctttcgccagatgagaccggtgtccagggtactggctcctcatctcacccgggcttatgccaaagatgtaaaatttggtgcagatgcccgagccttaatgcttcaaggtgtagaccttttagccgatgctgtggccgttacaatggggccaaagggaagaacagtgattattgagcagagttggggaagtcccaaagtaacaaaagatggtgtgactgttgcaaagtcaattgacttaaaagataaat

SEQ ID NO: 4001 - DNA, 327 bp, Homo sapiens
gaggcctgcctggagccccagatcaccccttcctactacaccacttctgacgctgtcatttccactgagaccgtcttcattgtggagatctccctgacatgcaagaacagggtccagaacatggctctctatgctgacgtcggtggaaaacaattccctgtcactcgaggccaggatgtggggcgttatcaggtgtcctggagcctggaccacaagagcgcccacgcaggcacctatgaggttagattcttcgacgaggagtcctacagcctcctcaggaaggctcagaggaataacgaggacatttccatcatcccgcctctgttt

SEQ ID NO: 4002 - DNA, 279 bp, Homo sapiens
ctgcccttcacctcgcagtggacctgcaaaatcctgacctggtgtcactcctgttgaagtgtggggcgtgtgtcaacagagttacctaccagggctattctccctaccagctcacctggggccgcccaagcacccggatacagcagcagctgggccagctgacactagaaaaccttcagatgctgccagagagtgaggatgaggagagctatgacacagagtcagagttcacggagttcacagaggacgagctgccctatgatgactgtgtgtttggag

SEQ ID NO: 4003 - DNA, 292 bp, Homo sapiens
caaccaccatgtctggctggtaaccgccatgatacatcaccgaccagctgggcatcggggagatggccgagactgaccccaagaccgtgcaggacctcacctcggtggtgcagacactcctgcagcagatgcaagataaatttcagaccatgtctgaccagatcattgggagaattgatgatatgagtagtcgcattgatgatctggaaaagaatatcgcggacctcatgacacaggctggggtggaagaactggaaagtgaaaacaagatacctgccacgcaaaagagttg

SEQ ID NO: 4004 - DNA, 408 bp, Homo sapiens
caagatgaggtctgtgtatgctcacttccccatcaacgttgttatccaggagaatgggtctcttgttgaaatccgaaatttcttgggtgaaaaatacatccgcagggttcggatgagaccaggtgttgcttgttcagtatctcaagcccagaaagatgaattaatccttgaaggaaatgacattgagcttgtttcaaattcagcggctttgattcagcaagccacaacagttaaaaacaaggatatcaggaaatttttggatggtatctatgtctctgaaaaaggaactgttcagcaggctgatgaataagatctaagagttacctggctacagaaagaagatgccagatgacacttaagacctacttgtgatatttaaatgatgcaataaaagacctattgatttgg

SEQ ID NO: 4005 - DNA, 402 bp, Homo sapiens
aaggatgaggttttgaagattatgccagtgcagaagcagacccgtgccggccagcgcaccaggttcaaggcatttgttgctatcggggactacaatggccacgtcggtctgggtgttaagtgctccaaggaggtggccaccgccatccgtggggccatcatcctggccaagctctccatcgtccccgtgcgcagaggctactgggggaacaagatcggcaagccccacactgtcccttgcaaggtgacaggccgctgcggctctgtgctggtacgcctcatccctgcacccaggggcactggcatcgtctccgcacctgtgcctaagaagctgctcatgatggctggtatcgatgactgctacacctcagcccggggctgcactgccaccctgggcaacttc

SEQ ID NO: 4006 - DNA, 371 bp, Homo sapiens
agtctgggcctaaggaagcagcactggtggtgcctcagccatggcctggacctttctcctcctcggcctcctctctcactgcacaggctctgtgacctccgatgtgctgactcagccaccctcagtgtcagtggccccaggacagacggccaggattacctgtgggggagacaacattggaagtaaaagtgtgcactggtaccagcagaagccaggccaggcccctgtgctggtcatctattatgatagcgaccggccctcagggatccctgagcgattctctggctccaactctgggaacacggccaccctgaccctcagcagggtcgaagccgaggatgaggccgactattactgtcaggtgtgggatg

SEQ ID NO: 4007 - DNA, 395 bp, Homo sapiens
gcttttcccaccccctagcgccgctgggcctgcaggtctctgtcgagcagcggacgccggtctctgttccgcaggatggggtttgttaaagttgttaagaataaggcctactttaagagataccaagtgaaatttagaagacgacgagagggtaaaactgattattatgctcggaaacgcttggtgatacaagataaaaataaatacaacacacccaaatacaggatgatagttcgtgtgacaaacagagatatcatttgtcagattgcttatgcccgtatagagggggatatgatagtctgcgcagcgtatgcacacgaactgccaaaatatggtgtgaaggttggcctgacaaattatgctgcagcatattgtactggcctgctgctggcccg

SEQ ID NO: 4008 - DNA, 336 bp, Homo sapiens
aaaatatatatatatacacacacacatatacatacaaagtcaaactgaagaccaaatcttagcaggtaaaagcaatattcttatacatttcataataaaatgagctctatgtattttctactgcacctgagcaggcaggtcccagatttcttaaggctttgtttgaccatgtgtctagttacttgctgaaaagtgaatatattttccagcatgtcttgacaacctgtactcttccaatgtcatttatcagttgtaaaatatatcagattgtgtcctcttctgtacaattgacaaaaaaaaaatttttttttctcactctaaaagagggggggctca

SEQ ID NO: 4009 - DNA, 335 bp, Homo sapiens
tgtcacccaggctggagtgcagtggtgtgatatctcggctcactgcaacctccacctcctgggttcaagcgatcctcccacctcagcttcccgagtagctgggattatgggagcaagccaccacacccggctaatttttgtatttttaatagagacggggtttcaccatgttgaccaggctggtctcgaactcctgaccttatgcgattcgcctgccttagccttccaaagggctgcgattacaggcgtcaaccaccacgcccagcctagatatttggtttatcttagaaggaggccacaagagagctacaatcacatttttcggaaaaaatacg

SEQ ID NO: 4010 - DNA, 178 bp, Homo sapiens
aacttgaccaacggaacaagttaccctacggataacagcgcaatcctattctagagtccatatcaacaatagggtttacgacctcgatgttggatcacgacatcccgatggtgcaagcactattaaaggttcgtttgatcaacgattaaagtcctacgtgatctgagttcagaccgga

SEQ ID NO: 4011 - DNA, 429 bp, Homo sapiens
ggcaagtggatgataaacctgatgtcacatacagtgatgttggtggctgtaaggaacagattgggaaactgcgagaagtagttgaaaccccattacttcatccagagaggtttgtgaaccttggcattgagcctcccaagggcgtgctgctctttggtccacccggtacaggcaagacactctgtgcgcgggcagttgctaatcggactgatgcgtgcttcattcgagttattggatctgagcttgtacagaaatacgtcggtgagggggctcgaatggttcgagaactctttgaaatggccagaacaaaaaaagcctgccttatcttctttgatgaaattgatgctattggaggggctcgttttgatgatggtgctggaggtgacaatgaagtgcagagaacaatgttggaactgatcaatcatcttg

SEQ ID NO: 4012 - DNA, 301 bp, Homo sapiens
cacatgccatgtacagcatgaggggctgccgaagcccctcaccctgagatgggagccgtcttcccagtccaccgtccccatcgtgggcattgttgctggcctggctgttctatcatttgtggtcatcggagctgtggtcgctgctgtgatgtgtaggaggaagagctcagttggaaaaggagggagctactctcaagctgcgtgcatcgacagtgcccagggctctgatgtgtctctcacagcttgaaaagcctgagacagctgtcttgtgagggactgagatgcatgatttcttcacgcc

SEQ ID NO: 4013 - DNA, 367 bp, Homo sapiens
ggactctgacctagcagtcaacatgaaggctctcattgttctggggcttgtcctcctttctgttacggtccagggcaaggtctttgaaaggtgtgagttggccagaactctgaaaagattgggaatggatggctacaggggaatcagcctagcaaactggatgtgtttggccaaatgggagagtggttacaacacacgagctacaaactacaatgctggagacagaagcactgattatgggatatttcagatcaatagccgctactggtgtaatgatggcaaaaccccaggagcagttaatgcctgtcatttatcctgcagtgctttgctgcaagataacatcgctgatgctgtagcttgtgcaaag

SEQ ID NO: 4014 - DNA, 653 bp, Homo sapiens
tgagtagatgatcttgtcgctgtcggggttcaggtccacgaacatcttcaggatgaactcccgcgccgcctgggcgtcccgctggggaccatcgaactcggggaagtagtccaccaggtgcgagtacaggatcttgtcctccagcaggtccttcttgttgaggaagaggatgacggaggagttctggaaccaggggtaggtgatgatggtccggaacagggctttgctctcctccatccggttctcgttgtccgactccaccaggacttggtcgtattcgctgagggcgacgagaaacatgatggatgtcacgttctcaaagcagtggatccacttcctccgctccgaccgctggccccccacatccaccatccggaagatgatgttctccaggtgaaaaggggtactcgatgatgccggtggtgggcacgcggacccgcagcacgtcctgctgggtgggcaggtagcccaaggtggcgatgcggtcaacgtcggtcaggtagtacttggcagagtcggagagctggtactcgcgcctgcggtcgtagcattcctggatgcccgggtcctcccacagggtcttgatggcactgacgtactgatgctcgaaggtggtcaccttctccacgtccacctcccggatcaggagcgca

SEQ ID NO: 4015 - DNA, 497 bp, Homo sapiens
gtctgcccggctgcagggatggcggggaggggtaagctcatcgcagtgatcggagacgagtacacggtgactggtttcctgctgggcggcataggggagcttaacaagaaccgccatcccaatttcctggtggtggagaaggatacaaccatcaatgagatcgaagacactttccggcaatttctaaaccgggatgacattggcatcatcctcatcaaccagtacatcgcagagatggtgcggcatgccctggacgcccaccagcagtccatccccgctgtcctggagatcccctccaaggagcacccatatgacgccgccaaggactccatcctgcgcagggccaggggcatgttcactgccgaagacctgcgctaggggactcctcatagccctcagcccttccctcgtttccaggcctctccccaggcttgccatcagccttctttactttttgagcctctgatttccaattccctgctccttcccactccatt

SEQ ID NO: 4016 - DNA, 232 bp, Homo sapiens
gggttatagactgcatctttattattattattattatttttaattttttgaggtagagtcaagctctgtcgcccaggctggagtgcagtggcacgatcttggctcactgcaacctccacttcccaggtttgagcaattctcctgcctcagcctcctgagtagttgtaactataggcgtgcgccaccacgtcttgctaatttttgtatttttagtagagacagggttttacct

SEQ ID NO: 4017 - DNA, 475 bp, Homo sapiens
agtatgagttggggcgcccagctgccatcaccaagattggcccccgacgcatccacacagtccgtgtgcggggaggtaacaagaaataccgtgccctgcagttggacgtggggaatttctcctgaggctcagagtgttgtactcgtaaaacaatgatcatcgatgttgtccacaatgcatctaataacgagctggttcttaccaagaccctggtgaagaattgcatcgtgctcatcgacagcacaccgtaccgacagtggtacaagtcccactatgcgctgcccctgggcctcatgaagggagccaagctgactcctgaggaataagacattttaatcaaaaaacgatctaaaaaaattcagaagaattatgatgaaaggaaaaagactgccaaaatcagcagtctcctggaggagcagttccagcatggcaagcttcttgcgtgcatcgcttcaaggccgggacagtgtggccg

SEQ ID NO: 4018 - DNA, 533 bp, Homo sapiens
ggaaaacaccttcctgacaccatgagggccagcagcttcttgatcgtggtggtgttcctcatcgctgggacgctggttctagaggcagctgtcacgggagttcctgttaaaggtcaagacactgtcaaaggccgtgttccattcaatggacaagatcccgttaaaggacaagtttcagttaaaggtcaagataaagtcaaagcgcaagagccagtcaaaggtccagtctccactaagcctggctcctgccccattatcttgatccggtgcgccatgttgaatccccctaaccgctgcttgaaagatactgactgcccaggaatcaagaagtgctgtgaaggctcttgcgggatggcctgtttcgttccccagtgagagggagccggtccttgctgcacctgtgccgtccccagagctacaggccccatctggtcctaagtccctgctgcccttccccttcccacactgtccattcttcctcccattcaggatgcccacggctggagctgcctctctcatccactttccaataa

SEQ ID NO: 4019 - DNA, 523 bp, Homo sapiens
gctagtttctaaggatcatgtctgcgagccaggattcccgatccagagacaatggccccgatgggatggagcccgaaggcgtcatcgagagtaactggaatgagattgttgacagctttgatgacatgaacctctcggagtcccttctccgtggcatctacgcctatggttttgagaagccctctgccatccagcagcgagccattctaccttgtatcaagggttatgatgtgattgctcaagcccaatctgggactgggaaaacggccacatttgccatatcgattctgcagcagattgaattagatctaaaagccacccaggccttggtcctagcacccactcgagaattggctcagcagatacagaaggtggtcatggcactaggagactacatgggcgcctcctgtcacgcctgtatcgggggcaccaacgtgcgtgctgaggtgcagaaactgcagatggaagctccccacatcatcgtgggtacccctggccgtgtgtttgatatgcttaaccggag

SEQ ID NO: 4020 - DNA, 433 bp, Homo sapiens
acgacagaaggggagacccgcgccgccgacgacccagcagccgccatggctctgctccgaggtgtgtttgtagttgctgctaagcgaacgccctttggagcttacggaggccttctgaaagacttcactgctactgacttgtctgaatttgctgccaaggctgccttgtctgctggcaaagtctcacctgaaacagttgacagtgtgattatgggcaatgtcctgcagagttcttcagatgctatatatttggctaggcatgttggtttgcgtgtgggaatcccaaaggagaccccagctctcacgattaataggctctgtggttctggttttcagtccattgtgaatggatgtcaggaaattttgtgttaaagaagctgaagttgttttatgtggaggaaccgaaagcatgagccaagctccctactgtgtc

SEQ ID NO: 4021 - DNA, 456 bp, Homo sapiens
caggcatgctcataaggaaaggttaaaaaaagtaaaaggaactcggcaaatcttaccccgcctgtttaccaaaaacatcacctctagcatcaccagtattagaggcaccgcctgcccagtgacacatgtttgacggccgcggtaccctaaccgtgcaaaggtagcataatcacttgttccttaattagggacctgtatgaatggctccacgagggttcagctgtctcttacttttaaccagtgaaattgacctgcccgtgaagaggcgggcataacacagcaagacgagaagaccctatggagctttaatttattaatgcaaacagtacctaacaaacccacaggtcctaaactaccaaacctgcattaaaaatttcggttggggcgacctcggagcagaacccaacctccgagcagtacatgctaagacttcaccagtcaaagcgaactactata

SEQ ID NO: 4022 - DNA, 398 bp, Homo sapiens
ggtcagtcgtgaagagggagctctattgccaccatgagtttctccggcaagtaccaactgcagagccaggaaaactttgaagccttcatgaaggcaatcggtctgccggaagagctcatccataaggggaaggatatcaagggggtgtcggaaatcgtgcagaatgggaagcacttcaagttcaccatcaccgctgggtccaaagtgatccaaaacgaattcacggtgggggaggaatgtgagctggagacaatgacaggggagaaagtcaagacagtggttcagttggaaggtgacaataaactggtgacagctttcaaaaacatcaagtctgtgaccgaactcaacggcgacataatcaccaataccatgacattgggtgacattgtcttcaagag

SEQ ID NO: 4023 - DNA, 317 bp, Homo sapiens
taaagagggagctctattgccaccatgagtttctccggcaagtaccaactgctgagccaggaaaactttgaagcctgcgtgaaggcaatcggtctgccggaagagctcatccagaaggggaaggatatcaagggggtgtcggaaatcgtgcagaatgggaagcacttcaagttcaccatcaccgctgggtccaaagtgatccaaaacgaattcacggtgggggaggaatgtgagctggagacaatgacatgggagaaagtcaagacagtggttcagttggaaggtgacaataaactggtgacagctttcaaaaacat

SEQ ID NO: 4024 - DNA, 440 bp, Homo sapiens
agccaccagaacacagaatgttcttggtgagaagggccggcggattcgggaactgactgctgtagttcaaaagaggtttggctttccagagggcagtgtacagctttatgctgaaaaggtggccactagaggtctgtgtgccattgcccaggcagagtctctgcgttacaaactcctaggagggcttgctgtgcggagggcctgctatggtgtgctgcggttcatcatggagagtgggtccaaaggctgcgaggttgtggtgtctgggaaactccgaggacagagggctaaatccatgaagtttgtggatggcctgatgatccacagcggagaccctgttaactactacgttgacactgctgtgcgccacgtgttgctcagacagggtgtgctgggcatcaaggtgaagatcatgctgccctgggacccaactggtaaga

SEQ ID NO: 4025 - DNA, 478 bp, Homo sapiens
ggaggatgggcccgttgtgattggctctaccagtgcacctggacagggaggaatcctggctcagcgggagtttgacaggcgattctcccctcattttctggactgggcagcctttggggtcatgacccttccctccatcggcatccccctgctattgtggtactccagcaagaggaaatatgacactcccaaaacgaagaagaactgattggggcttccacagccctcctctcccaagaaatccaggctcctctcccaagaaatccaggtgctttccagactccaaagggtatcttaaatgcaatctcttctctcttagcccttggccactttctcctggatcctgccctgctctcagccatagtgaaggaccagccctaggagtctgcgagagcctccttggttccatcgtgaagccataaacaggaatgcctttggcaatagccttgagcctagagggccctctgatgccccactg

SEQ ID NO: 4026 - DNA, 417 bp, Homo sapiens
atgggattgtgcagcttgaggtagtatggcacagtggttacaaacagatgctagatctggcttcacatctcatctctgccacttactggctgtctgactttattattattattattattttttgagatagtgtctcgctttggtgcccaggctggagtgcagtggcctgatctcggctcactacaacctctgcctcccgggttcaagcaattctcccacctcagcctcccaagtagctgggattacagacatgtgccaacacgccgagctaatttttgtatttttaatagagacagtgtttcaccatgttggccaggctggtctccaactcccgaccttaggtgatccaccttggcctcccaatgtgctgggattacaggaagtgctgggattacaggcatgaaccaccgacctgac

SEQ ID NO: 4027 - DNA, 109 bp, Homo sapiens
ataaaaaataaaaacctaaaaaaaaaaattttaaaaaaaaaaaaaaaaaaaaaaaagggggggggttttttttttttccccccccaaaaaaaaaaacccgggggggggg

SEQ ID NO: 4028 - DNA, 391 bp, Homo sapiens
actgaccacccctcctcttctggaatgtgtgacctggattgtgctcaaggaacccatcagcgtcagcagcgagcaggtgttgaaattccgtaaacttaacttcaatggggagggtgaacccgaagaactgatggtggacaactggcgcccagctcagccactgaagaacaggcaaatcaaagcttccttcaaataagatggtcccatagtctgtatccaaataatgaatcttcgggtgtttccctttagctaagcacagatctaccttggtgatttggaccctggttgctttgtgtctagttttctagacccttcatctcttacttgatagacttactaataaaatgtgaagactagaccaattgtcatgcttgacacaactgctgtggct

SEQ ID NO: 4029 - DNA, 373 bp, Homo sapiens
gagacgaaagcaactgaagtgggcccaatggcagccatgatgggcagaggcacacacatcgctccgctctgtccactcaaaaaagcagcaaaggctgggcgcggtggcacgcgcctataatcccagcactttgggaggccaaggcgggcggatcatgaggtcaggagatcgagaccatcctggctaacacggtgaaaccccatctctactaaaaatacaaaaaattagccgggcgcggtggctggcgcctgtagtcccagctactcgggaggctgaggcatgagaatggcgtgaacccaggaggcggagcctgcagtgagccaagatcgtgccactgcactccggcctgggcgaaagagcaagactctgtctc

SEQ ID NO: 4030 - DNA, 384 bp, Homo sapiens
cgcctcacctgcttgaacttttcacaactccccctggccttctaccacagtgcccagacttgactgcagcttggatccacctggggagcatactgaaagtaaagattctggctgggcacggtggctaacgcctgtaatcccagaactttgggaggctggggtgggtggatctctatgtcaggagttcaagaccagcctggccaacatggagaaaccctgtctcaaaccgcaaaaattagctgggtgcggaggcagtcacctgtaatcccagctacttgggaggctgaggcaggagaatctcttgaatcttggtggcagaggttgcagtgagccgagatcgcgccactgcactccagcctgggcgacagagggagactctgtctc

SEQ ID NO: 4031 - DNA, 441 bp, Homo sapiens
aggggccaccgtgcccaacctgacttgcttcttatccttacactcccccagccccagagaaactgccacatacaccacaaaaaccaaacatcccccaatgaccttagccccattgctccattcactcccaggtgagaattcaggcaaacgtccacaaaggtcacaggcagcgtacatacggttctgttataccccatatattaccccttcatgtccaaagaagacattttctcttagagattatcattttagtgtatctttaaaaaaaaatcttgtgttaacttgcctccatctttttcttgggtgaggacacccaggaatgacccttttgtgtctatgatgttgctgttcacagcttttcttgataggcctagtacaatcttgggaacagggttactgtatactgaaggtctgacagtagctcttagactcgcctatctt

SEQ ID NO: 4032 - DNA, 221 bp, Homo sapiens
tccctgcttaccaggagttcacaatatggaggggaagtaaaatcctcagagaaagtcttgctatcataaagctatgaaagatatatgaggccgggcatggtggctcacgtatgtaatcccagcactttgggagaccaaggtggacagatcacgaggtcaagagattgagatcatcctggccaacatgatgaaaccttgtctctactaaaaatacataaatt

SEQ ID NO: 4033 - DNA, 508 bp, Homo sapiens
gcttcgctcttgcctacttcccctacttcatcacctacaagtgcagcggcctgtccgagtacaacgccttctggaaatgcgtccaggctggagtcacctacctctgtgtccaactctgcaagatgctgttcttggccactttctttcccacctgggaaggcggcatctatgacttcattggggagttcatgaaggccagcgtggatgtggcagacctgataggtctaaaccttgtcatgtcccggaatgccggcaagggagagtacaagatcatggttgctgccctgggctgggccactgctgagcttattatgtcccgctgcattcccctatgggtcggagcccggggcattgagtttgactggaagtacatccagatgagcatagactccaacatcagtctggtccattacatcgtcgcgtctgctcaggtctggatgataacacgctatgatctgtaccacaccttccggccagctgtcctcctgctgatgttcctcagtgtcta

SEQ ID NO: 4034 - DNA, 518 bp, Homo sapiens
catgaccattggaaagcattagtgactaagaaaacgaatggaaaaggaatcagttgcatgaatacaactttgtctgagagccccttcaagtgtgatcctgatgctgccagagccattgtggatgctttaccaccaccctgtgaatctgcctgcacagtaccaacagacgtggataagtggttccatcaccagaaaaactaatgagatttctctggaatacaagctgatattgctacatcgtgttcatctggatgtattagaagtaaaagtagtagcttttcaaagctttaaatttgtagaactcatctaactaaagtaaattctgctgtgactaatccaatatactcagaatgttatccatctaaagcatttttcatatctcaactaagataacttttagcacatgcttaaatatcaaagcagttgtcatttggaagtcacttgtgaatagatgtgcaaggggagcacatattggatgtatatgttaccatatgttaggaaataaaattattgtgctg

SEQ ID NO: 4035 - DNA, 505 bp, Homo sapiens
cagaagggtacagatgtgagccaccgtgcctggccagaaaatctggattcttattcctagttcttcatttctgtcacatgcacttagttgacattacatctacatatattagctttttcctacatgagccatctatttacttagtaaccagtgttcttaatgaagtatttagtcttgggtttcttgtaaaatttctctgcattccttagacagtgtactatacatgaaatattcttgttgacctagtaatttatattattccatttaattcttaaacctatggcctttttattgagcacactcttaaatcattatttggcttgtaaacattcatctgaattgtggctacaatcctctttaaataatctaggaaaaaagaaagataaagcttacattttcacagttttggctcttaaacacattccacaaatgccattaagaatttattttgttttaggccagtcatggtggctcatgcctgtagtcccagcaatttgggaggctg

SEQ ID NO: 4036 - DNA, 452 bp, Homo sapiens; identical to SEQ ID NO: 1032

SEQ ID NO: 4037 - DNA, 377 bp, Homo sapiens
cagaaggggggctctgtcggccaggccacagtgcagtggcaagatcttggctcactacaacctctgcctcctagttcaagcgattctcctgcctcagcctcccaagtagctaggactacaggcgtggaccaccacgcccagctactttttgtatttttagtagagatgaggtttcaccatgttgagcaggctggtctcgaactgctgacctcaggtgatccacctgcctcggcctcccaaagtgctgggattacaggcatgagccactgtgcccagccagtgttgtcaagttttattaggtatttttgttaattccatatcttaagtttactgaaaacactggaatgcctatagcaaaacctggacaagaataaacc

SEQ ID NO: 4038 - DNA, 440 bp, Homo sapiens
gacagaagggcaccaaccagggcagaaatcattatcttagccaccagaacacagaatgttcttggtgagaagggccggcggattcgggaactgactgctgtagttcagaagaggtttggctttccagagggcagtgtagagctttatgctgaaaaggtggccactagaggtctgtgtgccattgcccaggcagggtctctgcgttacaaactcctaggagggcttgctgtgcggagggcctgctatggtgtgctgcggttcatcatggagagtggggccaaaggctgcgaggttgtggtgtctgggaaactccgaggacagagggctaaatccatgaagtttgtggatggcctgatgatccacagcggagaccctgttaactactacgttgacactgctgtgcgccacgtgttgctcagacagggtgtgctgggcatcaa

SEQ ID NO: 4039 - DNA, 244 bp, Homo sapiens
agacgacacagggggtggcggacaccacccattctagcgtctgccctatcaactttcgatggtagtcgccgtgcctaccatggtgaccacggctgacggggaatcacggttctattccggagagggagcctgataaacggctaccacattcaaggaaggcatcaagctcgcaaattacccactcccgacccggtgaggtagtgacgacccaaagaggtagtgacgaaaaaaaaaaagaaataac

SEQ ID NO: 4040 - DNA, 534 bp, Homo sapiens
ggggttgtgattaccaaggttgttatgcacccatccaaagttttggaattgcagatgaacaagcgtggcttcagcatggaagtggggcagtatatctttgttaattgcccctcaatctctctcctggaatggcatccttttactttgacctctgctccagaggaagatttcttctccattcatatccgagcagcaggggactggacagaaaatctcataagggctttcgaacaacaatattcaccaattcccaggattgaagtggatggtccctttggcacagccagtgaggatgttttccagtatgaagtggctgtgctggttggagcaggaattggggtcaccccctttgcttctatcttgaaatccatctggtacaaattccagtgtgcagaccacaacctcaaaacaaaaaagatctatttctactggatctgcagggagacaggtgccttttcctggttcaacaacctgttgacttccctggaacaggagatggaggaattaggcaaagtggggttttctaaactaccg

SEQ ID NO: 4041 - DNA, 507 bp, Homo sapiens
ggcggggctcactctgcgcttcaccatggctttcattgccaagtccttctatgacctcagtgccatcagcctggatggggagaaggtagatttcaatacgttccggggcagggccgtgctgattgagaatgtggcttcgctctgaggcacaaccacccgggacttcacccagctcaacgagctgcaatgccgctttcccaggcgcctggtggtccttggcttcccttgcaaccaatttggacatcaggagaactgtcagaatgaggagatcctgaacagtctcaagtatgtccgtcctgggggtggataccagcccaccttcacccttgtccaaaaatgtgaggtgaatgggcagaacgagcatcctgtcttcgcctacctgaaggacaagctcccctacccttatgatgacccattttccctcatgaccgatcccaagctcatcatttggagccctgtgcgccgctcagatgtggcctggaactttgagaagttcctcatagggcc

SEQ ID NO: 4042 - DNA, 500 bp, Homo sapiens
acagaaggggctttttcctctcttcagcgtggggcgcccacaatttgcgcgctctctttctgctgctccccagctctcggatacagccgacaccatgggtttcggagacctgaaaagccctgccggcctccaggtgctcaacgattacctggcggacaagagctacatcgaggggtatgtgccatcacaagcagatgtggcagtatttgaagccgtgtccagcccaccgcctgccgacttgtgtcatgccctacgttggtataatcacatcaagtcttacgaaaaggaaaaggccagcctgccaggaatgaagaaagctttgggcaaatatggtcctgccgatgtggaagacactacaggaagtggagctacagatagtaaagatgatgatgacattgacctctttggatctgatgatgaggaggaaagtgaagaagcaaagaggctaagggaagaacgtcttgcacaatatgaatcaaagaaagccaaaaaacctgcac

SEQ ID NO: 4043 - DNA, 502 bp, Homo sapiens
aagggggaaggagtgacttccaaggaaatggctacccaacttgccttcatgcgcctgctggccaactatgcctctcagaacatcacctaccactgcaagaacagcattgcatacatggatgaggagactggcaacctgaaaaaggctgtcattctacagggctctaatgatgttgaacttgttgctgagggcaacagcaggttcacttacactgttcttgtagatggctgctctaaaaagacaaatgaatggggaaagacaatcattgaatacaaaacaaataagccatcacgcctgcccttccttgatattgcacctttggacatcggtggtgctgaccaggaattctttgtggacattggcccagtctgtttcaaataaatgaactcaatctaaattaaaaaagaaagaaatttgaaaaaactttctctttgccatttcttcttcttcttttttaactgaaagctgaatccttccatttcttctgcacatctacttgctt

SEQ ID NO: 4044 - DNA, 453 bp, Homo sapiens
aggccgaggtgggcggctcacaaggtcaggagtttgacacccgcctgtccaacatggtgaatccctgtctgtactaaaaatacaaaaattagtcgggcatggtggcacacacctgtaatcccagctactcaggaggctgaagcaggagaatagcttgaacctgggaggcagaggttgcagtgagccaagatcatgccactgcactccagcctgggcaacagagcaagattccatctcaaaaaaatataaaattgtacacaaaattgtgtgtatgtatgcattttatttggagacaagggatatcactccctctccccaacactggctaaaaagttactgcaatctggctgggcgcagtggctcacgcctataatcccaacactttggaaggccaaggcgggcggatcacgaggtcaggagattgagaccatcctggctaacacggagaaaccc

SEQ ID NO: 4045 - DNA, 489 bp, Homo sapiens
aattggaactagaaacaacactcaaggcacagcataaacacctaaaagaattggaggctttcaggttggaagttaaagataagacagatgaagtacatttgcttaatgacacattagcaagtgaacagaaaaaatcaagagagctccagtgggctttggagaaagagaaagccaagttgggacgcagtgaagaacgggataaagaagaacttgaggatctgaagttttcacttgagagtcagaaacaaaggaatcttcagcgaaatctacttttggaacaacagaaacaactactgaacgaatcccagcaaaaaatagaatcacagagaatgctatatgatgcccagttgtcagaagaacaaggtcgaaacttagagcttcaggtacttcttgaatctgagaaagttcgaattcgggaaatgagtagtaccctagatagggagcgggaattgcacgcacagctgcagagcagtgatggtactggacagt

SEQ ID NO: 4046 - DNA, 392 bp, Homo sapiens
ggaaaaggtggttgtgtcaaaccgattggtgacatctccatgctgtattgtcacaagcacatatggctggacagcaaacatggagagaatcatgaaagctcaagccctaagagacaactcaacaatgggttacatggcagcaaagaaacacctggagataaaccctgaccattccattattgagaccttaaggcaaaaggcagaggctgataagaacgacaagtctgtgaaggatctggtcatcttgctttatgaaactgcgctcctgtcttctggcttcagtctggaagatccccagacacatgctaacaggatctacaggatgatcaaacttggtctgggtattgatgaagatgaccctactgctgatgataccagtgctgctgtaactg

SEQ ID NO: 4047 - DNA, 466 bp, Homo sapiens
ccttttcccaccccctagcgccgctgggcctgcaggtctctgtcgagcagcggacgccggtctctgttccgcaggatggggtttgttaaagttgttaagaataaggcctactttaagagataccaagtgaaatttagaagacgacgagagggtaaaactgattattatgctcggaaacgcttggtgatacaagataaaaataaatacaacacacccaaatacaggatgatagttcgtgtgacaaacagagatatcatttgtcagattgcttatgcccgtatagagggggatatgatagtctgcgcagcgtatgcacacgaactgccaaaatatggtgtgaaggttggcctgacaaattatgctgcagcatattgtactggcctgctgctggcccgcaggcttctcaataggtttggcatggacaagatctatgaaggccaagtggaggtgactggtgatgaataca

SEQ ID NO: 4048 - DNA, 449 bp, Homo sapiens
gctctttcggccgcgctggtgaacaggacccgtcgccatgggccgtgtgatccgtggacagaggaagggcgccgggtctgtgttccgcgcgcacgtgaagcaccgtaaaggcgctgcgcgcctgcgcgccgtggatttcgctgagcggcacggctacatcaagggcatcgtcaaggacatcatccacgacccgggccgcggcgcgcccctcgccaaggtggtcttccgggatccgtatcggtttaagaagcggacggagctgttcattgccgccgagggcattcacacgggccagtttgtgtattgcggcaagaaggcccagctcaacattggcaatgtgctccctgtgggcaccatgcctgagggtacaatcgtgtgctgcctggaggagaagcctggagaccgtggcaagctggcccgggcatcagggaactatgccaccgttatct

SEQ ID NO: 4049 - DNA, 458 bp, Homo sapiens
ggggcctttcttccttttggtgcgagcttgctgtggtttttgctctgggtcctctgggatggcgcctggctgtggccgcgtggtctctcacgcaggggcgccgagcgggggaacgcggccaccctgagtctggtgagtcgactgcggcggcctgtgtccgaagtgtccggggccgtgaacaagggcagcggcctggcctcaggcctgcgttcccacgtttggaaacggggagcttcgtcgatttgtgtttacatcatcgactatgccagggagttctccagataagcctggttttattttcgtcagtgaaaaggccttaccgtataactgactttatgcttgccctgcccccgtataaaataacttaaaagcagcgtgcctggttacagctgtttccacgtgcggtgctcgtcgggagtgatcacctaccctacaggtggaagatggatgcctgaagt

SEQ ID NO: 4050 - DNA, 459 bp, Homo sapiens
ggatactaatgaaacaccgtattttatgaagagcatagactgcatccgagccttccgggaagaagccattaagttttcagaagagcagcgctttaacaacttcctgaaagcccttcaagagaaagtggaaattaaacaattaaatcatttctgggaaattgttgtccaggatggaattactctgatcaccaaagaggaagcctctggaagttctgtcacagctgaggaagccaaaaagtttctggcccccaaagacaaaccaagtggagacacagcagctgtatttgaagaaggtggtgatgtggacgatttattggacatgatataggtcgtggatgtatggggaatctaagagagctgccatcgctgtgatgctgggagttctaacaaaacaagttggatgcggccattcaaggggagccaaaatctcaagaaattcccagcaggttacctggaggc

SEQ ID NO: 4051 - DNA, 295 bp, Homo sapiens; identical to SEQ ID NO: 1034
  misc_feature 170: n = A,T,C or G

SEQ ID NO: 4052 - DNA, 212 bp, Homo sapiens
gaaggggctttcttttctcgttccccggccatcttagcggctgctgttggttgggggccgtcccgctcctaaggcacgaagatggtggccgcgaagaagactaaaaggtggcgtggagtccatcaactctaggctccaactcgttatgaaaagtgggaagtacgttctggggtacaagcagactctgaagatgatcacacacggcaaagcga

SEQ ID NO: 4053 - DNA, 337 bp, Homo sapiens
gggagagcgaaggggagaggatggtactgtctgacttccacgttttcgtcagggatgtgttgcagcatgtggattccatgcagaaagactaccctgggcttcctgtcttccttctgggccactccatgggaggcgccatcgccatcctcacggccgcagagaggccgggccacttcgccggcatggtactcatttcgcctctggttcttgccaatcctgaatctgcaacaactttcaaggactattcgaggattttgaaacacttgatggaaaaggcatcaagaatgttaaagttttggattccacgtcctttttgggtccttgctgccaaagtgct

SEQ ID NO: 4054 - DNA, 457 bp, Homo sapiens
gcttccttttttcttttttccggcgttcaagatgtcgaagcgaggacgtggtgggtcctctggtgcgaaattccggatttccttgggtcttccggtaggagctgtaatcaattgtgctgacaacacaggagccaaaaacctgtatatcatctccgtgaaggggatcaagggacggctgaacagacttcccgctgctggtgtgggtgacatggtgatggccacagtcaagaaaggcaaaccagagctcagaaaaaaggtacatccagcagtggtcattcgacaacgaaagtcataccgtagaaaagatggcgtgtttctttattttgaagataatgcaggagtcatagtgaacaataaaggcgagatgaaaggttctgccattacaggaccagtagcaaaggagtgtgcagacttgtggccccggattgcatccaatgctgacagcattgcatgattc

SEQ ID NO: 4055 - DNA, 399 bp, Homo sapiens
gaccaaggacccgccaacatgggccgcgttcgcaccaaaaccgtgaagaaggcggcccgggtcatcatagaaaagtactacacgcgcctgggcaacgacttccacacgaacaagcgcgtgtgcgaggagatcgccattatccccagcaaaaagctccgcaacaagatagcaggttatgtcacgcatctgatgaagcgaattcagagaggcccagtaagaggtatctccatcaagctgcaggaggaggagagagaaaggagagacaattatgttcctgaggtctcagccttggatcaggagattattgaagtagatcctgacactaaggaaatgctgaagcttttggacttcggcagtctgtccaaccttcaggtcactcagcctacagttgggatgaat

SEQ ID NO: 4056 - DNA, 341 bp, Homo sapiens
cggcattctgtctgggaacccctattctatctggaaaccaatgactgtgctgaccagcaaaagataacctttctttctgaaatagtcaaatacgaaattagaaaagccctccctattttaactacctcaactggtcagaaacacagattgtattctatgagtcccagaagatgaaaaaaattttatacgttgataaaacttataaatttcattgattaatctcctggaagattggtttaaaaagaaaagtgtaatgcaagaatttaaagaaatatttttaaagccacaattattttaatattggatatcaactgcttgtaaaggtgctcctcttttttctt

SEQ ID NO: 4057 - DNA, 371 bp, Homo sapiens
gtatatacattttttttctttaaaaaacaactatggatcagaatagccacatttggaacactttttgttatcagtcaatatttttagatagttagaacctggtcctaagcctaaaagtgggcttgattctgcagtaaatcttttacaactgcctcgacacacataaacctttttaaaaatagacactccccgaagtcttttgttcgcatggtcacacactgatgcttagatgttccagtaatctaatatggccacagtagtcttgatgaccaaagtcttttttttccatctttagaaaactacatgggaacaaacagatcgaacagttttgaagctactgtgtgtgtgaatgaacactcttttgctttatt

SEQ ID NO: 4058 - DNA, 648 bp, Homo sapiens
ttcggcacgaggcgccaagttcctagtggagggctgagtccagcatcccagactcgtgtgactatataggcaagcatttggggacctacttcactttgataccctagccttcagcagctcaaggtgttggcctttggataggaggcttccaagtagtaaagctccctgctctcagcaagcccaacaccatggggaagggagatgtcttagaggcagcaccaaccaccacagcctaccattccctcatggatgaatatggttatgaggtgggcaaggccattggccatggctcctatgggtcggtatatgaggctttctacacaaagcagaaggttatggtggcagtcaagatcatctcaaagaagaaggcctctgatgactatcttaacaagttcctgccccgtgaaatacagaacctgatcctccagatgctacgccaagccactaagcgtgccaccattctggacatcatcaaggattcctgggtgctcaagttccagcctgagcaacccacccatgagatcaggctgcttgaggccatgtgccagctccacaacaccactaaacagcaccaatccttgcaaattacgacctgaaaatggctgagggagggggctaagagaggagcaaagcaggaggtcttgggct

SEQ ID NO: 4059 - DNA, 618 bp, Homo sapiens
gactggatccagtggaatacacgcggttaggaaaaggcttcccagccgcctgccccggagacccaatgacatttatgtcaacatgaagacggactttaaggcccagctggcccgctgccagaagctgctggacggaggggcccggggtcagaacgcgtgctctgagatctacattcacggcttgggcctggccatcaaccgcgccatcaacatcgcgctgcagctgcaggcgggcagcttcgggtccttgcaggtggctgccaatacctccaccgtggagcttgttgatgagctggagccagagaccgacacacgggagccactgactcggatccgcaacaactcagccatccacatccgagtcttcagggtcacacccaagtaattgaaaagacactcctccacttatcccctccgtgatatggctcttcgcatgctgagtactggacctcggaccagagccatgtaagaaaaggcctgttccctggaagcccaaaggactctgcattgagggtgggggtaattgtctcttggtgggcccagttagtgggccttcctgagtgtgtgtatgcggtctgtaactattgccatataaataaaaaatcctgttgcactagt

SEQ ID NO: 4060 - DNA, 148 bp, Homo sapiens
ccgaagttcttctgcagtccacatatgcaacacctgtggacatgtggagtgttggctgtatctttgcagagatgtttcgtcgaaagcctctcttctgtggaaactctgaagccgaccagttgggcaaaatctttgacctgattgggct

SEQ ID NO: 4061 - DNA, 109 bp, Homo sapiens
attattttattttttacataaggtcacttaaatgaaaagcgattaaaagacttctttcctgcattgccatctacataatatcagatattacggatgttagattgcatct

SEQ ID NO: 4062 - DNA, 622 bp, Homo sapiens
ccaagaattcggcacgaggtacattgacatagggcattatgtacgtgatatcagtgcttatgaagaattggtatccaagctgaatttattagtggaggatgaactgaagcaaattgctgaaaatattgaaagcattaatcagaacaaagctcctttgaaatatataggcaactatgcaattttggatcatcttggaagtggagcttttggctgtgtttacaaggttagaaagcatagtggtcaaaatcttttagcaatgaaagaggtcaatttacataacccagcatttggaaaggataagaaagatcgagacagcagcgtaaggaatattgcttctgaattaacaataattaaagagcagctttatcatcccaacattgtacgttattacaaaacatttctggaaaatgataggttgtacatagttatggagctgatagaaggagccccgcttggagagcatttcagttctttgaaggaaaaacatcaccattttactgaagaaagactatggagaatatttatacagctgtgcttagctctgcgatacttacacaaggagaagatgattgtccatagagatctgacaccaaacaacattatgttgggggataaggacaaa

SEQ ID NO: 4063 - DNA, 455 bp, Homo sapiens
ggggaagaggctcgcctctagtgtcctccgctgtggcaagaagaaggtctggttagaccccaatgagaccaatgaaatcgccaatgccaactcccgtcagcagatccggaagctcatcaaagatgggctgatcatccgcaagcctgtgacggtccattcccgggctcgatgccggaaaaacaccttggcccgccggaagggcaggcacatgggcataggtaagcggaagggtacagccaatgcccgaatgccagagaaggtcacatggatgaggagaatgaggattttgcgccggctgctcagaagataccgtgaatctaagaagatcgatcgccacatgtatcacagcctgtacctgaaggtgaaggggaatgtgttcaaaaacaagcggattctcatggaacacatccacaagctgaaggcagacaaggcccgcaagaagctcctggctgacc

SEQ ID NO: 4064 - DNA, 433 bp, Homo sapiens
gcctttcctttcagcggagcgcggcggcaagatggcagtgcaaatatccaagaagaggaagtttgtcgctgatggcatcttcaaagctgaactgaatgagtttcttactcgggagctggctgaagatggctactctggagttgaggtgcgagttacaccaaccaggacagaaatcattatcttagccaccagaacacagaatgttcttggtgagaagggccggcggattcgggaactgactgctgtagttcagaagaggtttggctttccagagggcagtgtagagctttatgctgaaaaggtggccactagaggtctgtgtgccattgcccaggcagagtctctgcgttacaaactcctaggagggcttgctgtgcggagggcctgctatggtgtgctgcggttcatcatggagagtggggccaaaggctgc

SEQ ID NO: 4065 - DNA, 309 bp, Homo sapiens
acagaaggggctttttctttgctgcgtctactgcgagaatgaagactattctcagcaatcagactgtcgacattccagaaaatgtcgacattactctgaagggacgcacagttatcgtgaagggccccagaggaaccctgcggagggacttcaatcacatcaatgtagaactcagccttcttggaaagaaaaaaaagagggctccgggttgacaaatggtggggtaacagaaaggaactggctaccgttcggactatttgtagtcatgtacagaacatgatcaagggtgttacactgggcttccgttac

SEQ ID NO: 4066 - DNA, 347 bp, Homo sapiens; identical to SEQ ID NO: 1039

SEQ ID NO: 4067 - DNA, 470 bp, Homo sapiens
aagcacagatctaccttggtgatttggaccctggttgctttgtgtctagttttctagacccttcatctcttacttgatagacttactaataaaatgtgaagactagaccaattgtcatgcttgacacaactgctgtggctggttggtgctttgtttatggtagtagtttttctgtaacacagaatataggataagaaataagaataaagtaccttgactttgttcacagcatgtagggtgatgagcactcacaattgttgactaaaatgctgcttttaaaacataggaaagtagaatggttgagtgcaaatccatagcacaagataaattgagctagttaaggcaaatcaggtaaaatagtcatgattctatgtaatgtaaaccagaaaaaataaatgttcatgatttcaagatgttatattaaagaaaaactttaaaaattattatatatttatagcaaagttatctta

SEQ ID NO: 4068 - DNA, 370 bp, Homo sapiens
gagcttcagctgtgggtagagaagacaggactcaggacaatctccagcatggccagcttccctctcctcctcaccctcctcactcactgtgcagggtcctgggcccagtctgtgctgactcagccaccctcagcgtctgggacccccgggcagagggtcaccatctcttgttctggaagcagctccaacatcggaagtaatcctgtaaactggtaccagcaactcccaggaacggcccccaaaatcctcatctatactaatactcagcggccctcaagcgtccctgaccgattctctggctccaagtctggcacctcagcctccctggccatcagtgggctccagtctgaagatgagggtgattattact

SEQ ID NO: 4069 - DNA, 239 bp, Homo sapiens
agctgtggtcccactcgtatatggtggtgagaccaaaatggtggaaacagccttaaccccagatgcctgctatcctgactaatttaagtcattgctgactgcatagctctttttcttgagaggctctccattttgattcagaaagttagcatatttattaccaatgaatttgaaaccagggctttttttttttggggggaggaaaaaccaaccccctgcccccaaaaaaattaaaaagg

SEQ ID NO: 4070 - DNA, 412 bp, Homo sapiens
gaagtagactaatctctggctgagggatgacttacctgttcagtactctacaattcctctgataatatattttcaaggatgtttttctttatttttgttaatattaaaaagtctgtatggcatgacaactactttaaggggaagataagatttctgtctactaagtgatgctgtgataccttaggcactaaagcagagatagtaatgctttttgagtttcatgttggtttattttcacagattggggtaacgtgcactgtaagacgtatgtaacatgatgttaactttgtgtggtctaaagtgtttagctgtcaagccggatgcctaagtagaccaaatcttgttattgaagtgttctgagctgtatcttgatgtttagaaaagtattcgttacatcttgtaggatctactt

SEQ ID NO: 4071 - DNA, 470 bp, Homo sapiens
ggggctttccggacttggccgagcaggaggcgccatcatgggagtggacatccgccataacaaggaccgaaaggttcggcgcaaggagcccaagagccaggatatctacctgaggctgttggtcaagttatacaggtttctggccagaagaaccaactccacattcaaccaggttgtgttgaagaggttgtttatgagtcgcaccaaccggccgcctctgtccctttcccggatgatccggaagatgaagcttcctggccgggaaaacaagacggccgtggttgtggggaccataactgatgatgtgcgggttcaggaggtacccaaactgaaggtatgtgcactgcgcgtgaccagccgggcccgcagccgcatcctcagggcagggggcaagatcctcactttcgaccagctggccctggactcccctaagggctgcggcactgtcctgctctccggtcctcgcaagg

SEQ ID NO: 4072 - DNA, 476 bp, Homo sapiens
ggtagttttcatttgtggtgagattctctcccaggccacaagacatttcctgctcggaaccttgtttactaatttccactgcttttaaggccctgcactgaaaatgcaagctcaggcgccggtggtcgttgtgacccaacctggagtcggtcccggtccggccccccagaactccaactggcagacaggcatgtgtgactgtttcagcgactgcggagtctgtctctgtggcacattttgtttcccgtgccttgggtgtcaagttgcagctgatatgaatgaatgctgtctgtgtggaacaagcgtcgcaatgaggactctctacaggacccgatatggcatccctggatctatttgtgatgactatatggcaactctttgctgtcctcattgtactctttgccaaatcaagagagatatcaacataaggagagccatgcgtactttctaaaaactgatggtgaaaagctcttacc

SEQ ID NO: 4073 - DNA, 313 bp, Homo sapiens
gatgatggccacagatgaacaatatgaacattggggccaggcgcggtggctcaggcctgtaatcccagcactttgggaggccgaggtgggtggatcatgaggtcaagagatggataccatcctgggcaacatggtgaaattctgtctctactaaaaatacaaaaattagctgggtgtggttgcacacgcctgtaatcccagctgctcaggaggctgaggcaggagaatcgcttgaacccaggaggcagaggttgcagtgagccgagatcatgccactgcactccagcctgggtgacagagcgaggctccatct

SEQ ID NO: 4074 - DNA, 476 bp, Homo sapiens
ctggcctggccgggaccatgtgcgcgtcccgggacgactggcgctgtgcgcgctccatgcacgagttttccgccaaggacatcgacgggcacatggttaacctggacaagtaccggggcttcgtgtgcatcgtcaccaacgtggcctcccagtgaggcaagaccgaagtaaactacactcagctcgtcgacctgcacgcccgatacgctgagtgtggtttgcggatcctggccttcccgtgtaaccagttcgggaagcaggagccagggagtaacgaagagatcaaagagttcgccgcgggctacaacgtcaaattcgatatgttcagcaagatctgcgtgaacggggacgacgcccacccgctgtggaagtggatgaagatccaacccaagggcaagggcatcctgggaaatgccatcaagtggaacttcaccaagttcctcatcgacaagaacggctgcgtggtgaagcgctac

SEQ ID NO: 4075 - DNA, 358 bp, Homo sapiens
cggcacaagtggctgttctgacaggcccccagtttgtcccatctgaactgctgggaggtttccgggtggccagaggagcaaagctgccttccaagtgcctgtctgtgcctgggagaacagagcaggagcgtcgtgcggtccaccgcgcagtgcatggcgattccaggcgctgaacaactcccctggacccttgggcctgcatctgactcccagctgcagagtcagaagctgagtccaggcaactgcttggtcactcccgatcgctcctccctggacacccggttaccaaagtcagcaaagaagatgcggtaatcgccgcctgatctccacatggtgaacacaacactcccaccaacac

SEQ ID NO: 4076 - DNA, 171 bp, Homo sapiens
gttttggagtaatatcccacaactggggtaggaagctcaggacttttttctttaaagctagtcatttcaaaagcatattgtatttttttgaatgactacagtatggacaatttcaaaaaccaaaacccactttggattggtggaagtaaaaactggtaactcactcaagtg

SEQ ID NO: 4077 - DNA, 318 bp, Homo sapiens
actaacctaccgagcctggtgatagctggttgtccaagatagaatcttagttcaactttaaatttgcccacagaaccctctaaatccccttgtaaatttaactgttagtccaaagaggaacagctctttggacactaggaaaaaaccttgcagagagagtaaaaaatttaacacccatagtaaacctaccgagcctggtgatagctggttgtccaagatagaatcttagttcaactttaaatttgcccacagaaccctctaaatccccttgtaaatttaactgttagtccaaagaggaacagctctttggacactagg

SEQ ID NO: 4078 - DNA, 486 bp, Homo sapiens
ggacgctggagcagaagaataaagaaatagaagaactcaccaagatttgtgacgaactgattgccaaaatggggaaaagctaactctgaaccgaatgttttggacttaactgttgagtgcaatatgaccgtcggcacactgctgttcctccagttccatggacaggttctgttttcactttttcgtatgcactactgtatttcctttctaaataaaattgatttgattgtatgcagtactaaggagactatcagaatttcttgctattggtttgcattttcctagtataattcatagcaagttgacctcagagttcctgtatcagggagattgtctgattctctaataaaagacacattgctgaccttggccttgccctttgtacacaagttcccagggtgagcagcttttggatttaatatgaacatgtacagcgtgcatagggactcttgccttaaggagtgtaaacttgatctgcatttgctg

SEQ ID NO: 4079 - DNA, 327 bp, Homo sapiens
aagggggcgacaaacctaccgagcctggtgatagctggttgtccaagatagaatcttagttcaactttaaatttgcccacagaaccctctaaatccccttgtaaatttaactgttagtccaaagaggaacagctctttggacactaggaaaaaaccttgcagagagagtaaaaaatttaacacccatagtaaacctaccgagcctggtgatagctggttgtccaagatagaatcttagttcaactttaaatttgcccacagaaccctctaaatccccttgtaaatttaactgttagtccaaagaggaacagctctttggacactagg

SEQ ID NO: 4080 - DNA, 437 bp, Homo sapiens; identical to SEQ ID NO: 1041

SEQ ID NO: 4081 - DNA, 346 bp, Homo sapiens
gagaggatcgacatgactgactaccacgttttcgtcaaggatgcgtcgcagcatgtggattgcatgcagacagactaccctgggcttcctgtcttccttctgggccactccatgggaggcgccatcgtcatcctcacggtcgcagataggcctgtccacttctccgacatggtactcattccgcctctggttcttgccaatcctgaatctgcaacaactttcaaggtccttgctgcgaaagtgctcaaccttgtgctaccaaacttgtccctcgcgcccatacgactacagcgtgctctctcggaataagacagaggtcgacatttataactcagaccccctgatc

SEQ ID NO: 4082 - DNA, 342 bp, Homo sapiens
  misc_feature 342: n = A,T,C or G
ggcctccgcctgtggatgctgcgcctctccgaacgcaacatgaaggtgctccttgccgccgccctcatcgcggggtccgtcttcttcctgctgctgccgggaccttctgcggccgatgagaagaagaaggggcccaaagtcaccgtcaaggtgtattttgacctacgaattggagatgaagatgtaggccgggtgatctttggtctcttcggaaagactgttccaaaaacagtggataattttgtggccttagctacaggagagaaaggatttggctacaaaaacagcaaattccatcgtgtaatcaaggacttcatgatccagggcggagacttcacccgn

SEQ ID NO: 4083 - DNA, 441 bp, Homo sapiens
actacaacatgtggatatcacttcttggagcaattctttgttgcatagtaatgttcgtcattaactggtgggctgcattgctaacatatgtgatagtccttgggctgtatatttatgttacctacaaaaaaccagatgtgaattggggatcctctacacaagccctgacttacctgaatgcactgcagcattcaattcgtctttctggagtggaagaccacgtgaaaaactttaggccacagtgtcttgttatgacaggtgctccaaactcacgtccagctttacttcatcttgttcatgatttcacaaaaaatgttggtttgatgatctgtggccatgtacatatgggtcctcgaagacaagccatgaaagagatgtccatcgatcaagccaaatatccgcgatggtttattaagaacaaaatgaaggcattttatgctc

SEQ ID NO: 4084 - DNA, 537 bp, Homo sapiens
gggcacgtggagccacggcgtgggagtagggggctgaaggcaggcagcagcggccagggccgccctctgctagccgcttgggtctcgggataccccgtttcttcctgtaggtgtgggacgtgcgtgcggcgagatggacactcccccgctctcggattcggagtcggaatccgatgaatcccttgtcacagacagagagttgcaggatgcgttttcccgagggcttctgaagccaggcctcaatgtcgtgctagaggggccgaagaaggccgtgaacgacgtgaatggcctgaagcaatgtttggcagaattcaagcgggatctggaatgggttgaaaggctcgatgtgacactgggtccggtaccggagatcggtggatctgaggcgccagcacctcagaacaaggaccagaaagctgttgatccagaagacgacttccagcgagagatgagtttctatcgccaagcccaggccgcagtgcttgcagtcttaccccgcctccatcagctcaaagtccctaccaagcgacccactga

SEQ ID NO: 4085 - DNA, 536 bp, Homo sapiens; identical to SEQ ID NO: 1043

SEQ ID NO: 4086 - DNA, 404 bp, Homo sapiens
ggctcaacgagaacgccgtggagaaggtgaacatcaagccgcaggtggaccggtatcggttgaagaatgggcgccgcatcatcctgctggccgagggtcggctggtcaacctgggttgtgccatgggccaccccagcttcgtgatgagtaactccttcaccaaccaggtgatggcgcagatcgagctgtggacccatccagacaagtaccccgttggggttcatttcctgcccaagaagctggatgaggcagtggctgaagcccacctgggcaagctgaatgtgaagttgaccaagctaactgagaagcaagcccagtacctgggcatgtcctgtgatggccccttcaagccggatcactaccgctactgagagccaggtctgcgtttcaccctccagctgctg

SEQ ID NO: 4087 - DNA, 443 bp, Homo sapiens
ggatatgtgcccttctaaagagcatttatattcaaattccttgaaaagattgctgatcagttaaaacacatttggggtgggtgcagtggctcacacctctaatcccagcactttgggaggccgaggcaggtggattatttgaggtaaggagttcaagaccagcctgaccaacatggtgaaatcctgtctctactaaaaatacaaaaattagcccagcgtggtggtgcatgcctgtaatcccaactacttgggaggctgagacaggagaatcacttgaacctgggaggcagaggttgcagtgagccgagatcgcgccattgcactccagcctggatgacaagagcaaaactctgtctcaaaaaataaaaggccgggcacggtggctcacgcctgtaatcccagcactttgggaggccaaggcgggcggatcacgaggtcaagag

SEQ ID NO: 4088 - DNA, 420 bp, Homo sapiens
ggaaacgacaggggaaaggaggtctcactgagcaccgtcccagcatccggacaccacagcggcccttcgctccacgcagaaaaccacacttctcaaaccttcactcaacacttccttccccaaagccagaagatgcacaaggaggaacatgaggtggctgtgctgggggcaccccccagcaccatccttccaaggtccaccgtgatcaacatccacagcgagacctccgtgcccgaccatgtcgtctggtccctgttcaacaccctcttcttgaactggtgctgtctgggcttcatagcattcgcctactccgtgaagtctagggacaggaagatggttggcgacgtgaccggggcccaggcctatgcctccaccgccaagtgcctgaacatctgggccctgattctgggcatcctcatg

SEQ ID NO: 4089 - DNA, 327 bp, Homo sapiens
aaggggctttctttccccgccgatagcgctcacgcaagcatggttaacgtccctaaaacccgccggactttctgtaagaagtgtggcaagcaccaaccccatagagggacacagtacaagaagggcaaggattctctgtacgcccagggaaagcggcgttatgacaggaagcagagtggctatggtgggcaaactaagccgattttccggaaaaaggctaaaactacaaagaagattgtgctaaggcttgagtgcgttgagcccaactgcagatctaagagaatgctggctattaaaagatgcaagcattttgaactgggaggagat

SEQ ID NO: 4090 - DNA, 415 bp, Homo sapiens
agaaggggaaagataatgttgaaagtgctcaagcatctgaagtcaaacctctgagaagctgaatttgaaaaggaatgtttgaatttatatagcaagtgctatttcagcaacaaccatctcatcctattacttttcatctaacgtgcattataattttttaaacagatattccctcttgtcctttaatatttgctaaatatttcttttttgaggtggagtcttgctctgtcgcccaggctggagtacagtggtgtgatcccagctcactgcaacctccgcctcctgggttcacatgattctcctgcctcagcttcctaagtagctgggtttacaggcacccaccaccatgcccagctaatttttgtatttttaatagagacggggtttcgccatttggccaggctggtcttgaact

SEQ ID NO: 4091 - DNA, 443 bp, Homo sapiens
cagatcctctcccctagtatcttcagcacatgctcactgttctccccatccttgtccttcccatgttcattaattcatattgccccgcgcctagtcccattttcacttcctttgacgctcctagtagttttgttaagtcttaccctgtaatttttgcttttaattttgatacctctttatgacttaacaataaaaaggatgtatggtttttatcaactgtctccaaaataatctcttgttatgcagggagtacagttcttttcattcatacataagttcagtagttgcttccctaactgcaaaggcaatctcatttagttgagtagctcttgaaagcagctttgagttagaagtatgtgtgttacaccctcacattagtgtgctgtgtggggcagttcaacacaaatgtaacaatgtatttttgtgaatgagagttggcatgt

SEQ ID NO: 4092 - DNA, 319 bp, Homo sapiens
catgtaatcccagcactttgggaggctgaggtgggcagatcacgaggtcaggagttcaagaccagcctgaccaacatggtgaaaccctgtctctactaaaaatacaaaaattagccgagcatggtggcacatgcctgtaatcccagctacacaagaggctgaggcagaagaatcgcttgaacccgggaggcagaagttgcagtgagccaagatcgcgccactgcactccagcctgggtgacagagtaagactctgtctcaaaaaaaaggaaaaaaaaaaggaattttgactgggcacagtggctcccacctgtaattat

SEQ ID NO: 4093 - DNA, 353 bp, Homo sapiens
gaatttgaagatattaaatcaggttacagaatagatttttattttgatgaaaatccttactttgaaaataaagttctctccaaagaatttcatctgaatgagagtggtgatccatcttcgaagtccaccgaaatcaaatggaaatctggaaaggatttgacgaaacgttcgagtcaaacgcagaataaagccagcaggaagaggcagcatgaggaaccagagagcttctttacctggtttactgaccattctgatgcaggtgctgatgagttaggagaggtcatcaaagatgatatttggccaaacccattacagtactacttggttcccgatatggatgatgaagaaggaga

SEQ ID NO: 4094 - DNA, 519 bp, Homo sapiens
cagaagggctgaagcgggtggcagctccaaagcattggatgctggataaattgaccggtgtgtttgctcctcgtccatccaccggtccccacaagttgagagagtgtctccccctcatcattttcctgaggaacagacttaagtatgccctgacaggagatgaagtaaagaagatttgcatgcagcggttcattaaaatcgatggcaaggtccgaactgatataacctaccctgctggattcatggatgtcatcagcattgacaagacgggagagaatttccgtctgatctatgacaccaagggtcgctttgctgtacatcgtattacacctgaggaggccaagtacaagttgtgcaaagtgagaaagatctttgtgggcacaaaaggaatccctcatctggtgactcatgatgcccgcaccatccgctaccccgatcccctcatcaaggtgaatgataccattcagattgatttagagactggcaagattactgatttcatcaagttcgacactggta

SEQ ID NO: 4095 - DNA, 610 bp, Homo sapiens
aaaagcctttggtcaacaactggccctgcaacccggagctgacgctcatcgcccacctgcctgaccgcagagagatcatctcctttggcagtgggtacggcgggaactcgctgctcgggaagaagtgctttgctctcaggatggccagccggctggccaaggaggaagggtggctggcagagcacatgctggtgagcctgcaggaagccctgatgtgcagatgagaggcctggggggtggcagaaacaaacagcattacagttcccacccgtcagcacacctctctgagcgtgcaggttcccggacagatcgggaaaccccaccagtaatgattagtttacacatacacatcgcttttgaaggcccccaaacaccaggggaccatagagatcctttggacttcatgattctgggagtgtttgtttgcactgatacctgaagaaatagatcttgagggcctacattccaacctctgggctgaagtaccaacctcggggagaaggaaacaaagatcacaataaagaatcttgtccccaacagattctgggtataaccaaccctgagggtgagaagaagtacctggcggccgcaagcttattccctttagtga

SEQ ID NO: 4096 - DNA, 512 bp, Homo sapiens
tggactgtgcattctccaagaagatgaagcggtgaagttgggatttacattggaagtgctgtagacttctttatgtggctcagtggagagagggaaagaatgttgcacctgctctagtaccataggtcaagaggcttctggatcacaaagtcataactagacaggtttgttcttgtagttttctatccccagtctttgctccccagatggcagtagtttttagtaggaaagtgccattcctgtccttaaggcacagtctcatcagaagtctaatacctgggcaggtttataacatcctgagagccagcctgacattagacagaataccctttgtaatacattggaaatttttactcatgcctttttgtttaggataaataggtaagcacaaagagctcttcaaaatcagaaaaaacaataggagtccttccttgtcttttctgagatctctgtccttgtttctgagactttctctaccattaagctctattttagctttcagttattctagt

SEQ ID NO: 4097 - DNA, 595 bp, Homo sapiens
ctagagggaagtgttccctttaaaaataagaacaactgtcctggctggagaatctcacaagcggaccagagatctttttaaatccctgctactgtcccttctcacaggcattcacagaacccttctgattcgtaagggttacgaaactcatgttcttctccagtcccctgtggtttctgttggagcataaggtttccagtaagcgggagggcagatccaactcagaaccatgcagataaggagcctctggcaaatgggtgctcatcagaacgcgtggattctctttcatggcagaatgctcttggactcggttctccaggcctgattccccgactccatcctttttcaggggttatttaaaaatctgccttagattctatagtgaagacaagcatttcaagaaagagttacctggatcagccatgctcagctgtgacgcctgaataactgtctactttatcttcactgaaccactcactctgtgtaaaggccaacagatttttaatggtggttttcatatcaaaagatcatgttgggattaacttgcctttttccccaaaaaataaactctcaggcaagcatttctttaaagcta

SEQ ID NO: 4098 - DNA, 572 bp, Homo sapiens
  misc_feature 416: n = A,T,C or G
tcactatagggcgaattgggtaccgggcccccccctgaagatcaagcgcctgagaaagaagtttgcccaaaagatgcttcgaaaggcaaggaggaagcttatctatgaaaaagcaaagcactatcacaaggaatataggcagatgtacagaactgaaattcgaatggcgaggatggcaagaaaagctggcaacttctatgtacctgcagaacccaaattggcgtttgtcatcagaatcagaggtatcaatggagtgagcccaaaggttcgaaaggtgttgcagcttcttcgccttcgtcaaatcttcaatggaacctttgtgaagctcaacaaggcttcgattaacatgctgaggattgtagagccatatattgcatgggggtaccccaatctgaagtcagtaaatgaactaatcntacaagcgtggttatggcaaaatcaataagaagcgaattgctttgacagataacgctttgattgctcgatctcttggtaaatacggcatcatctgcatggaggatttgattcatgagatctatactgttggaaaacgcttcaaagaggcaaataac

SEQ ID NO: 4099 - DNA, 489 bp, Homo sapiens
gctttttcctctcttcagcgtggggcgcccacaatttgcgcgctctctttctgctgctccccagctctcggatacagccgacaccatgggtttcggagacctgaaaagccctgccggcctccaggtgctcaacgattacctggcggacaagagctacatcgaggggtatgtgccatcacaagcagatgtggcagtatttgaagccgtgtccagcccaccgcctgccgacttgtgtcatgccctacgttggtataatcacatcaagtcttacgaaaaggaaaaggccagcctgccaggagtgaagaaagctttgggcaaatatggtcctgccgatgtggaagactacaggaagtggagctacagatagtaaagatgatgatgacattgacctctttggatctgatgatgaggaggaaagtgaagaagcaaagaggctaagggaagaacgtcttgcacaatatgaatcaaagaaagccaaaaaacctgcac

SEQ ID NO: 4100 - DNA, 300 bp, Homo sapiens
gctttccggacctggccgagcaggaggcgccatcatgggagtggacatccgccataacaaggaccgaaaggttcggcgcaaggagcccaagagccaggatatctacctgaggctgttggtcaagtatacaggtttctggccagaagaaccaactccacattcaaccaggttgtgttgaagaggttgtttatgagtcgcaccaaccggccgcctctgtccctttcccggatgatccggaagatgaagcttcctggccgggaaaacaagacggccgtggttgtggggaccataactgatgat

SEQ ID NO: 4101 - DNA, 420 bp, Homo sapiens
gcttttccggctgcggcgccgcgcggtgaggttgtctagtccacgctcggagccatgccgtccaagggtccgctgcagtcggtgcaggtcttcggacgcaagaagacagcgacagctgtggcgcactgcaaacgcggcaatggtctcatcaaggtgaacgggcggcccctggagatgattgagccgcgcacgctacagtacaagctgctggagccagttctgcttctcggcaaggagcgatttgctggtgtagacatccgtgtccgtgtaaagggtggtggtcacgtggcccagatttatgctatccgtcagtccatctccaaagccctggtggcctattaccagaaatatgtggatgaggcttccaagaaggagatcaaagacatcctcatccagtatgaccggaccctgctggtagct

SEQ ID NO: 4102 - DNA, 327 bp, Homo sapiens
gaccacgcttttcatctgtcccgctgcgtgttttcctcttgatcgggaactcctgcttctccttgcctcgaaatggaccccaactgctcctgctcgcctgttggctcctgtgcctgtgccggctcctgcaaatgcaaagagtgcaaatgcacctcctgcaagaagagctgctgctcctgctgccctgtgggctgtgccaagtgtgcccagggctgcatctgcaaagggacgtcagacaagtgcagctgctgtgcctgatgccaggacagctgtgctctcagatgtaaatagagcaacctatataaacctggattttttttttttttt

SEQ ID NO: 4103 - DNA, 342 bp, Homo sapiens
gtcgactcgctatgtccactaacaatatgtcggacccacggaggccgaacaaagtgctgaggtacaagcccccgccgagcgaatgtaacccggccttggacgacccgacgccggactacatgaacctgctgggcatgatcttcagcatgtgcggcctcatgcttaagctgaagtggtgtgcttgggtcgctgtctactgctccttcatcagctttgccaactctcggagctcggaggacacgaagcaaatgatgagtagcttcatgctgtccatctctgccgtggtgatgtcctatctgcagaatcctcagcccatgacgcccccatggtgataccagccta

SEQ ID NO: 4104 - DNA, 476 bp, Homo sapiens
gcttttttttcctccctgtcgccaccgaggtcgcacgcgtgagacttctccgccgcctccgccgcagacgccgccgcgatgcgctacgtcgcctcctacctgctggctgccctagggggcaactcctcccccagcgccaaggacatcaagaagatcttggacagcgtgggtatcgaggcggacgacgaccggctcaacaaggttatcagtgagctgaatggaaaaaacattgaagacgtcattgcccagggtattggcaagcttgccagtgtacctgctggtggggctgtagccgtctctgctgccccaggctctgcagcccctgctgctggttctgcccctgctgcagcagaggagaagaaagatgagaagaaggaggagtctgaagagtcagatgatgacatgggatttggcctttttgattaaattcctgctcccctgcaaataaagcctttttacacatttaaaaaacaaaa

SEQ ID NO: 4105 - DNA, 333 bp, Homo sapiens
gcgcttccgccatctttccagcctcagtcggacgggcgcggagacgcttctggaaggaacgccgcgatggctgcgcagggagagccccaggtccagttcaaacttgtattggttggtgatggtggtactggaaaaacgaccttcgtgaaacgtcatttgactggtgaatttgagaagaagtatgtagccaccttgggtgttgaggttcatcccctagtgttccacaccaacagaggacctattaagttcaatgtatgggacacagccggccaggagaaattcggtggactgagagatggctattatatccaagcccagtgtgccatcataatg

SEQ ID NO: 4106 - DNA, 394 bp, Homo sapiens
attctgctttccaactgcctgactgcttgttcgtctcactggtgtgagctccagcatcccctttgctcgaaatggaccccaactgctcttgcgccactggtggctcctgcacgtgcgccggctcctgcaagtgcaaagagtgcaaatgcacctcctgcaagaagagctgctgttcctgctgccccgtgggctgtgccaagtgtgcccagggctgcgtctgcaaaggggcatcggagaagtgcagctgctgtgcctgatgtgggaacagctcttctcccagatgtaaatagaacaacctgcacaacctggatttttttaaaaatacaacactgagccatttgctgcatttctttttatactaaatatgtgactgacaataaaaacaattttgact

SEQ ID NO: 4107 - DNA, 477 bp, Homo sapiens
acagaagggggacaaagtcaacttccacatgtttgacgtgggtggccagcgcgatgaacgccgcaagtggatccagtgcttcaacgatgtgactgccatcatcttcgtggtggccagcagcagctacaacatggtcatccgggaggacaaccagaccaaccgcctgcaggaggctctgaacctcttcaagagcatctggaacaacagatggctgcgcaccatctctgtgatcctgttcctcaacaagcaagatctgctcgctgagaaagtccttgctgggaaatcgaagattgaggactactttccagaatttgctcgctacactactcctgaggatgctactcccgagcccggagaggacccacgcgtgacccgggccaagtacttcattcgagatgagtttctgaggatcagcactgccagtggagatgggcgtcactactgctaccctcatttcacctgcgctgtggacactga

SEQ ID NO: 4108 - DNA, 385 bp, Homo sapiens
cagaaggggggcaacatgaaggaggtgttcacccgcttctgcaccggcctcacccagattgaagctctcttcaagtctaaggactatgagttcatgtggaaccctcacctgggctacatcctcacctgcccatccaacctgggcaccgggctgcgggcaggtgtgcatatcaagctgcccaacctgggcaagcatgagaagttctcggaggtgcttaagcggctgcgacttcagaagcgaggcacaagcggtgtggacacggctgcggtgggcggagtcttctacgtctccaacgctgaccgactgggcttctcataggtggagctggtgcagatggtggtggacggagtgaatctgctcatcgagatggaacagcggctggagc

SEQ ID NO: 4109 - DNA, 416 bp, Homo sapiens
tacgggaaggcgaagaaaagaatagagaagatagggaaattagaagataaaaacatacttttagaggaaaaaagatctatttaaacctgaaaagtaggaagcaggggaaaaaagacaagctaggaaacaaaaagctaagggcaaaatgtacaaacttagaagaaaattggaagatagaaacaagatagaaaatgaaaatattgtcaagagtttcagatagaaaatgaaaaacaagctaagacaagtattggagaagtatagaagatagaaaaatataaagccaaaaattggataaaatagcactgaaaaaatgaggaaattattggtaaccaatttattttaaaagcccatcaatttaatttctggtggtgcagaagttagaaggtaaagcttgagaagatgagggtgtttacgta

SEQ ID NO: 4110 - DNA, 436 bp, Homo sapiens
gaagacgacataaggggcctagggtccttcattgtaatttgctctattcttgggacacaagcatggatcaccagtacaattgctgttagagactctgcttcaaatgggagcattttcatcacttacggactttttcgtggggagagtactgaagaattgagtcacggacttgcagaaccaaagaaaaagtttgcagttttagagatactgaataattcttcccaaaaaactctgcattcggtgactatcctgttcctggtcctgagtttgatcacgtcgctgctgagctctgggtttaccttctacaacagcatcagcaacccttaccagacattcctggggccgacagaggtgtacacctggaacgggctcggtgcatccttactttctgtgaccatgatactgtttgtggcgaacacgcagtccaaccaactct

SEQ ID NO: 4111 - DNA, 278 bp, Homo sapiens
ggagtctctttgcggcgctacactagagcagagtacgagtctgaggcggagggagtaatggcaggacaagcgtttagaaagtttcttccactctttgaccgagtattggttgaaaggagtgctgctgaaactgtaaccaaaggaggcattatgcttccagaaaaatctcaaggaaaagtattgcaagcaacagtagtcgctgttggatcgggttctaaaggaaagggtggagagattcaaccagttagcgtgaaagttggagataaagttcttctccc

SEQ ID NO: 4112 - DNA, 502 bp, Homo sapiens; identical to SEQ ID NO: 2776

SEQ ID NO: 4113 - DNA, 269 bp, Homo sapiens
tcatatgcattgatcaatttctcactgttccatgcatcacttgcaaaatctccaggatggcgtcctgcattcaaatactacaacatgtggatatcacttcttggagcaattctttgttgcatagcaatgtacgtcattaactggagggctgcattgctaacatatgtgatagcccttgggctgtatatttatgttacctacaaaaaaccacatgtgaattggggatcctctacacaaaccctgacttacctgaatgccctgcagcattc

SEQ ID NO: 4114 - DNA, 453 bp, Homo sapiens; identical to SEQ ID NO: 2806

SEQ ID NO: 4115 - DNA, 389 bp, Homo sapiens
gctctttccctgccgccgccgagtcgcgcggaggcggaggcttgggtgcgttcaagattcaacttcacccgtaacccaccgccatggccgaggaaggcattgctgctggaggtgtaatggacgttaatactgctttacaagaggttctgaagactgccctcatccacgatggcctagcacgtggaattcgcgaagctgccaaagccttagacaagcgccaagcccatctttgtgcgcttgcatcctactgtgatgagcctatgtatgtcaagttggtggaggccctttgtgctgaacaccaaatcaacctaattaaggttgatgacaacaagaaactaggagaatgggtaggcctttgtaaaattgacagagaggggaaaccccgtaaa

SEQ ID NO: 4116 - DNA, 186 bp, Homo sapiens
attataggtgtcagccactgtgcctggctcgatttacctttacctgtttaaatggttggggaaaaaaaaatcgaagctcgagcatcgtggctcatacctgtaatcccagcactttgggaggccaaggcggccggatcacctcacgtcaggattttgaaaccagcctggccaacatggtgaaacccc

SEQ ID NO: 4117 - DNA, 310 bp, Homo sapiens; identical to SEQ ID NO: 1059

SEQ ID NO: 4118 - DNA, 431 bp, Homo sapiens
agggaaataaaataaaaagctggaggacacacttttctctatgtatgctgtacttcaactttttaaaaagtgaataacactaaaagatgttgaatgaataacttcccaaccactagtgggtataaaagggcaataagaataacagtacaggccgggcgcggtggctcacgcgtgtaatcccagcactttgggaggccgtggcgggcggatcacaagctcaggagatcaagaccatcctggctaacacggtgaaaccccgtgtctactaaaaatacaaaaaaattagccgggcatggtggcgggtgcctgtagtcccagctactcgggaggctgaggcaggagaatggcatgaacctgggaggcggagcttgcagtgagccgagattgcacaactgcactccagcctgggccaaagagcaagactccgtctt

SEQ ID NO: 4119 - DNA, 391 bp, Homo sapiens
gagctgtgtcactgggcctggtgctgctggtggtgctgctgctgcttctgaggcactggggctggggcctgtgccttatcggctggaacgagttcatcctgcagcccatccacaacctgctcatgggtgacaccaatgagcagcgcatcctgaaccatgtgctgcagcatgcagagcccgggaacgcacagagcgtgctggaggccattgacacctactgcgagcagaaggagtgggccatgaacgtgggcgacaagaaaggcaagatcgtggacgccgtgattcatgagcaccagccctccgtgctgctggagctgggggcctactgtggctactcagctgtgcgcatggcccgactgctgtcaccaggggcgaggctcatcaccatcga

SEQ ID NO: 4120 - DNA, 521 bp, Homo sapiens; identical to SEQ ID NO: 1060

SEQ ID NO: 4121 - DNA, 258 bp, Homo sapiens
gcttttccaagcggctgccgaagatggcggaggtgcaggtcctggtgcttgatggtcgaggccatctcctgggccgcctggcggccatcgtggctaaacaggtactgctgggccggaaggtggtggtcgtacgctgtgaaggcatcaacatttctggcaatttctacagaaacaagttgaagtacctggctttcctccgcaagcggatgaacaccaacccttcccgaggcccctaccactttcgggcccccagccgca

SEQ ID NO: 4122 - DNA, 456 bp, Homo sapiens
gactggttttaaagttacctgaagctcttaacttcctcccctctgaatttagtttggggaaggtgtttttagtacaagacatcaaagtgaagtaaagcccaagtgttctttagctttttataatactgtctaaatagtgaccatctcatgggcattgttttcttctctgctttgtctgtgttttgagtctgctttcttttgtctttaaaacctgatttttaagttcttctgaactgtagaaatagctatctgatcacttcagcgtaaagcagtgtgtttattaaccatccactaagctaaaactagagcagtttgatttaaaagtgtcactcttcctccttttctactttcagtagatatgagatagagcataattatctgttttatcttagttttatacataatttaccatcagatagaactttatggttctagtacagatactctactacactc

SEQ ID NO: 4123 - DNA, 386 bp, Homo sapiens
cagaaggggcagaaggttttgaaccttttttcacctcgtctgaaatggctgcctcccagtgtctctgctgctcaaaatttctcttccagagacagaacctcgcctgtttcctcacaaacccacactgtggcagccttgttaatgcagatggccatggtgaagtgtggacagattggaataatatgtccaagtttttccagtatggatggcgatgcaccactaatgagaatacctattcaaaccgtaccctgatgggcaactggaaccaggaaagatatgacctgaggaatatcgtgcagcccaaacccttgccttcccagtttggacactactttgaaacaacatatgatacaagctacaacaacaaaatgccactttcaacacat

SEQ ID NO: 4124 - DNA, 229 bp, Homo sapiens
cagtctgctgatgttggagctgctgagacgacgctcacagagctgagacgtacagtccagtccttggagatcgacctggactccatgagaaatctgaaggccagcttggagaacagcctgagggaggtggaggcccgctacgccctacagatggagcagctcaacgggatcctgctgcaccttgagtcagagttggcacagacccgggcagagggacagcgccaggccc

SEQ ID NO: 4125 - DNA, 381 bp, Homo sapiens
gagtggaggccgcgggctctgagcggcccctgcccggatggcaacagtagttctaggaggagacaccatgggccctgagcttatcttccccaatcagactgagggactgggacatcagggcccttcagaaggcactggggattggagcagtgaggagcctgaggaagagcaggaggaaacggggtcgggcccagctggctactcctaccagcccctgaaccaagatcctgaacaagaggaggtggaactggcaccactgggggatggagatgtagttgctgacatccaggatcgaatccaggccctggggcttcatttgccagacccaccattagagagtgaagatgaagatgaggagggagctccagcgttgaacaacca

SEQ ID NO: 4126 - DNA, 467 bp, Homo sapiens; identical to SEQ ID NO: 2913

SEQ ID NO: 4127 - DNA, 440 bp, Homo sapiens
gaaggggaccccttcgctcacctgcccaagagtacctttgtgttggatgaatttaagcgcaagtactccaatgaggacacactctctgtggcactgccatatttctgggggggggttgataaggacggctggtccctgtggtactcagagtatcccttccctgaagaactcactcagaccttcatgagctgcaatctcatcactggaatgttccagcgactggacaagctgaggaagaatgccttcgccagtgtcatcctttttggaaccaacaatagcagctccatttctggagtctgggtcttccgaggccaggagcttgcctttccgctgagtccatattggcaggtggactacgagtcatacacatggctgaaactggatcctggcagcgaggatacccacacgctggttcgagagtacttttcctgggagggggc

SEQ ID NO: 4128 - DNA, 458 bp, Homo sapiens
cagaaggggctttcacattcgggaagcgtcgggattaggtgaaagtacgtagttgtctttcgtaagttaaaatgataattgggccgaaacttactgccttacctaaaaggtagcgcagtcaggatattggtaggtcgggggcggctttggaaacccttaagtttacaagcatgcgcggacttgagtgctcattaggtcgccgggcgtccacgtgcagccctggaccctgaaccccggcgtgcgtgggccgtgggccctcggggaaaggttccgtgcactcggggactccggtgaagcctgttcagccgtctgtgtcatgtggccatcttgagtctactctgtcgctcttgtgccctagcaccccgagaactgtcagtttgagccagatggaagctgagctgaacacattacgatggatgatggaaacataagactatcaagaaatccaagtggtaatg

SEQ ID NO: 4129 - DNA, 509 bp, Homo sapiens
ggataatatgctggacaaagtcaatgagatgattattggtggtggaatggcttttaccttccttaaggtgctcaacaacatggagattggcacttctctgtttgatgaagagggagccaagattgtcaaagacctaatgtccaaagctgagaagaatggtgtgaagattaccttgcctgttgactttgtcactgctgacaagtttgatgagaatgccaagactggccaagccactgtggcttctggcatacctgctggctggatgggcttggactgtggtcctgaaagcagcaagaagtatgctgaggctgtcactcgggctaagcagattgtgtggaatggtcctgtgggggtatttgaatgggaagcttttgcccggggaaccaaagctctcatggatgaggtggtgaaagccacttctaggggctgcatcaccatcataggtggtggagacactgccacttgctgtgccaaatggaacacggaggataaagtcagccatgtgagca

SEQ ID NO: 4130 - DNA, 518 bp, Homo sapiens
cttgcattttagctaatttaggagttttgagaatgtattggatacgctccagtacataaggagttgccgcatattatatcagactgctttgagaaatctcatccgtagtctattgcagttgtttctattagcttactgattaactcagtcctgacacaccttttgggaaatgctgatttaaacttcttaactggcaacagttggaacagtaatcagtttgctaacatatttaaagtcttgaatgttgaagaactcatgtgatttacccttttcaactttttggaaaacgatttaatttattctaattagattaaccctattaatctatggattgggtatcaaaatgaatgccagtccagatgtgcctagacacgaaattggagctgaggactctcacgatatgcaagttcatccaacgtgaagataccataagctttttctctgaaccagagaaatgaaagtcagtttaagaggctgatagatcttggccctgttaaggcatccacttcacagttctg

SEQ ID NO: 4131 - DNA, 329 bp, Homo sapiens
gctcttttccggttagcgcggcgtgagaagccatgagcagcaaagtctctcgcgacaccctgtacgaggcggtgcgggaagtcctgcacgggaaccagcgcaagcgccgcaagttcctggagacggtggagttgcagatcagcttgaagaactatgatccccagaaggacaagcgcttctcgggcaccgtcaggcttaagtccactccccgccctaagttctctgtgtgtgtcctgggggaccagcagcactgtgacgaggctaaggccgtggatatcccccacatggacatcgaggcgctgaaaaaactcaacaagaataaaaaactg

SEQ ID NO: 4132 - DNA, 357 bp, Homo sapiens
gctttctctctcgcgcgcggtgtggtggcagcaggcgcagcccagcctcgaaatgcagaacgacgccggcgagttcgtggacctgtacgtgccgcggaaatgctccgctagcaatcgcatcatcggtgccaaggaccacgcatccatccagatgaacgtggccgatgttgacaaggtcacaggcaggtttaatggccagtttaaaacttatgctatctgcggggccattcgtaggatgggtgagtcagatgattccattctccgattggccaaggccgatgacatcgtctcaaagaacttttgactggagagaatcacagatgtggaatatttgtcataaataaataatgaaaacct

SEQ ID NO: 4133 - DNA, 340 bp, Homo sapiens
gatccccatcccgtggagtggccggcgacaagatggcagcagcgtgtcggagcgtgaagggcctggtggcggtaataaccggaggagcctcgggcctgggcctggccacggcggatcgacttgtggggcagggagcctctgctgtgcttctggacctgcccaactcgggtggggaggcccaagccaagaagttaggaaacaactgcgttttcgccccagccgacgtgacctctgagaaggatgtgcaaacagctctggctctagcaaaaggaaagtttggccgtgtggatgtagctgtcaactgtgcaggcatctcggtggctagcaagacgtacaactt

SEQ ID NO: 4134 - DNA, 238 bp, Homo sapiens
tcattgatctcttcctgggggcctctctcaaggatgaggtcctgaatattatgccagggcataagcagacccgtgccggccagcgcaccaggttcaaggcatttgttgctgtcggggactacaatggccacgtcggtctgggtgttaagtgctccacggaggtggccaccgccctccgaggggccatcatgctggccaagctctccatcgtccccgtgcgcataggctactgggggaa

SEQ ID NO: 4135 - DNA, 429 bp, Homo sapiens
ggaagttctgcgctggtcggcggagtagcaagtggccatggggagcctcagcggtctgcgcctggcagcaggaagctgttttaggttatgtgaaagagatgtttcctcatctctaaggcttaccagaagctctgatttgaagagaataaatggattttgcacaaaaccacaggaaagtcccggagctccatcccgcacttacaacagagtgcctttacacaaacctacggattggcagaaaaagatcctcatatggtcaggtcgcttcaaaaaggaagatgaaatcccagagactgtctcgttggagatgcttgatgctgcaaagaacaagatgcgagtgaagatcagctatctaatgattgccctgacggtggtaggatgcatcttcatggttattgagggcaagaaggctgcccaaagacacgagac

SEQ ID NO: 4136 - DNA, 352 bp, Homo sapiens
cgaaggggagtccgaactagtctcaggcttcaacatcgaatacgccgcaggccccttcgccctattcttcatagccgaatacacaaacattattataataaacaccctcaccactacaatcttcctaggaacaacatatgacgcactctcccctgaactctacacaacatattttgtcaccaagaccctacttctaacctccctgttcttatgaattcgaacagcatacccccgattccgctacgaccaactcatacacctcctatgaaaaaacttcctaccactcaccctagcattacttatatgatatgtctccatacccattacaatctccagcattccccctcaaacc

SEQ ID NO: 4137 - DNA, 436 bp, Homo sapiens
gctcttctgaggatccggcaagatggcagaagtagagcagaagaagaagcggaccttccgcaagttcacctaccgcggcgtggacctcgaccagctgctggacatgtcctacgagcagctgatgcagctgtacagtgcgcgccagcggcggcggctgaaccggggcctgcggcggaagcagcactccctgctgaagcgcctgcgcaaggccaagaaggaggcgccgcccatggagaagccggaagtggtgaagacgcacctgcgggacatgatcatcctacccgagatggtgggcagcatggtgggcgtctacaacggcaagaccttcaaccaggtggagatcaagcccgagatgatcggccactacctgggcgagttctccatcacctacaagcccgtaaagcatggccggcccggcatcggggccacccactcc

SEQ ID NO: 4138 - DNA, 379 bp, Homo sapiens
agaaccattaatagcaataggagacgggcgcggtggctcatgcctgtaatcccagcactttgggaggccaaggcagatggatcacctgaggtcggcagttcaagaccagcctgaccaatatggagaaaccctgtctctactaaaaatacaaaattagctgggcacggtggcgtgtgcctgtaatcccagctacttgggaggctgaggcaggagaattgcttgaacctgggaggcggaggttgccgtgagccgagattgtgccattgcaccccagcctgggcaacaagagcgaaactgcgtctcaaaaacaaacaaacaaacgcaaaaggagggagatcaagtgcagaaataaaattgggaaaaacttatattaaagaaa

SEQ ID NO: 4139 - DNA, 455 bp, Homo sapiens
accattcgtacccgttggaatagcgggttttgcagcaattgttgcatatggattatataaactgaagagcaggggaaatactaaaatgtccattcatctgatccacatgcgtgtggcagcccaaggctttgttgtaggagcaatgactgttggtatgggctattccatgtatcgggaattctgggcaaaacctaagccttagaagaagagatgctgtcttggtcttgttggaggagcttgttttagttagatgtcttattattaaagttacctattattgttggaaataaactaatttgtatgggtttagatggtaacatggcattttgaatattggcttcctttcttgcaggcttgatttgcttggtgaccgaattactagtgactagtttactaactaggtcattcaaggaagtcaagttaacttaaacatgtcacctaaatgcacttgatgg

SEQ ID NO: 4140 - DNA, 385 bp, Homo sapiens
atccttcttgacataaagactcgacttgaacaggaaattgctacttaccgccgacttctggaaggagaagacgtaaaaactacagaatatcagttaagcaccctggaagagagagatctaaagaaaaccaggaagattaagacagtcgtgcaagaagtagtggatggcaaggtcgtgtcatctgaagtcaaagaggtggaagaaaatatctaaatagctaccagaaggagatgctgctgaggttttgaaagaaatctggctataatcttatctttgctccctgcaagaaatcagccataagaaagcactattaatactctgcagcgattagaaggggtggggtggcgggaatcctatttatcagactctgtaattgaatataaat

SEQ ID NO: 4141 - DNA, 445 bp, Homo sapiens
ggccaggcgtcctcgtggaagtgacatcgtctttaaaccctgcgtggcaatccctgacgcaccgccgtgatgcccagggaagacagggcgacctggaagtccaactacttccttaagatcatccaactattggatgattatccgaaatgtttcattgtgggagcagacaatgtgggctccaagcagatgcagcagatccgcatgccccttcgcgggaaggctgtggtgctgatgggcaagaacaccatgatgcgcaaggccatccgagggcacctggaaaacaacccagctctggagaaactgctgcctcatatccgggggaatgtgggctttgtgttcaccaaggaggacctcactgagatcagggacatgttgctggccaataaggtgccagctgctgcccgtgctggtgccattgccccatgtgaagtcactgtgccagccc

SEQ ID NO: 4142 - DNA, 508 bp, Homo sapiens
gagtgtacaagtgggtatttgaataccagaccttactgtaaaaaataaaaaaggtggtatctagagcatgtaaattggatataaagttctgctcttaaagagttgatctaagagtatggctaaacatctatatatgcaatctattaaaagaacttaattcggctattatgtcttgatttgattgcagttttttcctaattataacaaatttttcctcattggcctgtttttaatcctgtgcctagaaggagtacaaaatgcacactttacaaaattgatatttaacacttacccactcccctttccccatctcttctaccgctcttgttgatcgtggtatctgatcttgactagataggctgaaggcacatggttccctccaaaaaccactattgataccactacaaaaacaagccagcaaaaagatactgtagagaggttggcttgcttccctctcttcctaactgcatgttgaaaaataagccgttattgatcttaaacatcggtc

SEQ ID NO: 4143 - DNA, 491 bp, Homo sapiens
ctttccctaagcagcctgaggtgatctgtgaaaatggttcgctattcacttgacccggagaaccccacgaaatcatgcaaatcaagaggttccaatcttcgtgttcactttaagaacactcgtgaaactgctcaggccatcaagggtatgcatatacgaaaagccacgaagtatctgaaagatgtcactttacagaaacagtgtgtaccattccgacgttacaatggtggagttggcaggtgtgcgcaggccaagcaatggggctggacacaaggtcggtggcccaaaaagagtgctgaatttttgctgcacatgcttaaaaacgcagagagtaatgctgaacttaagggtttagatgtagattctctggtcattgagcatatccaattgaacaaagcacctaagatgcgccgccggacctacagagctcatggtcggattaacccatacatgagctctccctgccacattgagatgatccttacggaaaa

SEQ ID NO: 4144 - DNA, 503 bp, Homo sapiens
atggagatgaaccaatggatttcaaaatcaacaccgatgagattatgacttcactcaagtctgttaatggacaaatagaaagcctcattagtcctgatggttctcgtaaaaaccccgctagaaactgcagagacctgaaattctgccatcctgaactcaagagtggagaatactgggttgaccctaaccaaggatgcaaattggatgctatcaaggtattctgtaatatggaaactggggaaacatgcataagtgccaatcctttgaatgttccacggaaacactggtggacagattctagtgctgagaagaaacacgtttggtttggagagtccatggatggtggttttcagtttagctacggcaatcctgaacttcctgaagatgtccttgatgtgcagctggcattccttcgacttctctccagccgagcttcccagaacatcacatatcactgcaaaaatagcattgcatacatggatcaggccagtggaaatgtaaag

SEQ ID NO: 4145 - DNA, 352 bp, Homo sapiens
  misc_feature 352: n = A,T,C or G
gctctctttccttgcctaacgcagccatggctcgtggtcccaagaagcatctgaagcgggtggcagctccaaagcattggatgctggataaattgaccggtgtgtttgctcctcgtccatccaccggtccccacaagttgagagagtgtctccccctcatcattttcctgaggaacagacttaagtatgccctgacaggagatgaagtaaagaagatttgcatgcagcggttcattaaaatcgatggcaaggtccgaactgatataacctaccctgctggattcatggatgtcatcagcattgacaagacgggagagaatttccgtctgatctatgacaccaagggtcgctn

SEQ ID NO: 4146 - DNA, 511 bp, Homo sapiens
ggtcggcgccgagaacatggctggaggcaaagctggaaaggacagtgggaaggccaaggctaaggcagtatctcgctcacagagagctgggctacagtttcctgtgggccgcatccacagacacttgaagactcgcaccacaagccatggaagggtgggtgccactgctgccgtgtacagtgctgcgattctggagtacctcactgcagaggtgctggagctggcaggtaatgcttctaaggatctcaaagtaaagcgtatcactccgcgtcacttgcagcttgcaatccgtggtgatgaagagttggattctcttatcaaggctaccatagctgggggtggtgtgatccctcacatccacaaatctctgattggaaagaagggacagcagaaaactgcttagagggatgctttaaccaaccctcttcctccccgtcattgtactgtaactgggacagaagaaataatggggatatgtggaatttttaacaacagttaaatggaaaagcat

SEQ ID NO: 4147 - DNA, 306 bp, Homo sapiens
ccggaaaaacacccgtggagccggaggtggcaattcaccgaattcgaatcaccctaacaagccgcaacgtaaaatccttggaaaaggtgtgtgctgacttgataagaggcgcaaaagaaaagaatctcaaagtgaaaggaccagttcgaatgcctaccaagactttgagaatcactacgagaaaaactccttgtggtgaaggttctaagacgtgggatcgtttccagatgagaattcacaagcgactcattgacttgcacagtccttctgagattgttaagcagattacttccatcagtattgagc

SEQ ID NO: 4148 - DNA, 505 bp, Homo sapiens
ggggaggtaaactttcctctgaagataaggagaccatggaaaaagctgtagaagaaaagattgaatggctggaaagccaccaagatgctgacattgaagacttcaaagctaagaagaaggaactggaagaaattgttcaaccaattatcagcaaactctatggaagtgcaggccctcccccaactggtgaagaggatacagcagaaaaagatgagttgtagacactgatctgctagtgctgtaatattgtaaatactggactcaggaacttttgttaggaaaaaattgaaagaacttaagtctcgaatgtaattggaatcttcacctcagagtggagttgaaactgctatagcctaagcggctgtttactgcttttcattagcagttgctcacatgtctttgggtgggggggagaagaagaattggccatcttaaaaagcgggtaaaaaacctgggttagggtgtgtgttcaccttcaaaatgttctatttaacaactgggtcat

SEQ ID NO: 4149 - DNA, 421 bp, Homo sapiens
tgaaggatttgaagctgcaaaggaaaaggcccttcagtttttaggaagaagtcaaagtaagcagagagatggacagggaaacacttatagatgtggccagaacatctcttcgtactaaagttcatgctgaacttgcagatgtcttaacagaggctgtagtggactccattttggccattaaaaagcaagatgaacctattgatctcttcatgattgagatcatggagatgaaacataaatctgaaactgatacaagcttaatcagagggcttgttttggaccacggagcacggcatcctgatatgaagaaaagggtggaggatgcatacatcctcacttgtaacgtgtcattagagtatgagaaaacagaagtgaattctggctttttttacaagagtgcagaagagagagaaaaactctt

SEQ ID NO: 4150 - DNA, 537 bp, Homo sapiens
atctacagggacctgaagctggacaacgtcctcctggatgcggacgggcacatcaagctcacagactacggcatgtgcaaggaaggcctgggccctggtgacacaacgagcactttctgcggaaccccgaattacatcgcccccgaaatcctgcggggagaggagtacgggttcagcgtggactggtgggcgctgggagtcctcatgtttgagatgatggccgggcgctccccgttcgacatcatcaccgacaacccggacatgaacacagaggactaccttttccaagtgatcctggagaagcccatccggatcccccggttcctgtccgtcaaagcctcccatgttttaaaaggatttttaaataaggaccccaaagagaggctcggctgccggccacagactggattttctgacatcaagtcccacgcgttcttccgcagcatagactgggacttgctggaaaagatgcggccgcaagcttattccctttagtgagggttaattttagcttggcactggccgtcgttttacaac

SEQ ID NO: 4151 - DNA, 281 bp, Homo sapiens
cgttatgagatcaagatgaccaagatgtataaagggttccaagccttatgggatgccgctgacatccggttcgtctacacccctgccatggagagtgtctgcggatacttacacaggtcccacaaccgcagcgaggagtttctcattgctggaaaactgcatgatggactcttgcacatcactacctgcagttttgtggctccctggaacagcctgagcttagctcagcgccggggcttcaccaagacctacactgttggctgtgaggaatgcacagtgtt

SEQ ID NO: 4152 - DNA, 461 bp, Homo sapiens
gtaaatagccgcagcctgtgcgcgtcgccctccacggttaccccggctctccgcccctccttctcgcggcgctcgagggaccatggccgatcctcgcgtgagacagatcaagatcaagaccggcgtggtgaagcggttggtcaaagaaaaagcgatgtatgaaaaagaggcaaaacaacaagaagaaaagattgaaaaaatgagagctgaagacggtgaaaattatgacattaaaaagcaggcagagatcctacaagaatccaggatgatgatcccagattgccagcgcaggttggaagccgcatatttggatcttcaacggatactagaaaatgaaaaagacttggaagaagctgaggaatataaagaagcacgtttagtactggattcagtgaagttagaagcctgaaacttttctcgtatgggggtggttttgcattaaatcctggggtccattttac

SEQ ID NO: 4153 - DNA, 327 bp, Homo sapiens
cactgcaaggtccacctcccgggttcacgccattctcctggctcagcctcctgagtagctgggactacaggcgcccgccaccatgaccggctagttttttttggatttttagtaaagaaggggtttcaccgtgttagccatgatggtctcgatctcctgacctcgtgatttgtccgcctcagcctcccaaagtgctgactctgtgcgcgggcagttgctaatcggactgatgcgtgcttcattcgagttattggatctgagcttgtacagaaatacgtcggtgagggggctcgaatggttcgtgaactctttgaaatggccacaaca

SEQ ID NO: 4154 - DNA, 500 bp, Homo sapiens
gctctttcccatcttgcaagatggcgggtgaaaaagttgagaagccagatactaaagagaagaaacccgaagccaagaaggttgatgctggtggcaaggtgaaaaagggtaacctcaaagctaaaaagcccaagaaggggaagccccattgcagccgcaaccctgtccttgtcagaggaattggcaggtattcccgatctgccatgtattccagaaaggccatgtacaagaggaagtactcagccgctaaatccaaggttgaaaagaaaaagaaggagaaggttctcgcaactgttacaaaaccagttggtggtgacaagaacggcggtacccgggtggttaaacttcgcaaaatgcctagatattatcctactgaagatgtgcctcgaaagctgttgagccacggcaaaaaacccttcagtcagcacgtgagaaaactgcgagccagcattacccccgggaccattctgatcatcctcactggacgccacaggggcaag

SEQ ID NO: 4155 - DNA, 411 bp, Homo sapiens; identical to SEQ ID NO: 1072

SEQ ID NO: 4156 - DNA, 520 bp, Homo sapiens
aggggctctcggctttcggctcggaggaggccaaggtgcaacttccttcggtcgtcccgaatccgggttcatccgacaccagccgcctccaccatgccgccgaagttcgaccccaacgagatcaaagtcgtatacctgaggtgcaccggaggtgaagtcggtgccacttctgccctggcccccaagatcggccccctgggtctgtctccaaaaaaagttggtgatgacattgccaaggcaacgggtgactggaagggcctgaggattacagtgaaactgaccattcagaacagacaggcccagattgaggtggtgccttctgcctctgccctgatcatcaaagccctcaaggaaccaccaagagacagaaagaaacagaaaaacattaaacacagtgggaatatcacttttgatgagattgtcaacattgctcgacagatgcggcaccgatccttagccagagaactctctggaaccattaaagagatcctggggactgcccagtcagtgggctgtaatg

SEQ ID NO: 4157 - DNA, 345 bp, Homo sapiens
ggcctttttgctgtaagcccgggtggttgctgccgaaatgggcaagttcatgaaacctgggaaggtggtgcttgtcctggctggacgctactccggacgcaaagctgtcatcgtgaagaacattgatgatggcacctcagatcgcccctacagccatgctctggtggctggaattgaccgctacccccgcaaagtgacagctgccatgggcaagaagaagatcgccaagagatcaaagataaaatcttttgtgaaagtgtataactacaatcacctaatgcccacacggtactctgtggatatccccttggacaaaactgtcgtcaataaggatgtcttcagaga

SEQ ID NO: 4158 - DNA, 455 bp, Homo sapiens; identical to SEQ ID NO: 1073

SEQ ID NO: 4159 - DNA, 341 bp, Homo sapiens
catacagactgactcctaaactgatggaagtctgtaaagaaaaggatttttcccctgaagcattgaaaaaagtaaatatcacctttgagtacatgtttgaagaagtgccgattgtaattaaaaattcacatctgatcaatgtcctaatgtgggaactagaaaagaagtcagctgctgcagataaacatgaattgctcagccttgccagcatcaatcatttggggaagaatctacagttgctgatggacagagtggatgaaatgagccaagatatatttaaatacaacacatacatgaggaatactagtaaacaacagcagcagaaacatcagtatcagcag

SEQ ID NO: 4160 - DNA, 462 bp, Homo sapiens
gggtgcacgcgagtgcttctgaaacgtcagctgcgctcccctacgagtgctgagcccgcggaaccgcagccatgactgaggctgatgtgaatccaaaggcctatcgccttgccgatgcccacctcaccaagaagctactggacctcgttcagcagtcatgtaactataagcagcttcggaaaggagccaatggggccaccaaaaccctcagcaggggcatctatgagttcatcgtgatggctgcagacgccgagccactggagatcattctgcacctgccgctgctgtgtgaacacaagaatgtgccctacgtgtttgagcgctccaagcaggccctggggagagcctgtggggtctccaagcctgtcatcgcctgttctgtcaccatcaaagaaggctcgcagctgaaacagcagatccaatccattcaccagtccattgaaaggctcttagtctaaacct

SEQ ID NO: 4161 - DNA, 413 bp, Homo sapiens
tgacctcagtgccatcagcctggatggggagaaggtagatttcaatacgttccggggcagggccgtgctgattgagaatgtggcttctctctgaggcacaaccacccgggacttcacccagctcaacgagctgcaatgccgctttcccaggcgcctggtggtccttggcttcccttgcaaccaatttggacatcaggagaactgtcagaatgaggagatcctgaacagtctcaagtatgtccgtcctgggggtggataccagcccaccttcacccttgtccaaaaatgtgaggtgaatgggcagaacgagcatcctgtcttcgactacctgaaggacaagctcccctacccttatgatgacccattttccctcatgaccgatcccaagctcatcatttggagccctgtgcgcc

SEQ ID NO: 4162 - DNA, 389 bp, Homo sapiens
gctctcttccacaggaggcctacacgccgccgcttgtgctgcagccatgtctctagtgatccctgaaaagttccagcatattttgcgagtactcaacaccaacatcgatgggcggcggaaaatagcctttgccatcactgccattaagggtgtgggccgaagatatgctcatgtggtgttgaggaaagcatacattgacctcaccaagagggcgggagaactcactgaggatgaggtggaacgtgtgatcaccattatgcagaatccacgccagtacaagatcccagactggttcttgaacagacagaaggatgtaaaggatggaaaatacagccaggtcctaaccaatggtctggacaacaagctccgtgaagagctggagcgactga

SEQ ID NO: 4163 - DNA, 453 bp, Homo sapiens
tgggcaggatgagatgatcgacgtcatcggggtgaccaagggcaaaggctacaaaggggtcaccagtcgttggcacaccaagaagctgccccgcaagacccaccgaggcctgcgcaaggtggcctgtattggggcatggcatcctgctcgtgtagccttctctgtggcacgcgctgggcagaaaggctaccatcaccgcactgagatcaacaagaagatttataagattggccagggctaccttatcaaggacggcaagctgatcaagaacaatgcctccactgactatgacctatctgacaagagcatcaaccctctgggtggctttgtccactatggtgaagtgaccaatgactttgtcatgctgaaaggctgtgtggtgggaaccaagaagcgggtgctcaccctccgcaagtccttgctggtgcagacgaagcggcgggctctggagaa

SEQ ID NO: 4164 - DNA, 337 bp, Homo sapiens
tgatcaagggttacttatctaataatcctctagaaagaaccctgttagatcttggtttgtgataaaaatataaagacagaagacatgaggaaaaacaaaaggtttgaggaaatcaggcatatgactttatacttaacatcagatcttttctataatatcctactactttggttttcctagctccataccacacacctaaacctgtattatgaattacatattacaaagtcataaatgtgccatatggatatacagtacattctagttggaatcggttactctgctagaatttaggtgtgagattttttgtttcccaggtatagcaggcttatgtttg

SEQ ID NO: 4165 - DNA, 341 bp, Homo sapiens
aatgctttttaaagagagtatttgtttagatgtaggcattttaattttttaaaaattcctctaccagaactaagcactttgttaatttggggggaaagaatagatatggggaaataaacttaaaaaaaaatcaggaatttaaaaaaacgagcaatttgaagagaatcttttggattttaagcagtccgaaataatagcaattcatgggctgtgtgtgtgtgtgtatgtgtgtgtgtgtgtgtgtgtatgtttaattatgataccttttcatcccctttaggagcgttttcagattttggttgctaagacctgaatcccatattgagatctcgagtagaacg

SEQ ID NO: 4166 - DNA, 313 bp, Homo sapiens; identical to SEQ ID NO: 1109
  misc_feature 313: n = A,T,C or G

SEQ ID NO: 4167 - DNA, 351 bp, Homo sapiens; identical to SEQ ID NO: 1075
  misc_feature 273: n = A,T,C or G

SEQ ID NO: 4168 - DNA, 336 bp, Homo sapiens
gcctcttttccgtggcgcctcggaggcgttcagctgcttcaagatgaagctgaacatctccttcccagccactggctgccagaaactcattgaagtggacgatgaacgcaaacttcgtactttctatgagaagcgtatggccacagaagttgctgctgacgctctgggtgaagaatggaagggttatgtggtccgaatcagtggtgggaacgacaaacaaggtttccccatgaagcagggtgtcttgacccatgcccgtgtccgcctgctactgagtaaggggcattcctgttacagaccaaggagaactggagaaagaaagagaaaatcagttcg

SEQ ID NO: 4169 - DNA, 370 bp, Homo sapiens
gctctctgaccagcaccatggcggttggcaagaacaagcgccttacgaaaggcggcaaaaagggagccaagaagaaagtggttgatccattttctaagaaagattggtatgatgtgaaagcacctgctatgttcaatataagaaatattggaaagacgctcgtcaccaggacccaaggaaccaaaattgcatctgatggtctcaagggtcgtgtgtttgaagtgagtcttgctgatttgcagaatgatgaagttgcatttagaaaattcaagctgattactgaagatgttcagggtaaaaactgcctgactaacttccatggcatggatcttacccgtgacaaaatgtgttccatggtcaaaaaatggca

SEQ ID NO: 4170 - DNA, 436 bp, Homo sapiens
gtcaagggtgtggtggactcagatgatctccccttgaatgtttcccgcgagactcttcagcaacataaactgcttaaggtgattaggaagaagcttgttcgtaaaacgctggacatgatcaagaagattgctgatgataaatacaatgatactttttggaaagaatttggtaccaacatcaagcttggtgtgattgaagaccactcgaatcgaacacgtcttgctaaacttcttaggttccagtcttctcatcatccaactgacattactagcctagaccagtatgtggaaagaatgaaggaaaaacaagacaaaatctacttcatggctgggtccagcagaaaagaggctgaatcttctccatttgttgagcgacttctgaaaaagggctatgaagttatttacctcacagaacctgtggatgaatactgtattc

SEQ ID NO: 4171 - DNA, 452 bp, Homo sapiens
cccgcctgtgccatatttcgggaggctgcaaggagggctcacagctcgaagaaccatcatcatcaagggctatgtgcctcccacaggcaagagctctgctatcaacttcaaggtgggctcctcaggggacatagctctgcacattaatccccgcatgggcaacggtaccgtggtccggaacagccttctgaatggctcgtggggatccgaggagaagaagatcacccacaacccatttggtcccggacagttctttgatctgtccattcgctgtggcttggatcgcttcaaggtttacgccaatggccagcacctctttgactttgcccatcgcctctcggccttccagagggtggacacattggaaatccagggtgatgtcaccttgtcctatgtacagatctaatctattcctggggccataactcatgggaaaacagaattatccccta

SEQ ID NO: 4172 - DNA, 321 bp, Homo sapiens
gtctaccggcgggatttgatggcgtgatgtctcacagaaagttctccgctcccagacatgggtccctcggcttcctgcctcggaagcgcagcagcaggcatcgtgggaaggtgaagagcttccctaaggatgacccatccaagccggtccacctcacagccttcctgggatacaaggctggcatgactcacatcgtgcgggaagtcgacaggccgggatccaaggtgaacaagaaggaggtggtggaggctgtgaccattgtagagacaccacccatggtggttgtgggcattgtgggctacgtggaaaccccttgaggcc

SEQ ID NO: 4173 - DNA, 414 bp, Homo sapiens; identical to SEQ ID NO: 1076

SEQ ID NO: 4174 - DNA, 411 bp, Homo sapiens
atctacaggatgatcaaacttggtctgggtattgatgaagatgaccctactgctgatgataccagtgctgctgtaactgaagaaatgccaccccttgaaggagatgacgacacatcacgcatggaagaagtagactaatctctggctgagggatgacttacctgttcagtactctacaattcctctgataatatattttcaaggatgtttttctttatttttgttaatattaaaaagtctgtatggcatgacaactactttaaggggaagataagatttctgtctactaagtgatgctgtgataccttaggcactaaagcagagttagtaatgctttttgagtttcatgttggtttattttcacagattggggtaacgtgcactgtaagacgtatgtaacatgatgttaac

SEQ ID NO: 4175 - DNA, 395 bp, Homo sapiens
tgaggagacagtccatgcctttcaagtgcatgcagctcactgatttcatcctcaagtttccgcacagtgcccaccagaagtatgtccgacaagcctggcagaaggcagacatcaatacaaaatgggcagccacacgatgggccaagaagattgaagccagagaaaggaaagccaagatgacagattttgatcgttttaaagttatgaaggcaaagaaaatgaggaacagaataatcaagaatgaagttaagaagcttcaaaaggcagctctcctgaaagcttctcccaaaaaagcacctggtactaagggtactgctgctgctgctgctgctgctgctgctgctgctgctgctaaagttccagcaaaaaagatcaccgccgcgagtaaaaaggct

SEQ ID NO: 4176 - DNA, 490 bp, Homo sapiens
gttttcttttcctctaggcagagaagaggcgatggcggcgatggcatctctcggcgccctggcgctgctcctgctgtccagcctctcccgctgctcagccgaggcctgcctggagccccagatcaccccttcctactacaccacttctgacgctgtcatttccactgagaccgtcttcattgtggagatctccctgacatgcaagaacagggtccagaacatggctctctatgctgacgtcggtggaaaacaattccctgtcactcgaggccaggatgtggggcgttatcaggtgtcctggagcctggaccacaagagcgcccacgcaggcacctatgaggttagattcttcgacgaggagtcctacagcctcctcaggaaggctcagaggaataacgaggacatttccatcatcccgcctctgtttacagtcagcgtggaccatcggggcacttggaacgggccctgggtgtccactgaggtgctggct

SEQ ID NO: 4177 - DNA, 80 bp, Homo sapiens
cgaagtgctgggataacaggcgtgagccaccacacctgacctctgccactaatttttttttttttttttttttttgaaag

SEQ ID NO: 4178 - DNA, 427 bp, Homo sapiens
ggtcttagaatttcactttgaacccaatgaatattttacaaatgaagtgctgacaaagacatacaggatgaggtcagaaccagatgattctgatcccttttctttagatggaccagaaattatgggttggacagggtgccagatagattgcaaaaaaggaaagaatgtcactttgaaaactattaagaagaagcagaaacacaagggacgtgggacagctcgtactgcgactaacacagtttccaatgactctttctttaacttttgagcccctcctgaagttcctgagagtggagatctggatgatgatgctgaagctatccttgctgcagacttcgaaattggtcactttctacgtgagcgtataatcccaacatcagtgttatattttactggagaagctattgaagatgatgatgatgattat

SEQ ID NO: 4179 - DNA, 326 bp, Homo sapiens
  misc_feature 303: n = A,T,C or G
atcagaataagacagagtacaggctgggcacggaggctcatgcctgtaatcccagcaatttgtaaggctgaggtgggaggatcacctgacgtcaggagttcaagaccaacctggccagcatggtgaaacccagtctctgaaaaatacaaaaattacccgggcatgatggcaggtgcctgtaatcccagctattcaggaggttgaggcaggagaatcacttgaaccctggaggcagaggttgcagtgagccgaggttgtgccattgcactccagcctgggcaacagagcaagactccgtctcanaaaaaaaaattaatattattaat

SEQ ID NO: 4180 - DNA, 380 bp, Homo sapiens
tactactgttgcgacatgacgacagacggtgacgagtgcgggcagaccacagctagagtgcgctgcaaaaaaagctctatttgtgacagctgcgatgctactgctttatgtgtcgccattatgagctgcactaaacgggtcagctgcgacaatagcactcattttatgtttctcgttcagggggaggagtgggacgatgtattttctactgcacctgagcaggcaggtcccagatttcttaaggctgtgtttgaccatgtgtctagttacttgctgaaaagtgaatatattttccagcatgtcttgacaacctgtactcttccaatgtcatttatcagttgtaaaatatatcagattgtgtcctcttctgtacaattgac

SEQ ID NO: 4181 - DNA, 463 bp, Homo sapiens
agccaccgccgccgccgccgcctctccttagtcgccgccatgacgaccgcgtccacctcgcaggtgcgccagaactaccaccaggactcagaggccgccatcaaccgccagatcaacctggagctctacgcctcctacgtttacctgtccatgtcttactactttgaccgcgatgatgtggctttgaagaactttgccaaatactttcttcaccaatctcatgaggagagggaacatgctgagaaactgatgaagctgcagaaccaacgaggtggccgaatcttccttcaggatatcaagaaaccagactgtgatgactgggagagcgggctgaatgcaatggagtgtgcattacatttggaaaaaaatgtgaatcagtcactactggaactgcacaaactggccactgacaaaaatgacccccatttgtgtgacttcattgagacacattacctgaatgagc

SEQ ID NO: 4182 - DNA, 199 bp, Homo sapiens
gaactgacaattaacagcccaatatctacaatcaaccaacaagtcattattaccctcactgtcaacccaacacaggcatgctcataaggaaaggttaaaaaaagtaaaaggaactcggcaaatcttaccccgcctgtttaccaaaaacatcacctctagcatcaccagtattagaggcaccgcctgcccagtgacacat

SEQ ID NO: 4183 - DNA, 456 bp, Homo sapiens
atcaattaacattttaattggaattttgaattattaggcttttcatttaagtcatctacaaattgattgacaattgaactttatcatttgcttagttcactgctaaatcaaactgtttaatacttttttctaatagtaaaaacatactgaagattgagaagcactggtttagaaaaaatatgtaaatatataaaatgtaatagcctggaaatcaatcagaaaattggaactgattccatttgtaagaacagaaacataaaataagttttaaacttataaaacttttattttaaaattactacaaacctcaatgtaggttataaaagaagacttcaataaatggaaaaacacaccatacttcctgggatgaaaagactcaatgcggtgccttgcaggcatttgtatacatagaggaaactgttttcaaagctgagctgcacttttggtcccctcaag

SEQ ID NO: 4184 - DNA, 248 bp, Homo sapiens
aaaaaaccctgaaatgtttggggtgggggggtgcttttattaaaagaaaaagcctccaacctggctaacatggtgaaaccccgtctctactaaaaatacaaaaaaattaaccgggcgtggtggcgggcgcctgtagttccagctacttgggaggctgaggcaggagaatggcgtgaactcgggaggcggagcttgcagtgagccgagattgcgccactgcactccagcctgggcgagagtgagactct

SEQ ID NO: 4185 - DNA, 468 bp, Homo sapiens
cagaaggggcttttcgatccgccatctgcggtggagccgccaccaaaatgcagattttcgtgaaaacccttacggggaagaccatcaccctcgaggttgaaccctcggatacgatagaaaatgtaaaggccaagatccgggataaggaaggaattcctcctgatcagcagagactgatctttgctggcaagcagctggaagatggacgtactttgtctgactacaatattcaaaaggagtctactcttcatcttgtgttgagacttcgtggtggtgctaagaaaaggaagatgaagtcttacaccactcccaagaagaataagcacaagagaaagaaggttaagctggctgtcctgaaatattataaggtggatgagaatggcaaaattagtcgccttcgtcgagagtgcccttctgatgaatgtggtgctggggtgtttatggcaagtcactttgacagacattatt

SEQ ID NO: 4186 - DNA, 453 bp, Homo sapiens
gtccgctgcgtgccggaccatggcgcaggggcagcgcaagtttcaggcgcacaaacccgcaaagagtaagacggcagcggcagcctctgaaaagaatcggggcccaagaaaaggcggtcgtgttatcgctcccaagaaggcgcgcgtcgtgcagcagcaaaagctcaagaagaacctagaagtcggaatccggaagaagatcgaacatgacgtggtgatgaaagccagcagcagcctgcccaagaagctggcactgctgaaggccccagccaagaagaaaggggcagctgccgccacctcctccaagacaccttcctgaggacgctggccccagtgcaggccaacatcccaccccctacctccatatgggaccttgcaagtcatcccacaggctgcactgtcaggaagaggaccctgtcccccagcactgggcttcacctagaacttcagtgg

SEQ ID NO: 4187 - DNA, 452 bp, Homo sapiens
agctgaagaaaaagcgccagtgaagaaatctatacgagatactccagccaaaaatgcacaaaagtcaaatcagaatggaaaagactcaaaaccatcatcaacaccaagatcaaaaggacaagaatccttcaagaaacaggaaaaaactcctaaaacaccaaaaggacctagttctgtagaagacattaaagcaaaaatgcaagcaagtatagaaaaaggtggttctcttcccaaagtggaagccaaattcatcaattatgtgaagaattgcttccggatgactgaccaagaggctattcaagatctctggcagtggaggaagtctctttaagaaaatagtttaaacaatttgttaaaaaattttccgtcttatttcatttctgtaacagttgatatctggctgtcctttttataatgcagagtgagaactttccctaccgtgtttgataaat

SEQ ID NO: 4188 - DNA, 281 bp, Homo sapiens
gctcctcttcctttctccgccatcgtggtgtgttcttgactccgctgctcgccatgtcttctcacaagactttcaggattaagcgattcctggccaagaaacaaaagcaaaatcgtcccattccccagtggattcggatgaaaactggaaataaaatcaggtacaactccaaaaggagacattggagaagaaccaagctgggtctataaggaattgcacatgagatggcacacatatttatgctgtctgaaggtcacgatcatgttaccatatcaagctga

SEQ ID NO: 4189 - DNA, 497 bp, Homo sapiens
ggctttcccatcttgcaagatggcgggtgaaaaagttgagaagccagatactaaagagaagaaacccgaagccaagaaggttgatgctggtggcaaggtgaaaaagggtaacctcaaagctaaaaagcccaagaaggggaagccccattgcagccgcaaccctgtccttgtcagaggaattggcaggtattcccgatctgccatgtattccagaaaggccatgtacaagaggaagtactcagccgctaaatccaaggttgaaaagaaaaagaaggagaaggttctcgcaactgttacaaaaccagttggtggtgacaagaacggcggtacccgggtggttaaacttcgcaaaatgcctagatattatcctactgaagatgtgcctcgaaagctgttgagccacggcaaaaaacccttcagtcagcacgtgagaaaactgcgagccagcattacccccgggaccattctgatcatcctcactggacgccacaggggca

SEQ ID NO: 4190 - DNA, 140 bp, Homo sapiens
ctacaagagcccctgcccctctgttggaggcacagttttagaataaggaggaggagggagaagagaaaatgtaaagggagggagatctttcccaggccgcaccatttatgtcactcacatggacccaagataaaagaatg

SEQ ID NO: 4191 - DNA, 373 bp, Homo sapiens
gcttttggaagagttagaagaatttggaaggccttaaatatagtagcttagtttgaaaaatgtgaaggactttcgtaacggaagtagtgcgggatcaagagtaattaccaacttaatgtttttgcattggactttgagttaagattattttttaaatcctgaggactagcattaattgacagctgacccaggtgctacacagaagtggattcagtgaatctaggaagacagcagcagacaggattccaggaaccagtgtttgatgaagctaggactgaggagcaagcgagcaagcagcagttcgtggtgaagataggaaaagagtccaggagccagtgcgatttggtgaaggaagctaggaagaaggaaggag

SEQ ID NO: 4192 - DNA, 386 bp, Homo sapiens
gggagtgattcaggctgggcctgattgctcacgtctgtaatcccagcactttgggaggccgaggcaggcggatcatgaggtcaggagattgagactatcctggctaacacgatgaaaccctgtctctactaaaaatacaaaaaattagccagttgtggtggcaggcgcctgtagtctcagctacttgggaagttgagggaggagaatggtgtgaacccaggaggtggagcttgcagtgagccgagattgtgccactgcactccagcctgggtgacagagtgagaccccgtctcaaaaaaagaaaaaaagtgattcagttaaaatgcagtcattatggtgggctcaatcaaggacatgtggacacagatatgtatgcacatggagga

SEQ ID NO: 4193 - DNA, 450 bp, Homo sapiens
acattgaaaaaagtctagacaaactgaaaggcaataaatcctatgtgaacatggacctctctccggtggtagagtgcatggaccacgctctaacaagtctcttccctaagactcattatgccgctggaaaagatgccaaaattttctggatacctctgtctcacatgccagcagctttgcaagactttttattgttgaaacagaaagcagagctggctaatcccaaggcagtgtgactcagctaaccacaaatgtctcctccaggctatgaaattggccgatttcaagaacacatctccttttcaaccccattccttatctgctccaacctggactcatttagatcgtgcttatttggattgcaaaagggagtcccaccatcgctggtggtatcccagggtccctgctcaagttttctttgaaaaggagggctggaatggtacatcacat

SEQ ID NO: 4194 - DNA, 291 bp, Homo sapiens
gcttttacctcgttgcactgctgagagcaagatgggtcaccagcagctgtactggagccacccgcgaaaattcggccagggttctcgctcttgtcgtgtctgttcaaaccggcacggtctgatccggaaatatggcctcaatatgtgccgccagtgtttccgtcagtacgcgaaggatatcggtttcattaagttggactaaatgctcttccttcagaggattatccggggcatctactcaatgaaaaaccatgataattctttgtatataaaataaacatttgaaaaaac

SEQ ID NO: 4195 - DNA, 316 bp, Homo sapiens; identical to SEQ ID NO: 1087

SEQ ID NO: 4196 - DNA, 449 bp, Homo sapiens; identical to SEQ ID NO: 1088

SEQ ID NO: 4197 - DNA, 528 bp, Homo sapiens
aggggctaaacctagccccaaacccactccaccttactaccagacaaccttagccaaaccatttacccaaataaagtataggcgatagaaattgaaacctggcgcaatagatatagtaccgcaagggaaagatgaaaaattataaccaagcataatatagcaaggactaaccccaataccttctgcataatgaattaactagaaataactttgcaaggagagccaaagctaagacccccgaaaccagacgagctacctaagaacagctaaaagagcacactcgtctatgtagcaaaatagtgggaagatttataggtagaggcgacaaacctaccgagcctggtgatagctggttgtccaagatagaatcttagttcaactttaaatttgcccacagaaccctctaaatccccttgtaaatttaactgttagtccaaagaggaacagctctttggacactaggaaaaagccttgcagagagagtaaaaaatttaacacccatagtaggcctaaaagcagccaccaatt

SEQ ID NO: 4198 - DNA, 476 bp, Homo sapiens
gctaaacctagccccaaacccactccaccttactaccagacaaccttagccaaaccatttacccaaataaagtataggcgatagaaattgaaacctggcgcaatagatatagtaccgcacgggaaaggtgaaaaattataaccaagcataatatagtaaggactaacccctataccttctgcataatgaattaactagaaataactttgcaaggagagccaaagctaagacccccgaaaccagacgagctacctaagaacagctaaaagagcacacccgtctatgtagcacaatagtgggaagatttataggtagaggcgacaaacctaccgagcctggagatagctggttgtccaagatagaatcttagttcaactataaatttgcccacagaaccctctaaatccccttgtaaatttaactgttagtccaaagaggaacagctctttggacactaagaaaaaaccttgcaaaga

SEQ ID NO: 4199 - DNA, 529 bp, Homo sapiens
gaaagattctccaataagacacagtagagtctctagccaaaagtgattgaggtcccttcatctctgctgtttgttcaatgtaaattagccatcatcctccctgtttgtttttctcatcttcccacatgggctcaacaccatccttaaaaagtgagtagtcacagccagacattaaattactagacaactggatatggttgtacagagcccaaaagtcaacaggatcaaacttagagatcagcggcaggtttgcttgtcaagttttgcttttatcttttttaaaaaaaccagagtgcccatctgttctgtagaggatgtttaatatagtgttctgggttagcaacctcctgattagattctgttttctcctcttcacagggggattaggagtaggggtggtttctggtttgacagtccgccgtcttacatcgatctgctcctgcttttaactctgctcttgtttcctaccactggcctgggagccagccttttcagttctctcactgacaaactttcagttcttatttat

SEQ ID NO: 4200 - DNA, 476 bp, Homo sapiens
ccaatggtcatgtggccaagattggggacttcgggctggctagggacatcatgaatgactccaactacattgtcaagggcaatgcccgcctgcctgtgaagtggatggccccagagagcatctttgactgtgtctacacggttcagagcgacgtctggtcctatggcatcctcctctgggagatcttctcacttgggctgaatccctaccctggcatcctggtgaacagcaagttctataaactggtgaaggatggataccaaatggcccagcctgcatttgccccaaagaatatatacagcatcatgcaggcctgctgggccttggagcccacccacagacccaccttccagcagatctgctccttccttcaggagcaggcccaagagaacgtggagaagaaaattgacaaatacacagaggtcctcaagacccacggactcctggtctgagcccaataaagactgttaattcct

SEQ ID NO: 4201 - DNA, 128 bp, Homo sapiens
agaaacctgaagttagaaaggctcaacgagaacaagctatcagggctgctaaggaagcaaaaaaggctaagcaagcatctaaaaagactgcaatggctgctgctaaggcacctacaaaggcagcacct

SEQ ID NO: 4202 - DNA, 297 bp, Homo sapiens
gctcttaccgccatcttggctcctgtggaggcctgctgggaacgggacttctaaaaggaactatgtctggaaggctgtggtccaaggccatttttgctggctataagcggggtctccggaaccaaagggagcacacagctcttcttaaaattgaaggtgtttacgcccgagatgaaacagaattctatttgggcaagagatgcgcttatgtatataaagcaaagaacaacacagtcactcctggcggcaaaccaaacaaaaccagagtcatctggggaaaagtaactcgggcccatg

SEQ ID NO: 4203 - DNA, 370 bp, Homo sapiens
gctttccttttttcttttttccggcgttcaagatgtcgaagcgaggacgtggtgggtcctctggtgcgaaattccggatttccttgggtcttccggtaggagctgtaatcaattgtgctgacaacacaggagccaaaaacctgtatatcatctccgtgaaggggatcaagggacggctgaacagacttcccgctgctggtgtgggtgacatggtgatggccacagtcaagaaaggcaaaccagagctcagaaaaaaggtacatccagcagtggtcattcgacaacgaaagtcataccgtagaaaagatggcgtgtttctttattttgaagataatgcaggagtcatagtgaacaataaaggcgagatgaa

SEQ ID NO: 4204 - DNA, 394 bp, Homo sapiens; identical to SEQ ID NO: 1093

SEQ ID NO: 4205 - DNA, 510 bp, Homo sapiens
gccttttccggaaaaggcgccgcgcggtgaggttgtctagtccacgctcggagccatgccgtccaagggtccgctgcagtcggtgcaggtcttcggacgcaagaagacagcgacagctgtggcgcactgcaaacgcggcaatggtctcatcaaggtgaacgggcggcccctggagatgattgagccgcgcacgctacagtacaagctgctggagccagttctgcttctcggcaaggagcgatttgctggtgtagacatccgtgtccgtgtaaagggtggtggtcacgtggcccagatttatgctatccgtcagtccatctccaaagccctggtggcctattaccagaaatatgtggatgaggcttccaagaaggagatcaaagacatcctcatccagtatgaccggaccctgctggtagctgaccctcgtcgctgcgagtccaaaaagtttggaggccctggtgcccgcgctcgctaccagaaatcctaccgataagcccatcgtgactc

SEQ ID NO: 4206 - DNA, 435 bp, Homo sapiens
gagcccgctggtcccgagcacgagctgtgaggggattcacttgtgtgcggaactcctcggaaccatggcgtccctttcccttgcacctgttaacatctttaaggcaggagctgatgaagagagagcagagacagctcgtctgacttcttttattggtgccatcgccattggagacttggtaaagagcaccttgggacccaaaggcatggacaaaattcttctaagcagtggacgagatgcctctcttatggtaaccaatgatggtgccactattctaaaaaacattggtgttgacaatccagcagctaaagttctagttgatatgtcaagggttcaagatgatgaacttggtgatggcactacctctgttaccgttttagcagcacaattattaagggaagcagaatctttaattgcaaaaaagattcatccaca

SEQ ID NO: 4207 - DNA, 308 bp, Homo sapiens
gctctttcccttcggtgtgccactgaagatcctggtgtcgccatgggccgccgccccgcccgttgttaccggtattgtaagaacaagccgtacccaaagtctcgcttctgccgaggtgtccctgatgccaagattcgcatttttgacctggggcggaaaaaggcaaaagtggatgagtttccgctttgtggccacatggtgtcagatgaatatgagcagctgtcctctgaagccctggaggctgcccgaatttgtgccaataagtacatggtaaaaagttgtggcaaagatggcttccatatccgggg

SEQ ID NO: 4208 - DNA, 110 bp, Homo sapiens
gctttctgggctcggacctaggtcgcggcgacatggccaaacgtaccaagaaagtcgggatcgtcggtaaatacgggacccgctatggggcctccctccggaaaatggtg

SEQ ID NO: 4209 - DNA, 331 bp, Homo sapiens
aggtggtggagacactgccacttgctgtgccaaatggaacacggaggataaagtcagccatgtgagcactgggggtggtgccagtttggagctcctggaaggtaaagtccttcctggggtggatgctctcagcaatatttagtactttcctgccttttagttcctgtgcacagcccctaagtcaacttagcattttctgcatctccacttggcattagctaaaaccttccatgtcaagattcagctagtggccaagagatgcagtgccaggaacccttaaacagttgcacagcatctcagctcatcttcactgcaccctggatttgcatac

SEQ ID NO: 4210 - DNA, 332 bp, Homo sapiens
tggcatcacggagggaggacgcctcggctggctggaagcggctcacctgctaaaaagccctcggagccaggcgcggtggctcacgtctataatcccagcactttgggaggccaagacgggcagatcacctgaggtcggggttcgagaccagtctgaccaacatggagaaaccctgtctctactaaaaatacaaaattagctgggcgtggtggcatgcgcctgtagtcccagctactcaggaggctgaggcaggccaattgcttgaacctgggaggcggaggtggcagtgagccaagattgtgccattgcactccagcctaggcagcaagagg

SEQ ID NO: 4211 - DNA, 495 bp, Homo sapiens; identical to SEQ ID NO: 1096

SEQ ID NO: 4212 - DNA, 492 bp, Homo sapiens
ggcctctccgaacgcaacatgaaggtgctccttgccgccgccctcatcgcggggtccgtcttcttcctgctgctgccgggaccttctgcggccgatgagaagaagaaggggcccaaagtcaccgtcaaggtgtattttgacctacgaattggagatgaagatgtaggccgggtgatctttggtctcttcggaaagactgttccaaaaacagtggataattttgtggccttagctacaggagagaaaggatttggctacaaaaacagcaaattccatcgtgtaatcaaggacttcatgatccagggcggagacttcaccaggggagatggcacaggaggaaagagcatctacggtgagcgcttccccgatgagaacttcaaactgaagcactacgggcctggctgggtgagcatggccaacgcaggcaaagacaccaacggctcccagttcttcatcacgacagtcaagacagcctggctagatggcaagcat

SEQ ID NO: 4213 - DNA, 314 bp, Homo sapiens
gatcaaatagcccttgccttttcaacacaaatcagttggaaaattatggtttgagtcctgttgctgccatggcttctgtttctcagaaatgagtgtgtatgaacataccaatctatgtaataggctacctttttttgtcttctttggaactttgtacacaaaccaagacaatatcagggtgacaggtgaatgaacttaaattctcagtcttgtctattcaccaaaaaagtatactgcctgttttttctttaattattcaaggttgatgacttttaggaacatgttttatactgtattttttaattaaagcaagt

SEQ ID NO: 4214 - DNA, 505 bp, Homo sapiens
agttttgctcttgttgcccaggctggagtgcaatggcatggtctcagctcatagcaacctctgcctccagggttcaagcgattctcctgcctcagcctcccgggtagctgggattacaggctcccaccaccacgccctaatttttgtgtttttagtagagacgggttttcaccatgttggccaggctggtcttgaactcctgacatcaggtgatctgcccacctcggcctcccaaagtgctgggattacaggcttgagccttcacgcccggccttctactgccatttttccgaagtcaggtctacatgatttgttgttttatttttagtgtcaattaatagatattcctgagtctctgcagaccagccatttgcatgtcagacctttttttgcatcagaaattaccttgataagcctggacaacttagcaagaccccgtctctgcggaagatgaaaaaattaactgggcgtggtggtgcatgcctgtagtcccagctgctcggca

SEQ ID NO: 4215 - DNA, 403 bp, Homo sapiens
tgcttacatcagccgcatcctatggctctactttgagacgggtacctgggtgtatcctgtgtttgccaaactcagcctcttgggtctagcagctttcttctctctcagctacgtcttcatcgccagcatctacctacttggagagaagctcaaccactggaaatgggtttctgttcagatcttgcaaagatggaggctagaatctgttggaatctgcttccagtggcccgattggaagtcaccagccaagcaccaactggtcaagaatatcaggtgacatgaggcagccacggaagaagaggaagtaattgcacaccattttccaagaaccaagaaagaagaaaacacaagagatttttctcatcttttttttttttttttggggggggggggggggggggga

SEQ ID NO: 4216 - DNA, 55 bp, Homo sapiens
agaccaagatcataaatattaatggtgaaaacactgtagtaataaattttcatat

SEQ ID NO: 4217 - DNA, 389 bp, Homo sapiens
agtgcccattccaatcgaatgcattatgaccgagattgcagcaggtgtatcctacggctgtgactttaaaaacaggtttaaagtggctgtggttggggacatgaatcctggatgtcagccccctattacacctgacgtggagactttccaaaacaccgtaggagattgcttcggcatcgcaatggttgcatttgcagtggccttttcagttgccagcgtctattccctcaaatacgattattcacttgatggcaatcaggagttaatagccttgggactgggtaacatagtctgtggagtattcaaaggatttgctgggagtactgccctctccagatcatcagttcatgagagcacaggaggcaaaacacaaattgctgggcttattg

SEQ ID NO: 4218 - DNA, 485 bp, Homo sapiens
cagggtttcaccatgttgcccaggctggtttcgaactcctgacctcaggtgatccacccgcctcggcctcccaaagtgctgggattacaggcttgagcccccgcgcccagccatcaaaatgctttttatttctgcatatgttgaatactttttacaatttaaaaaaatgatctgttttgaaggcaaaattgcaaatcttgaaattaagaaggcaaaaatgtaaaggagtcaaaactataaatcaagtatttgggaagtgaagacgaagctaatttgcattaaattcacaaacttttatactctttctgtatatacattttttttctttaaaaaacaactatggatcagaatagccacatttagaacactttttgttatcagtcaatatttttagatagttagaacctggtcctaagcctaaaagtgggcttgattctgcagtaaatcttttacaactgcctcgacacacataaacctttttaaaa

SEQ ID NO: 4219 - DNA, 437 bp, Homo sapiens
agttgcaaatcactgaagacccaactcaaagtgacttaagtcagaaagaaattttatgaattcaggtaattaaaaagtccagaagtatctgcctttaggcacagctggatccaagggcacaaatgatgtcatcaggctccagttattctccatctcccaactcagctttttctgtctgtaagcctgattttcaggaaggctctttcctagtgatggagatgaccaccatcagctccaggcttctatcctgctaacccagtaacccagtgggaagagatttacttattccaataattccaagtggagagtgtcattgacccgtttggggtctcatctctacttctaggggaatgaaacactctgagtggccaggcctgtgtcatgtgctaattcctagagccagggaaataaggtctgaggattcaggatggggtgaa

SEQ ID NO: 4220 - DNA, 339 bp, Homo sapiens
agggggagctggataatcagatagttactgctacccagagcaatatctgtgatgaagacagtgctacagagacctgctacacttatgacagaaacaagtgctacacagctgtggtcccactcgtatatggtggtgagaccaaaatggtggaaacagccttaaccccagatgcctgctatcctgactaatttaagtcattgctgactgcatagctctttttcttgagaggctctccattttgattcagaaagttagcatatttattaccaatgaatttgaaaccagggctttttttttttttgggggggagaaaaacccaccccccccccccaaaaatat

SEQ ID NO: 4221 - DNA, 440 bp, Homo sapiens
aggggctgcttaagactccagattaaggaaagagaggcctgggcaggcagaaaggaagagaagccggatgtggtggcttgtatcttcaatcccagcatcttttagaggccaaggtgggaggatcacttgagcccaggagttcaaaaccagccttgggcaacatagcgagactcccatctctccaaaaaaaatttaaaaaccagccaggtatactgggcgcagtggctcacgcctgtaatcccagaactttcggaggccgaggcaggcagatcacgacgtcaagagttagagaccagcctgaccaacatggagaaaccccgtctctactaaaaatacaaaacttatccaggcctgcggtgatgcgcacctgtagtctcagctactcaggaggctgaggcatgataatcgcttgaacccgggagacagaggttgcactgagc

SEQ ID NO: 4222 - DNA, 478 bp, Homo sapiens
ggaggccgggcgtcttcggtcatctccggcgcttctagggctggttcccgtcatcttcgggagccgtggagcgtggggcgcccacaatttgcgcgctctctttctgctgctccccagctctcggatacagccgacaccatgggtttcggagacctgaaaagccctgccggcctccaggtgctcaacgattacctggcggacaagagctacatcgaggggtatgtgccatcacaagcagatgtggcagtatttgaagccgtgtccagcccaccgcctgccgacttgtgtcatgccctacgttggtataatcacatcaagtcttacgaaaaggaaaaggccagcctgccaggagtgaagaaagctttgggcaaatatggtcctgccgatgtggaagacactacaggaagtggagctacagatagtaaagatgatgatgacattgacctctttggatctgatgatgaggaggaaagtgaag

SEQ ID NO: 4223 - DNA, 379 bp, Homo sapiens
ggaagaggatggagatgaagatgaggaagctgagtcagctacgggcaagcgggcagctgaggatgatgagaatgacgatgtcgataccaagaagcagaagaccgacgaggatgactagacagcaaaaaaggaaaagttaaactaaaaaaaaaaaggccgccgggacctattcaccctccacttcccgtctaaaaatctaaacggggtcaccttcaagtaaagaggcccgcccgcccaccgggggcagggccacccgcaaatgacacgcgctttccaccacccaacccaaaccatgaaaatttgcaccaggggaggaaaaaagacccaaaccttccaaggccctgctttttttcttaaaagtactttaaaaaggaaattg

SEQ ID NO: 4224 - DNA, 328 bp, Homo sapiens
accacgcttttcatctgtcccgctgcgtgttttcctcttgatcgggaactcctgcttctccttgcctcgaaatggaccccaactgctcctgctcgcctgttggctcctgtgcctgtgccggctcctgcaaatgtaaagagtgcaaatgcacctcctgcaagaagagctgctgctcctgctgccctgtgggctgtgccaagtgtgcccagggctgcatctgcaaagggacgtcagacaagtgcagctgctgtgcctgatgccaggacagctgtgctctcagatgtaaatagagcaacctatataaacctggattttttttttttttttt

SEQ ID NO: 4225 - DNA, 444 bp, Homo sapiens
ggttccacgagtcatgtcaacacagcgtgttgctaacacatcaacacagacaatgggtccacgtcctgcagctgcagccgctgcagctactcctgctgtccgcaccgttccacagtataaatatgctgcaggagttcgcaatcctcagcaacatcttaatgcacagccacaagttacaatgcaacagcctgctgttcatgtacaaggtcaggaacctttgactgcttccatgttggcatctgcccctcctcaagagcaaaagcaaatgttgggtgaacggctgtttcctcttattcaagccatgcaccctactcttgctggtaaaatcactggcatgttgttggagattgataattcagaacttcttcatatgctcgagtctccagagtcactccgttctaaggttgatgaagctgtagctgtactacaagcccaccaagctaa

SEQ ID NO: 4226 - DNA, 507 bp, Homo sapiens
gagtcttggctggcagacctgtactccgtactccgtacttcgcagtcgcagcggcgcggtcttcggcagtctagtcatccaccgccatcctgggccccacgtgttgcctgaccattcctgagcccaggtgggagccgtggctgaggtgacggtctcaaagtggaagagcttactgtcacagcaactcctttgcaagatgccccggccaggaatagatgctgaacaccccaggcctgctgaggtccctccttgagtctcatgttcaagcagtctttgtacatgaaactgggaggcgaccgtgttagctgccagttactgacagacacctctcaccagtggcttcactctgtgtccctgacccagcacatggcacatgagtgcctgccatccgccagagtttctacagcagcaatcccaagatgctggagctagaggggacctgacctgatagaagataccttcagtggctgacaagctgttccttggaacctgtgcagggatgaggcc

SEQ ID NO: 4227 - DNA, 452 bp, Homo sapiens
cgatctcatttatgatcccataaaaactgcccaaggatctctctcactaaaggcatacagactgactcctaaactgatggaagtctgcaaagaaaaggatttttcccctgaagcattgaaaaaagcaaatatcacctttgagtacatgtttgaagaagtgccgattgtaattaaaaattcacatctgatcaatgtcctaatgtgggaacttgaaaagaagtcagctgctgcagataaacatgaattgctcagccttgccagcagcaatcatttggggaagaatctacagttgctgatggacagagtggatgaaatgagccaagatataggtaaatacaacacatacatgaggaatactagtaaacaacagcagcagaaacatcagtatcagcagcgtcgccagcgggagaatatgcagcgccagagccgatgagaacccccgctccctgagg

SEQ ID NO: 4228 - DNA, 364 bp, Homo sapiens
acagaagggcaagtgtcgtggacttcgtactgctaggaagctccgtagtcaccgacgagaccagaagtggcatgataaacagtataagaaagctcatttgggcacagccctaaaggccaacccttttggaggtgcttctcatgcaaaaggaatcgtgctggaaaaagtaggagttgaagccaaacagccaaattctgccattaggaagtgtgtaagggtccagctgatcaagaatggcaagaaaatcacagcctttgtacccaatgacgggtgcttgaactttattgaggaaaatgatgaagttctgggtgctggatttggtcgcaaaggtcatgctgttggtgatattcctggagtccgcttt

SEQ ID NO: 4229 - DNA, 313 bp, Homo sapiens
gatccctgactcggggtcgcctttggagcagagaggaggcaatggccaccatggagaacaaggtgatctgcgccctggtcctggtgtccatgctggccctcggcaccctggccgaggcccagacagagacgtgtacagtggccccccgtgaaagacagaattgtggttttcctggtgtcacgccctcccagtgtgcaaataaaggctgctgtttcgacgacaccgttcgtggggtcccctggtgcttctatcctaataccatcgacgtgcctccagaagaggagtgtgaattttagacacttctgcagggata

SEQ ID NO: 4230 - DNA, 370 bp, Homo sapiens
agtttaagatgacacttttaaaataaattctctcctaatgatgacttgagccctgccactcaatgggagaatcagcagaacctgtaggatcttatttggaattgacattctctattgtaattttgttcctgtttatttttaaattttctttttgtttcactggaaaggaaagatgatgctcagttttaaacgttaaaagtgtacaagttgctttgttacaataaaactaaatgtgtacacaaaggatttgatgcttttctctcagcataggtatgcttactatgaccttccaagtttgacttgtataacatcactgtcaaactttgtcaccctaacttcttattttttgatacgcactttgcaggatgac

SEQ ID NO: 4231 - DNA, 309 bp, Homo sapiens; identical to SEQ ID NO: 2802

SEQ ID NO: 4232 - DNA, 426 bp, Homo sapiens
gcttcttccacaggaggcctacacgccgccgcttgtgctgcagccatgtctctagtgatccctgaaaagttccagcatattttgcgagtactcaacaccaacatcgatgggcggcggaaaatagcctttgccatcactgccattaagggtgtgggccgaagatatgctcatgtggtgttgaggaaagcagacattgacctcaccaagagggcgggagaactcactgaggatgaggtggaacgtgtgatcaccattatgcagaatccacgccagtacaagatcccagactggttcttgaacagacagaaggatgtaaaggatggaaaatacagccaggtcctagccaatggtctggacaacaagctccgtgaagacctggagcgactgaagaagattcgggcccatagagggctgcgtcacttctgg

SEQ ID NO: 4233 - DNA, 485 bp, Homo sapiens
cagaagggtttgtcttgtaggtttgcttataatatgtattacaaagctaagttgtagagtggacatttccatttatattttgtagatattgactgcttctctttattttcttttttttaaattttattttaaagacagaatcttgctgtgtcacccaggctggagtgcagtggtgtgatctcggctcactgcagcttctgcctcccaggttcaagcaattctgcttcagccacccaagttgctgggattacaggcacatgccaccacgcctggctaatttttgtacttttagtagagacagagtttcaccatattgaccaggctggcctcaaactcctgacctcaagtgatctgcccatctcggcttcccaaagtgctgggtttacaggcatgagccaccacacctggccaatattgactgcttttgataagatcagttgcaattttgattatatagtaaaccaaatctggtatccaataataat

SEQ ID NO: 4234 - DNA, 482 bp, Homo sapiens
cagaaggggaaggtaccgaaagcacagtaatcactggtgtcgatattgtcatgaaccatcacctgcaggaaacaagtttcacaaaagaagcctacaagaagtacatcaaagattacatgaaatcaatcaaagggaaacttgaagaacagagaccagaaagagtaaaaccttttatgacaggggctgcagaacaaatcaagcacatccttgctaatttcaaaaactaccagttctttattggtgaaaacatgaatccagatggcatggttgctctattggactaccgtgaggatggtgtgaccccatatatgattttctttaaggatggtttagaaatggaaaaatgttaacaaatgtggcaattattttggatctatcacctgtcatcataactggcttctgcttgtcatccacacaacaccaggacttaagacaaatgggactgatgtcatcttgagctcttcatttattttgactgtgat

SEQ ID NO: 4235 - DNA, 527 bp, Homo sapiens; identical to SEQ ID NO: 1103

SEQ ID NO: 4236 - DNA, 329 bp, Homo sapiens
  misc_feature 228, 229, 230, 231, 232, 233, 234, 235, 236, 237, 239, 241,242, 243, 244, 245, 246, 247, 248, 249, 251, 252, 253, 254,255, 257, 259, 262, 263, 264, 265, 266, 267, 268, 269, 271,272, 273, 274, 275, 276, 278, 279, 280, 281, 283, 284: n = A,T,C or G
  misc_feature 286, 292, 294, 295: n = A,T,C or G
ggcgcgatctcggctcactgtaagctccgcctcctgggttcacgccattctcctgcctcagcctccagagtagctgggactacaggcgccagccaccacgcccggctaattttttttgtatttttagtagaaacggggtttcaccgcgttagccaggatggtctccatctcctgacctcgtgatccacctgcctcagcctccaaaagtgctgggattataggggtgannnnnnnnnncncnnnnnnnnncnnnnnananccnnnnnnnnannnnnntnnnncnncnacaccncnnccctcccctatttccaccactcctccttaaatcc

SEQ ID NO: 4237 - DNA, 337 bp, Homo sapiens
ctcgctccgagtttcaggctcgtgctaagctagcgccgtcgtcgtctcccttcagtctccatcatgattatctaccgggacctcatcagtcacgatgagatgttctccgacatctacaagatccgggagatcgcggacggtttgtgcctggaggtggaggggaagatggtcagtaggacagaaggtaacattgatgactcactcattggtggaaattcctccgctgaaggccccgagggcgaatgtaccgaaagcacactaatcactggtgtcgatattgtcatgaaccatcacctgcaggaaacacgtttcacaaaagaagcctacatgaagtaca

SEQ ID NO: 4238 - DNA, 487 bp, Homo sapiens
cagaaggggggggagtgaacggagagcgtagtgaccatcatgagcctcctcaacaagcccaagagtgagatgaccccagaggagctgcagaagcgagaggaggaggaatttaacaccggtccactctctttgctcacacagtcagtcaagaacaatacccaagtgctcatcaactgccgcaacaataagaaactcctgggccgcgtgaaggccttcgataggcactgcaacatggtgctggagaacgtgaaggagatgtggactgaggtacccaagagtggcaagggcaagaagaagtccaagccagtcaacaaagaccgctacatctccaagatgttcctgcgcggggactcagtcatcgtggtcctgcggaacccgctcatcgccggcaagtaggggccgcctgtctgttgacagaactcactcctctgtcctatgaagaccgctgccattggtgttgagaataataaagctctgtgttttttaa

SEQ ID NO: 4239 - DNA, 212 bp, Homo sapiens
ggagcttttgaaaggcggcgggaggcggcgagcgccatggccagtccgggctgcctgctgtgcgtgctgggcctgctactctgcggggcggcgagcctcgagctgtctagaccccacggcgacaccgccaagaagcccatcatcggaatattaatgcaaaaatgccgtaataaagtcatgaaaaactatggaagatactatattgctgcgtc

SEQ ID NO: 4240 - DNA, 84 bp, Homo sapiens
gagcagtggtgtgtgagagccaagcgtccctctggctgcccactcagtggcaacacccgggagctgttttgtcctttgtggagc

SEQ ID NO: 4241 - DNA, 364 bp, Homo sapiens
caatctactcaaagcatgggattattagaatcaaacattttgaaagtctgtccttgaaggactaatagaaaagtatgttctaacctttacatgaggactctattctttaactcccattaccatgtaatggcagttatattttgcagttcccacattaaagaagacctgagaatgtatccccaaaagcgtgagcttaaaatacaagactgccatattaaattttttgttgacattagtctcagtgaagactatgaaaatgctggctatagatgtcttttcccatttatctaaatatggactgctcaggaaacgagactttccattacaagtatttttaattaattgggccagcttttcaaacaaa

SEQ ID NO: 4242 - DNA, 95 bp, Homo sapiens
gacatttgcttctgacacaactgtgtgcactagcaacctctaactgacaccatggtgcacctgactcctgaggagaagcctgccgttactgccct

SEQ ID NO: 4243 - DNA, 402 bp, Homo sapiens
ggctggggtctcaggaggcagcgctctcgggacgtctccaccatggcctgggctctgctattcctcaccctcctcactcagggcacagggtcctgggcccagtctgccctgactcagcctgcctccgtgtctgggtctcctggacagtcgatcaccatctcctgcagtggaaccagcagtgacgttggtggttatgaccatgtctcctggtaccaacaacacccaggcaaagcccccaaactcataatttctgatgtcagtaatcggccctcaggggtttctaatcgcttctctggctccaaatctggcaacacggcctccctgaccatctctgggctccaggctgaggacgaggctgattattactgcagctcatatacagacagcagcactcttgtgcta

SEQ ID NO: 4244 - DNA, 440 bp, Homo sapiens
gacacacgcgactcccacaaggttgcagccggagccgcccagctcaccgagagcctagttccggccagggtcgccccggcaaccacgagcccagccaatcagcgccccggactgcaccagagccatggtcggcagaagagcactgatcgtactggctcactcagagaggacgtccttcaactatgccatgaaggaggctgctgcagcggctttgaagaagaaaggatgggaggtggtggagtcggacctctatgccatgaacttcaatcccatcatttccagaaaggacatcacaggtaaactgaaggaccctgcgaactttcagtatcctgccgagtctgttctggcttataaagaaggccatctgagcccagatattgtggctgaacaaaagaagctggaatccgcagaccttgtgatattccagttccccctgcagt

SEQ ID NO: 4245 - DNA, 461 bp, Homo sapiens
ggagcttttccgtgctacctgcagaggggtccatacggcgttgttctggattcccgtcgtaacttaaagggaaattttcacaatgtccggaacccttgatgtcctgcaaatgaaggaggaggatgtccttaagttccttgcagcaggaacccacttaggtggcaccaatcttgacttccagatggaacagtacatctataaaaggaaaagtgatggcatctatatcataaatctcaagaggacctgggagaagcttctgctggcagctcgtgcaattgttgccattgaaaaccctgctgatgtcagtgttatatcctccaggaatactggccagagggctgtgctgaagtttgctgctgccactggagccactccaattgctggccgcttcactcctggaaccttcactaaccagatctaggcagccttccgggagccacggcttcttgtggttactgacc

SEQ ID NO: 4246 - DNA, 381 bp, Homo sapiens
gctctcgagtccgggccgcaagtcccagactctgcccatggaggcgtccagcgagccgccgctggatgctaagtccgatgtcaccaaccagcttgtagattttcagtggaaactgggtatggctgtgagctcagacacttgcagatctcttaagtatccttacgttgcagtgatgctaaaagtggcagatcattcaggccaagtaaagaccaagtgctttgaaatgacgattccacagtttcagaatttctacagacagttcaaggaaattgctgcagttattgaaacggtgtgaagacggattctttggttgataaattgctatcattctaaagtcatggacttcactttcggcaacaaaactaaataaggatggaacat

SEQ ID NO: 4247 - DNA, 70 bp, Homo sapiens
ctaactttaacaacatccctaatacaactgtttattcaaatgcacggtggtccctgttagagttagacct

SEQ ID NO: 4248 - DNA, 399 bp, Homo sapiens
gactacgacttccacgtgcacccactgcctcttcccttctcgcttgggaactctagtctcgcctggggttgcaatggaccccaactgctcctgtgccgctggtgtgtcctgcacctgcgccagctcctgcaagtgcaaagagtgcaaatgcacctcctgcaagaagagctgctgctcctgctgccctgtgggctgtgccaagtgtgcccagggctgcatctgcaaaggggcatcggagaagtgcagctgctgcgcctgatgtcaggacagccctgctcccaagtacaaatagagtgacccgtaaaatccaggattttctgttttttgatacaatcttgacccctttgctacattcctttttttctgtgaaatatgtgaataataattaaacacttagac

SEQ ID NO: 4249 - DNA, 438 bp, Homo sapiens
gaaggggctttttacgtcggccttcgcgagcgtctgggcgggtggtaggaacaatggcgctgtcttaagtggcacagtggagcagctctgaagatgcaaagatacacgaaaaaacttccagaacatctgggagaatatttaatggaaaatcgcttggttaaaacctgacacttttaacagtgaacagcgttctgagtgtggacgagtagccagtgaagataatgaatgtcgaatgtgactgactagcagcttcattttgaatgagggccgctgtctgcccattgatagaggccagattgtcttggaagttccaaagttgcaacgatttctggctagtgccacgaggtttacttgactgttgtgtgaaaagctgataagaaaaccatccagaaaaaagctcttcgttttacaaacatgaaaataaaacatgtaattttg

SEQ ID NO: 4250 - DNA, 370 bp, Homo sapiens
gctcttccggggacgttgtctgcaggcactcagaatggtccagcgtttgacataccgacgtaggctttcctacaatacagcctctaacaaaactaggctgtcccgaacccctggtaatagaattgtttacctttataccaagaaggttgggaaagcaccaaaatctgcatgtggtgtgtgcccaggcagacttcgaggggttcgtgctgtaagacctaaagttcttatgagattgtccaaaacaaagaaacatgtcagcagggcctatggtggttccatgtgtgctaaatgtgttcgtgacaggatcaagcgcgctttccttatcgaggagcagaaaatcgttgtgaaagtgttgaaggcacaagcacag

SEQ ID NO: 4251 - DNA, 509 bp, Homo sapiens
cgacagaagggattattaaaagcactcatgaccattggaaagcattagtgactaagaaaacgaatggaaaaggaatcagttgcatgaatacaactttgtctgagagccccttcaagtgtgatcctgatgctgccagagccattgtggatgctttaccaccaccctgtgaatctgcctgcacagtaccaacagacgtggataagtggttccatcaccagaaaaactaatgagatttctctggaatgcaagctgatattgctacatcgtgttcatctggatgtattagaagtaaaagtagtagcttttcaaagctttaaatttgtagaactcatctaactaaagtaaattctgctgtgactaatccaatatactcagaatgttatccatctaaagcatttttcatatctcaactaagataacttttagcacatgcttaaatatcaaagcagttgtcatttggaagtcacttgtgaatagatgtgcaaggggagcacatattggatgtatat

SEQ ID NO: 4252 - DNA, 446 bp, Homo sapiens
gaaggcccaagatggctgtcttcgccttagtactcgtgtgaagttggcagggacggttcctgtcatcttcttgggcttatttggtgtgctgttgaaggggggagactagagaaatggcagggaacctcttatccggggcaggtaggcgcctgtgggactgggtgcctctggcgtgcagaagcttctctcttggtgtgcctagattgatcggtataaggctcactctcccgccccccaaagtggttgatcgttggaacgagaaaagggccatgttcggagtgtatgacaacatcgggatcctgggaaactttgaaaagcaccccaaagaactgatcagggggcccatatggcttcgaggttggaaagggaatgaattgcaacgttgtatccgaaagaggaaaatggttggaagtagaatgttcgctgatgacctgcacaaccttaat

SEQ ID NO: 4253 - DNA, 446 bp, Homo sapiens
atgaagctattataatggttttagagtcaactggagaaagtacatttaagatgattttggatttattaaagtccctttggaagtcttctaccattactgtagaccaaatgaaaagaggttatgagagaatttacaatgaaattccggacattaatctggatgtcccacattcatactctgtgctggagcggtttgtagaagaatgttttcaggctggaataatttccaaacaactcagagatctttgtccttcaaggggcagaaagcgttttgtaagcgaaggagatggaggtcgtcttaaaccagagagctactgaatataagaactcttgcagtcttagatgttataaaaatatatatctgaattgtaagagttgttagcacaagttttttttttttttttaaaccccttttttggggaacaaggcttttttaactttttaaaa

SEQ ID NO: 4254 - DNA, 495 bp, Homo sapiens
cttgctcctcatgacttcgcaaatattaaagctaacgtcaaagtagcatcaacagaaaatggaataatttttggtaatatagtttatgatgtctctggagcagcaagtgacagaaattgtgtggttctcagtgatattcacatcgacatcatggactatatccagcctgcaacttgcactgatgcagaattccgtcagatgtgggccgaatttgaatgggaaaacaaagtgacagttaacaccaacatggttgatttaaatgactacttacagcacatattaaagtcaaccaatatgaaatgcctgactccagaaaaggccctttctggttactgtggctttatggcagccaacctttatgctcgttccatatttggtgaagatgcacttgcaaatgtcagcattgagaagccaattcaccagggaccagatgctgctgttaccggccatataagaattcgtgcaaagagccagggaatggccttaagtcttgga

SEQ ID NO: 4255 - DNA, 511 bp, Homo sapiens
cacctaccactgcaagaacagcattgcatacatggatgaggagactggcaacctgaaaaaggctgtcattctacagggctctaatgatgttgaacttgttgctgagggcaacagcaggttcacttacactgttcttgtagatggctgctctaaaaagacaaatgaatggggaaagacaatcattgaatacagaacaaataagccatcacgcctgcccttccttgatattgcacctttggacatcggtggtgctgaccaggaattctttgtggacattggcccagtctgtttcaaataaatgaactcaatctaaattaaaaaagaaagaaatttgaaaaaactttctctttgccatttcttcttcttcttttttaactgaaagctgaatccttccatttcttctgcacatctacttgcttaaattgtgggcaaaagagaaaaagaaggattgatcagagcattgtgcaatacagtttcattaactccttccctcgctcccccaaaaatttga

SEQ ID NO: 4256 - DNA, 477 bp, Homo sapiens
acttcaagatcatcgaggacctgagggctcagatcttcgcaaatactgtggacaatgcccgcatcgttctgcagattgacaatgcccgtcttgctgctgatgactttagagtcaagtatgagacagagctggccatgcgccagtctgtggagaacgacatccatgggctccgcaaggtcattgatgacaccaatatcacacgactgcagctggagacagagatcgaggctctcaaggaggagctgctcttcatgaagaagaaccacgaagaggaagtaaaaggcctacaagcccagattgccagctctgggttgaccgtggaggtagatgcccccaaatctcaggacctcgccaagatcatggcagacatccgggcccaatatgacgagctggctcggaagaaccgagaggagctagacaagtactggtctcagcagattgaggagagcaccacagtggtcaccacacagtctgctg

SEQ ID NO: 4257 - DNA, 500 bp, Homo sapiens
tcagaaatcccaggatgtggaactctgggagggagaagtggtcaaagagctctctgtggaagaacagataaagagaaatcggtattatgatgaggatgaggatgaagagtgacaaattgcaatgatgctgggccttaaattcatgttagtgttagcgagccactgccctttgtcaaaatgtgatgcacataagcaggtatcccagcatgaaatgtaatttacttggaagtaactttggaaaagaattccttcttaaaatcaaaaacaaaacaaaaaaacacaaaaaacacattctaaatactagagataactttacttaaattcttcattttagcagtgatgatatgcataagtgctgtaaggcttgtaactggggaaatattccacctgataatagcccagattctactgtattcccaaaaggcaatattaaggtagacagatgattagtagtatattgttacacactattttggaattagagaacatacagaaggaat

SEQ ID NO: 4258 - DNA, 509 bp, Homo sapiens
atttaatacgactactatagggaatttggccctcgaggccaagaattcggcacgaggagactaagtgccttttcatccaaatggaattctgtgataaagggaccttggaacaatggattgaaaaaagaagaggcgagaaactagacaaagttttggctttggaactctttgaacaaataacaaaaggggtggattatatacattcaaaaaaattaattcatagagatcttaagccaagtaatatattcttagtagatacaaaacaagtaaagattggagactttggacttgtaacatctctgaaaaatgatggaaagcgaacaaggagtaagggaactttgcgatacatgagcccagaacagatttcttcgcaagactatggaaaggaagtggacctctacgctttggggctaattcttgctgaacttcttcatgtatgtgacactgcttttgaaacatcaaagtttttcacagacctacgggatggcatcatctcagatatatttgat

SEQ ID NO: 4259 - DNA, 694 bp, Homo sapiens
actcactatttggaatttggccctcgaggccaagaattcggcacgagaaagattgctcaagtaggtgcaaaatatgattggactaagcagcctttctcctccggaaggacagactgcttagtccaatcatagtttcttaaagaaaacaaggaattatatttattcataaattcttcctcccataacaccgtcacctccctctttccagactaatggtagagcctgagagtagggtttggagatacgggttaccccaggcagtgggctgagatccactgggaccacaggctcttcctcacctaaatcgctgtcaccctcatccctgtgcctcagtgccatgtggcactgcttcccaaggactcacagctgagtacatgaccatcttgaggggcagccccaggcgctggacccgggagaagtttgcaaggatagcattcagcaggatccctgaggatgggaaaaaagagcttagactctcccagaggaaggcaccccagcctcccagacccacacctcaccccctgtcagctgggccttctctgctgcccggggtgggcccacgtgggctccaatatccaaagccgagatctgggcaagagtccgcaggacatctggggaggcccaggctggtagtggaagaccgtgggcttgctgtggggagacaggacagatggaccatcctgagccctcgagt

SEQ ID NO: 4260 - DNA, 404 bp, Homo sapiens
gctctcgctcgggttttctgccgtcatcttggttccgagttccctgcacagcctcctttttattcccttccttcagaaatgcccggcgaagccacacaaaccgtccctgctacagagcaggagttgccgcacccccaggctgatacagggtctggaacagaatctgacagcgatgaatcagctaccagatcttgaagaacaggattccacccacgcaaccacacaacatgcccagctggcggcagcagctgaaatcgatgaagaaccaggcagcaaagcacaacagagtcggagtgaaaagaaggcaccgaatgctatgtgcaaactgggtcttctgcaggttacaggagttactagagtcactatccggaaatctaagaatatcctctttgtcatcacaaaac

SEQ ID NO: 4261 - DNA, 507 bp, Homo sapiens
gacagaaggggctcttcctgtctgtaccagggcggcgcgtggtctacgccgagtgacagagacgctcaggctgtgttctcaggatgaccgagtgggagacagcagcaccagcggtggcagagaccccagacatcaagctctttgggaagtggagcaccgatgatgtgcagatcaatgacatttccctgcaggattacattgcagtgaaggagaagtatgccaagtacctgcctcacagtgcagggcggtatgccgccaaacgcttccgcaaagctcagtgtcccattgtggagcgcctcactaactccatgatgatgcacggccgcaacaacggcaagaagctcatgactgtgcgcatcgtcaagcatgccttcgagatcatacacctgctcacaggcgagaaccctctgcaggtcctggtgaacgccatcatcaacagtggtccccgggaggactccacacgcattgggcgcgccgggactgtgagacgacaggctgtggatgtgt

SEQ ID NO: 4262 - DNA, 498 bp, Homo sapiens
cagaagggggcaccgtcaggcttaagtccactccccgccctaagttctctgtgtgtgtcctgggggaccagcagcactgtgacgaggctaaggccgtggatatcccccacatggacatcgaggcgctgaaaaaactcaacaagaataaaaaactggtcaagaagctggccaagaagtatgatgcgtttttggcctcagagtctctgatcaagcagattccacgaatcctcggcccaggtttaaataaggcaggaaagttcccttccctgctcacacacaacgaaaacatggtggccaaagtggatgaggtgaagtccacaatcaagttccaaatgaagaaggtgttatgtctggctgtagctgttggtcacgtgaagatgacagacgatgagcttgtgtataacattcacctggctgtcaacttcttggtgtcattgctcaagaaaaactggcagaatgtccgggccttatatatcaagagcaccatgggcaagcccc

SEQ ID NO: 4263 - DNA, 220 bp, Homo sapiens
aaagaagtggggcttcaccaagttcaatgctgatgaatttgaagacatggtggctgaaaagcggctcatcccagatggctgtggggtcaagtacatccccagtcgtggccctctggacaagtggcgggccctgcactcatgagggcttccaatgtgctgcccccctcttaatactcaccaataaattctacttcctgtccaaaataaaaataaacagggg

SEQ ID NO: 4264 - DNA, 497 bp, Homo sapiens
agaacaaagcagcagcgggaagccgagttcacaaagtccattgctaagttttttgaccacagtgggacactggtcatggatgcatatgagcctgaaatatccaggctccatgacagtcttgccatagaaagaaaaataaagtagccaattctaaaagtagccctctttctcctggatcttgctgaattagtggcttggggggtgggggagataaaaagaacttataatgggtaaagtaagaaatgttaaaaagtccctgttttgtcctgaaattttagtctattctgggtaaataggattttctgacacagatatgagaagttgtagctctgatgtctagctgtagtctccttgatctgctgattgcattattttaatttgctttttctgggaaagcagttttgctaaaagctgtacagactttttcttttgtacctagcagtactttatatagtatagctttgggccatgtagcattttaagactcaattttaaaa

SEQ ID NO: 4265 - DNA, 502 bp, Homo sapiens
gaagtcgtggaagcgtcggcgacgcatcgcgcgatggcgcgggcgggacagtgcttgtgaaactgaacacaacaaaagtatggatatgggaaaccaacatccttctattagtaggcttcaggaaatccaaaaggaagtaaaaagtgtagaacagcaagttatcggcttcagtggtctgtcagatgacaagaattacaagaaactggagaggattctaacaaaacagctttttgaaatagactctgtagatactgaaggaaaaggagatattcagcaagctaggaagcgggcagcacaggagacagaacgtcttctcaaagagttggagcagaatgcaaaccacccacaccggattgaaatacagaacatttttgaggaagcccagtccctcgtgagagagaaaattgtgccattttataatggaggcaactgcgtaactgatgagtttgaagaaggcatccaagatatcattctgaggctgacacatgttaaaactggagga

SEQ ID NO: 4266 - DNA, 338 bp, Homo sapiens
ctaaatccatgaagtttgtggatggcctgatgatccacagcggagaccctgttaactactacgttgacactgctgtgcgccacgtgttgctcagacagggtgtgctgggcatcaaggtgaagatcatgctgccctgggacccaactggtaagattggccctaagaagcccctgcctgaccacgtgagcattgtggaacccaaagatgagatactgcccaccacccccatctcagaacagaagggtgggaagccagagccgcctgccatgccccagccagtccccacagcataacagggtctccttggcagctgtattctggagtctggatgttgctct

SEQ ID NO: 4267 - DNA, 338 bp, Homo sapiens
cgattacattgcagtgaaggagaagtatgccaagtacctgcctcacagtgcagggcggtatgccgccaaacgcttccgcaaagctcagtgtcccattgtggagcgcctcactaactccatgatgatgcacggccgcaacaacggcaagaagctcatgactgtgcgcatcgtcaagcatgccttcgagatcatacacctgctcacaggcgagaaccctctgcaggtcctggtgaacgccatcatcaacagtggtccccgggaggactccacacgcattgggcgcgccgggactgtgagacgacaggctgtggatgtgtcccccctgcgccgtgtgaacc

SEQ ID NO: 4268 - DNA, 333 bp, Homo sapiens
  misc_feature 307: n = A,T,C or G
gtctcttcctgctctccatcatggcgcaggatcaaggtgaaaaggagaaccccatgcgggaacttcgcatccgcaaactctgtctcaacatctgtgttggggagagtggagacagactgacgcgagcagccaaggtgttggagcagctcacagggcagacccctgtgttttccaaagctagatacactgtcagatcctttggcatccggagaaatgaaaagatcgctgtccactgcacagttcgaggggccaaggcagaagaaatcttggagaagggtctaaaggtgcgggagtatgagttaagaanaaacaacttctcagatactggaaact

SEQ ID NO: 4269 - DNA, 332 bp, Homo sapiens
gactacttcctctttccctcggagcgggcggcggcgttggcggcttgtgcagcaatggccaagatcaaggctcgagatcttcgcgggaagaagaaggaggagctgctgaaacagctggacgacctgaaggtggagctgtcccagctgcgcgtcgccaaagtgacaggcggtgcggcctccaagctctctaagatccgagtcgtccggaaatccattgcccgtgttctcacagttattaaccagactcagaaagaaaacctcaggaaattctacaagggcaagaagtacaagcccctggacctgcggcctaagaagacacgtgccatgcgccg

SEQ ID NO: 4270 - DNA, 333 bp, Homo sapiens; identical to SEQ ID NO: 1110

SEQ ID NO: 4271 - DNA, 395 bp, Homo sapiens
atgtcacgaggtcgatctatcgatcagttgggacagggcagaaacaagtcataatggaatgtcataaggttggttaatcagttaagacagaagctggaggctgggtgcggtggctcacacctgtaatcccagcactttgggaggccgaggtgggcagatcacgaggtcaggagatcgagaccatcctggctaacatggtgaaaccctgtctctactaaaaatgcaaaaatttgccaggtgtggtgacgggcgcctgtagtcccagctactcaggaggctgaggcaggagaatggcgtaaacccaggaggtggagcttgcagtgagccaagatcacgtcactgcactccagcttgggcgacagaacaagactctgtctcatttaaaaaaaaaagga

SEQ ID NO: 4272 - DNA, 443 bp, Homo sapiens
caacattctgactgggaaccccctttctgaaccataaacccaaataaagtataggcgatagaaattgaaacctggcgcaatagatatagtaccgcaagggaaagatgaaaaattataaccaagcataatatagcaaggactaacccctataccttctgcataatgaattaactagaaataactttgcaaggagagccaaagctaagacccccgaaaccagacgagctacctaagaacagctaaaagagcacacccgtctatgtagcaaaatagtgggaagatttataggtagaggcgacaaacctaccgagcctggtgatagctggttgtccaagatagaatcttagttcaactttaaatttgcccacagaaccctataaatccccttgtaaatttaactgttagtccaaagaggaacagctctttggacactaggaaaaaac

SEQ ID NO: 4273 - DNA, 371 bp, Homo sapiens
agcagagtgagaccctgtctcaaaaataaataagtaaataaataaataaataaaataaaaaccaggtcagtacctggagaatttgaatgatagagaatgatagagtaataccctaattattagttaaaacctacaggccgggtgtggtggctcacgcctgtaatcccagcactttgggaggccgaggtgggtggatcacttgaggtcaggagttcaagaccagcctggccaacatggtgaaaccccatctctactaaaaatataaaaatcagccgggcatggtggcatgtgcctgtaatcccagctactcaggagtctgaggaggagaatcacttgaacctggaggcagaggttgcagtgagtcgaggttg

SEQ ID NO: 4274 - DNA, 518 bp, Homo sapiens; identical to SEQ ID NO: 2554

SEQ ID NO: 4275 - DNA, 381 bp, Homo sapiens
ttgagggcacctacattgacaagaaatgccccttcactggtaatgtgtccattcgagggcggatcctctctggcgtggtgaccaagatgaagatgcagaggaccattgtcatccgccgagactatctgcactacatccgcaagtacaaccgcttcgagaagcgccacaagaacatgtctgtacacctgtccccctgcttcagggacgtccagatcggtgacatcgtcacagtgggcgagtgccggcctctgagcaagacagtgcgcttcaacgtgctcaaggtcaccaaggctgccggcaccaagaagcagttccagaagttctgaggctggacatcggcccgctccccacaatgaaataaagttattttctcattcccgc

SEQ ID NO: 4276 - DNA, 446 bp, Homo sapiens
cagaaggggctctttccctgccgccgccgagtcgcgcggaggcggaggcttgggtgcgttcaagattcaacttcacccgtaacccaccgccatggccgaggaaggcattgctgctggaggtgtaatggacgttaatactgctttacaagaggttctgaagactgccctcatccacgatggcctagcacgtggaattcgcgaagctgccaaagccttagacaagcgccaagcccatctttgtgtgcttgcatccaactgtgatgagcctatgtatgtcaagttggtggaggccctttgtgctgaacaccaaatcaacctaattaaggttgatgacaacaagaaactaggagaatgggtaggcctttgtaaaattgacagagaggggaaaccccgtaaagtggttggttgcagttgtgtagtagttaaggactatggcaaggagtctc

SEQ ID NO: 4277 - DNA, 409 bp, Homo sapiens
cagaaggggctcttcccttttgcggccatcaccgaagcgggagcggccaaaatgaagtttaatccctttgtgacttccgaccgaagcaagaatcgcaaaaggcatttcaatgcaccttcccacattcgaaggaagattatgtcttcccctctttccaaagagctgagacagaagtacaacgtgcgatccatgcccatccgaaaggatgatgaagttcaggttgtacgtggacactataaaggtcagcaaattggcaaagtagtccaggtttacaggaagaaatatgttatctacattgaacgggtgcagcgggaaaaggctaatggcacaactgtccacgtaggcattcaccccagcaaggtggttatcactaggctaaaactggacaaagaccgcaaaaagatcctcg

SEQ ID NO: 4278 - DNA, 120 bp, Homo sapiens
gcaggtctgatccaacttcgtatgcagggtacattgaagaccttaagaagtttctaaaaccatctactttagaagaacagaagaacctcacagtctgtcctgatggagcactttttgaac

SEQ ID NO: 4279 - DNA, 195 bp, Homo sapiens
gctctcgagtcactccggcgcagtgttgggactgtctgggtatcggaaagcaagcctacgttgctcactattacgtataatccttttcttttcaagatgcctgaggaagtgcaccatggagaggaggaggtggagacttttgcctttcaggcagaaattgcccaactcatgtgcctcatcatcaataccttctat

SEQ ID NO: 4280 - DNA, 502 bp, Homo sapiens
gacctctctccggtggtggagtgcatggaccacgctctaacaagtctcttccctaagactcattatgccgctggaaaagatgccaaaattttctggatacctctgtctcacatgccagcagctttgcaagactttttattgttgaaacagaaagcagagctggctaatcccaaggcagtgtgactcagctaaccacaaatgtctcctccaggctatgaaattggccgattgcaagaacacatctccttttcaaccccattccttatctgctccaacctggactcatttagatcgtgcttatttggattgcaaaagggagtcccaccatcgctggtggtatcccagggtccctgctcaagttttctttgaaaaggagggctggaatggtacatcacataggcaagtcctgccctgtatttaggctttgcctgcttggtgtgatgtaagggaaattgaaagacttgcccattcaaaatgatctttaccgtggcctgccccatgc

SEQ ID NO: 4281 - DNA, 450 bp, Homo sapiens
cagcctatggggtagccctgctccacagttgcggttgtacactgctgcttcaataaaagttgctgtttaacactaccagctcacccttgaattctttcctgggtgaagctaagaaccctcccacgctaatccgcgattttggggcttgcctgtcctttcaataggacattgctaaattgctctctagaattgcttttccaggttgggcgcagtggctcacatctgaaatcccagcactttgggaggctgaggcaggcagatcacctgaggtcaggtgttcaagaccagcctggcctacatggcaaatccctgtctttactaaaaatacaaaaattagctgcgcatggtggcctatgcctgtaatcccagctacttgggtggctgaggcaggagaatcgcttgaacctggaaggtggagcttgcagtgagccgagatcgcgccactgcact

SEQ ID NO: 4282 - DNA, 390 bp, Homo sapiens
aggtggagtctccctgttgcccaggttggagtgcagcggcacaatctcagctcactgcaacctctgcctctggggttcaagcgattctcctgcctcagcctccagagtagctgggattacaggcatgcgccaccacaccaggctaattctgtacttttagtagagatggggtttcaccatgttaaccaggctggtctcaaattcctgacctcaggtgatccgcccatctcagcctctgaaagtgctgggactacacgcatgatccaccttgccctgccctaatagaggttgtttaaaaaatactcaaacaggctgttggtgttatctaacacctagtgggcccagctcctttgacatgtccaaagttgggcgggtatttcttgagctgag

SEQ ID NO: 4283 - DNA, 305 bp, Homo sapiens
gacgacagaagggggccgtgggcctgcgagaatcgaggcactcgctggcgtacccatgtatcgaaatgagttcacggcctggtaccggcggatgtcggtggtctacgggatcggcacctggtctgtgttgggctcactgctttactatagccggacaatggcgaagtcgtcagtagaccaaaaggatggctcagcaagtgaagtacccagtgaactctctgaacgcccaaaaggattttatgtggaaacagttgtcacatataaagaagattttgttccaaatacagaaaagatcctcaactatt

SEQ ID NO: 4284 - DNA, 516 bp, Homo sapiens
atgaaagacatattggagaaaaaagttgaaaaggtggttgtgtcaaaccgattggtgacatctccatgctgtattgtcacaagcacatatggctggacagcaaacatggagagaatcatgaaagctcaagccctaagagacaactcaacaatgggttacatggcagcaaagaaacacctggagataaaccctgaccattccattattgagaccttaaggcaaaaggcagaggctgataagaacgacaagtctgtgaaggatctggtcatcttgctttatgaaactgcgctcctgtcttctggcttcagtctggaagatccccagacacatgctaacaggatctacaggatgatcaaacttggtctgggtattgatgaagatgaccctactgctgatgataccagtgctgctgtaactgaagaaatgccaccccttgaaggagatgacgacacatcacgcatggaagaagtagactaatctctggctgagggatgacttacctgttcagtactctac

SEQ ID NO: 4285 - DNA, 186 bp, Homo sapiens
ttgaccttgcctcatagtattcgatcagattcagaagatatctgtttatttacgaaggatgaacccaattcaactcctgaaaagacagaacagttttatagaaagcttttaaacaagcatggaattaaaaccgtttctcagattatctccctccaaactctaaagaaggaatataaatcctatgaa

SEQ ID NO: 4286 - DNA, 388 bp, Homo sapiens
gatttgaaaggaatgaggatcctgcactcttcctccctcagtaagtaaatgccagtccctaggaagagagaaccaaaatgtctaccggaccagatgtcaaggctacagtgggggacatttccagtgatggcaatttaaacgtggctcaagaggaatgctccaggaaaggtttttgttcagtccgacatgggctggccctcatcttgcagctctgtaatttttcaatttacacccaacaaatgaacttgagcattgccatcccagctatggtgaacaacacagccccacctagccagcccaatgcctccacagaacggccctccactgactcccagggctactggaatgaaactctaaaagaatttaaagcaatggtaagtttagtgag

SEQ ID NO: 4287 - DNA, 404 bp, Homo sapiens
tgggcgcggtggctcacgcctgtagtcccagtactttcggaggccgaggtgagtggatcacttgaggtcaggagttcgagaccagcctggccaacacagcgaaaccccatctctactaaaaatacaaaaattatccaggtgtggtggcaggcggcaggcacctgtaatcctagctactcaggaggctgaggcaggagaatcacttgagcctggaaggcggaggttgcaatgagctaaaattgtgccagtgtactccagcctgggtgacagagtaagactccatctaaaaaaaaaatggggtcaagaatgacttcaagctttttgacttgggtgggtagtgtggtattaagaaatacagggaataaaagaataggttacgtgaacaggattggaaaatgatttat

SEQ ID NO: 4288 - DNA, 324 bp, Homo sapiens
gtggcgctgagaacgcgggtccacgcgtgtgatcgtccgtgcgtctagcctttgcccacgcagctttcagtcatggcctccggtaacgcgcgcatcggaaagccagcccctgacttcaaggccacagcggtggttgatggcgccttcaaagaggtgaagctgtcggactacaaagggaagtacgtggtcctctttttctaccctctggacttcacttttgtgtgccccaccgagatcatcgcgttcagcaaccgtgcagaggacttccgcaagctgggctgtgaagtgctgggcgtctcggtggactctcagttcacccacctg

SEQ ID NO: 4289 - DNA, 520 bp, Homo sapiens
taaccttggtactatcgccaagtctgggaccaaagcgttcatggaagctttgcaggctggtgcagatatctctatgattggccagttcggtgttggtttttattctgcttatttggttgctgagaaagtaactgtgatcaccaaacataacgatgatgagcagtacgcttgggagtcctcagcagggggatcattcacagtgaggacagacacaggtgaacctatgggtcgtggaacaaaagttatcctacacctgaaagaagaccaaactgagtacttggaggaacgaagaataaaggagattgtgaagaaacattctcagtttattggatatcccattactctttttgtggagaaggaacgtgataaagaagtaagcgatgatgaggctgaagaaaaggaagacaaagaagaagaaaaagaaaaagaagagaaagagtcggaagacaaacctgaaattgaagatgttggttctgatgaggaagaagaaaagaaggatggtgacaagaagaagaagaag

SEQ ID NO: 4290 - DNA, 478 bp, Homo sapiens
ctttcgcgtctgcggtgcccggagtgtggtacttctcctagttgcagtcaggcttcatacgctattgtcctgcccgttagagcagccagcgggtacagaatggattttggaagagggagtcaccactggacctccaaggaagccacgtgcagacatctacaaccttcgatctcctgacgagtttattgttggccaaaaccaggctttgattgaaccaggatgaatgcgggtgttggaagtagaatatatatatacatataaaattgaaactggcgatggaatatgagaggagccctctggaaagaaaaggacagaccctgtgctttcatgaaagtgaagatctggctgaaccagttccacaaggttactgtatacatagcctgagtttaaaaggctgtgcccacttcaagaatgtcattgttagactttgaaatttctaactgcctacctgcataaagaaaataaaatcttttaaatc

SEQ ID NO: 4291 - DNA, 524 bp, Homo sapiens
gcttttcacaagatggcgccgaaagcgaagaaggaagctcctgcccctcctaaagctgaagccaaagcgaaggctttaaaggccaagaaggcagtgttgaaaggtggccacagccacaaaaagaagaagatccgcacgtcacccaccttccggcggccgaagacactgcgactccggagacagcccaaatatcctcggaagagcgctcccaggagaaacaagcttgaccactatgctatcatcaagtttccgctgaccactgagtctgccatgaagaagatagaagacaacaacacacttgtgttcattgtggatgttaaagccaacaagcaccagattaaaccggctgtgaagaagctgtatgacattgatgtggccaaggtcaacaccctgattcggcctgatggagagaagaaggcatatgttcgactggctcctgattacgatgctttggatgttgccaacaaaattgggatcatctaaactgagtccagctgcctaattctgaatatatatatatatat

SEQ ID NO: 4292 - DNA, 448 bp, Homo sapiens
gatcgccgcagatccagcgcccagagagacaccagagaacccaccatggccccctttgagcccctggcttctggcatcctgttgttgctgtggctgatagcccccagcagggcctgcacctgtgtcccaccccacccacagacggccttctgcaattccgacctcgtcatcagggccaagttcgtggggacaccagaagtcaaccagaccaccttataccagcgttatgagatcaagatgaccaagatgtataaagggttccaagccttatgggatgccgctgacatccggttcgtctacacccccgccatggagagtgtctgcggatacttccacaggtcccgcaaccgcagcgaggagtttctcattgctggaaaactgcaggatggactcttgcacatcactacctgcagttgtgtggctccctggaacagcctgagcttagctc

SEQ ID NO: 4293 - DNA, 392 bp, Homo sapiens
caaccttgacaaatagaattataggagcttacatgttctgattgatagatgagcagactttacaataaaaattataaaaggtagatagatattttatgcttgcattagaaaatatgtaggccaaccaggcagtggctcatgcctgtaatcccaacactttgggaggccaaggtgggcggatcacttgaggttgggagttcaagaccagcctggccaaattggtgaaaccccatctctactaaaaatacaaacattagccgggcatggtgacagccgcctgtagtcccagctactcgggaggctgaggcatgagagccgcttgaaccctggagtgcagtggcgtgatcatggctcactgcagccttgacctcccaggctcaggtgatcctccc

SEQ ID NO: 4294 - DNA, 421 bp, Homo sapiens
gcgcgcgggaagatggcggaacaggctaccaagtccgtgctgtttgtgtgtctgggtaacatttgtcgatcacccattgcagaagcagttttcaggaaacttgtaaccgatcaaaacatctcagagaattgggtcattgacagcggtgctgtttctgactggaacgtgggccggtccccagacccaagagctgtgagctgactaagaaatcatggccttcacacagcccataaagcatgacagattaccaaagaagattctgccacatttgattatatactatgtatggatgaaagcactctgagagatttgaatagaaaaagtaatcaagttaaaacctgcaaagctaaaattgaactacttgggagctatgatccacaaaaacaacttattattgaagatccctattatgggaatgact

SEQ ID NO: 4295 - DNA, 409 bp, Homo sapiens
atggcccgcgactggcccgacgcccgcggtatctggcacaatgacaataagaccttcctggtgtgggtcaacgaggaggaccacctgcgggtcatctccatgcagaaggggggcaacatgaaggaggtgttcacccgcttctgcaccggcctcacccagattgaaactctcttcaagtctaaggactatgagttcatgtggaaccctcacctgggctacatcctcacctgcccatccaacctgggcaccgggctgcgggcaggtgtgcatatcaagctgcccaacctgggcaagcatgagaagttctcggaggtgcttaagcggctgcgacttcagaagcgaggcacaggcggtgtggacactgctgcggtgggcggggtcttcgacgtctccaacgctgaccgcctgg

SEQ ID NO: 4296 - DNA, 466 bp, Homo sapiens; identical to SEQ ID NO: 1118

SEQ ID NO: 4297 - DNA, 497 bp, Homo sapiens
gaggcattgaggcagccagcgcaggggcttctgctgagggggcaggcggagcttgaggaaaccgcagataagtttttttctctttgaaagatagagattaatacaactacttaaaaaatatagtcaataggttactaagatattgcttagcgttaagtttttaacgtaattttaatagcttaagattttaagagaaaatatgaagacttagaagagtagcatgaggaaggaaaagataaaaggtttctaaaacatgacggaggttgagatgaagcttcttcatggagtaaaaaatgtatttaaaagaaaattgagagaaaggactacagagccccgaattaataccaatagaagggcaatgcttttagattaaaatgaaggtgacttaaacagcttaaagtttagtttaaaagttgtaggtgattaaaataatttgaaggcgatcttttaaaaagagattaaaccgaaggtgattaaaagaccttgaaatccatgac

SEQ ID NO: 4298 - DNA, 436 bp, Homo sapiens
gctctttccctgccgccgccgagtcgcgcggaggcggaggcttgggtcgttcaagattcaacttcacccgtaacccaccgccatggccgagtaaggcattgctgctggaggtgtaatggacgttaatactgctttacaagaggttctgaagactgccctcatccacgatggcctagcacgtggaattcgcgaagctgccaaagccttagacaagcgccaagcccatctttgtgtgcttgcatccaactgtgatgagcctatgtatgtcaagttggtggatgccctttgtgctgaacaccaaatcaacctaattaaggttgatgacaacaagaaactaggataatgggtaggcctttgtaaaattgacagagaggggaaaccccgtcaagtggttggatgcacttgtgtagtaggtaaggactatggcaaggagtct

SEQ ID NO: 4299 - DNA, 498 bp, Homo sapiens; identical to SEQ ID NO: 1122

SEQ ID NO: 4300 - DNA, 495 bp, Homo sapiens; identical to SEQ ID NO: 1123

SEQ ID NO: 4301 - DNA, 556 bp, Homo sapiens
cagaagagcttgtcagcaagaggaggacagaattctcccagcgttaacacaaaatccatgggcagtatgatggcaggtcctctgttgcaaactcagttccaaagtcacaggaagaaagcagaaagttcaacttccaaagggttaggactctccactcaatgtcttaggtcaggagttgtgtctaggctggaagagccaaagaatattccattttcctttccttgtggttgaaaaccacagtcagtggagagatgtttggaaaccacagtcagtggagcctgggtggtacccaggctttagcattattggatgtcaatagcattgtttttgtcatgtagctgttttaagaaatctggcccagggtgtttgcagctgtgagaagtcactcacactggccacaaggacgctggctactgtctattaaaattctgatgtttctgtgaaattctcagagtgtttaattgtactcaatggtatcattacaattttctgtaagagaaaatattacttatttatcctagtattcctaacctgtcagaataataaatattggaac

SEQ ID NO: 4302 - DNA, 150 bp, Homo sapiens
aagatattgttcttgttaacattgtattacaacattagccccaaatatagtaagatctatactagataatcctagatgaaatgttagagatgctatatgatacaactgtggccatgactgaggaaaggagctcacgcccagagactgggc

SEQ ID NO: 4303 - DNA, 304 bp, Homo sapiens
gctttttgaggaagacgcggtcgtaagggctgaagatttttggtccgcacgctcctgctcctgactcaccgctgttcgctctcgccgaggaacaagtctgtcaggaagcccgcgcgcaacagccatggcttttaaggataccggaaacacccgtggagccggaggtggcaattcaccgaattcgaatcaccctaacaagccgcaacgtaaaatccttggaaaaggtgtgtgctgacttgataagaggcgtaaaagaaaagaatctcaaagtgaaaggaccagttcgaatgcctaccaagacttt

SEQ ID NO: 4304 - DNA, 424 bp, Homo sapiens
gttctggcggctccagcgcatgctgtccctgctgctttgattccaggtgattgtattttttttatttttttattttttttgagacggagtcttgctctgttgcccaggcaggagtgcagtggcgcatctcggctcactgcaacctttgtctcaagcgattctcctgcctcagcctcctgagtagctgggattacaggtgcatgccaccaggccccgctgatttttgtatttttagtagagatagggtttcaccatgttggtcaggctggtcgtgaactcctgacctcatgatctgcccgcctcatcctcccaaagtgctgggattataggcgtgagccaccgtcctcagctgattccaggcgaattcttctctgatgggcgggcgatggtgtgttcgtgtgatgagttggagtgtgtgtgtctg

SEQ ID NO: 4305 - DNA, 441 bp, Homo sapiens
gacagaaggggggggcttgctcgcggtggcttgtggctccttcctgcggtgcttctctctttcgctcaggcccgtggcgccgacaggatgggcaagtgtcgtggacttcgtactgctaggaagctccgtagtcaccgacgagaccagaagtggcatgataaacagtataagaaagctcatttgggcacagccctaaaggccaacccttttggaggtgcttctcatgcaaaaggaatcgtgctggaaaaagtaggagttgaagccaaacagccaaattctgccattaggaagtgtgtaagggtccagctgatcaagaatggcaagaaaatcacagcctttgtacccaatgacggttgcttgaactttattgaggaaaatgatgaagttctggttgctggatttggtcgcaaaggtcatgctgttggtgatattcctggagtc

SEQ ID NO: 4306 - DNA, 518 bp, Homo sapiens
cagaaggggcctttcggccggaaccgccatcttccagtaattcgccaaaatgacgaacacaaagggaaagaggagaggcacccgatatatgttctctaggccttttagaaaacatggagttgttcctttggccacatatatgcgaatctataagaaaggtgatattgtagacatcaagggaatgggtactgttcaaaaaggaatgccccacaagtgttaccatggcaaaactggaagagtctacaatgttacccagcatgctgttggcattgttgtaaacaaacaagttaagggcaagattcttgccaagagaattaatgtgcgtattgagcacattaagcactctaagagccgagatagcttcctgaaacgtgtgaaggaaaatgatcagaaaaagaaagaagccaaagagaaaggtacctgggttcaactaaagcgccagcctgctccacccagagaagcacactttgtgagaaccaatgggaaggagcctgagctgctggaacctattccctatg

SEQ ID NO: 4307 - DNA, 453 bp, Homo sapiens
agatggcttattcaaacctccttagagctaacatggatgggttgaagaagagagactaaatgaacaaaactaagaagaccaaagcagcagcagcagcagcagcagcagcacctgccgcagcagcaacagcagcaacaacagcagcaacaacagcagcaacagcagcacagtgaagggcatacatttcctgctttcaccaattaaccactgaattgctattttttccttgtggccagatagctaggtttctggctcccccacaggaggtgtgttcacataagattagggtcctttcggaaagaataggtgcagtgtttataggatagttgtggtaagaatctagtttattttgcatatggctaattggtctgtgctgcatggttatatactcctggattatagattaaaagtctctgtagacatctctgtgaagagcaagctatcattaaacat

SEQ ID NO: 4308 - DNA, 510 bp, Homo sapiens
ggggccatttgctgccgccgagcgtggacgcaggcggatctctgaagagctgggtcgccagcctctcccgcgcacgttgcctggcctccagcacctacttggtcccgcgcgctccctcgtgtcgcccctcggagcagcagccgccgcggtcgccgctacccggaaagaagtcagagacgccgcgaggtcgccgccaccgccatgcccaagaataaaggtaaaggaggtaaaaacagacgcaggggtaagaatgagaatgaatctgaaaaaagagaactggtattcaaagaggatggtcaggagtatgctcaggtaatcaaaatgttgggaaatggacggctagaagcaatgtgtttcgatggtgtaaagaggttatgtcacatcagaggaaaattgagaaaaaaggtttggataaatacctcggacattattttggttggtctccgagactaccaggataacaaagctgatgtaattttaaaatacaatgcagacgaagctagaagtctg

SEQ ID NO: 4309 - DNA, 523 bp, Homo sapiens
aatgatacacatttttaaatgaaccataatttttttcactaagctgtttgccttccaaagtgtttacaccttaagccttaacatgtatcttcattcagaaaacagttatattgtcataccatagtaggaagaaaaacctttatttggaatatacactactgtaagtttgtacagatcatatacctaccacctgtctttgcttaaagagccttgattacataaatatgtaggaaaaaacatattgagttcaaaatttatatctaacattgtttatgttatgattttttttaattgcaaagactaggtgtatatttttttctgtttttctaaatgacccgttacttaataggtgtactaaaattgtgttgggagcagggatttggaaatttctgagagatgtgtagttaatttagtaattctgtttcatgagatatgatctgttatgctagtggtttaataggcttgctatgtaagtagaacgtggctcaactagatatctttatatgtatgggcattactctta

SEQ ID NO: 4310 - DNA, 328 bp, Homo sapiens
agaaaaagcgccagtgaagaaatctatacgagatactccagccaaaaatgcacaaaagtcaaatcagaatggaaaagactcaaaaccatcatcaacaccaagatcaaaaggacaagaatccttcaagaaacaggaaaaaaactcctaaaacaccaaaaggacctagttctgtagaagacattaaagcaaaaatgcaagcaagtatagaaaaaggtggttctcttcccaaagtggaagccaaattcatcaattatgtgaagaattgcttccggatgactgaccaagaggctattcaagatctctggcagtggaggaagtctctttaaga

SEQ ID NO: 4311 - DNA, 203 bp, Homo sapiens; identical to SEQ ID NO: 1133

SEQ ID NO: 4312 - DNA, 333 bp, Homo sapiens; identical to SEQ ID NO: 1134

SEQ ID NO: 4313 - DNA, 451 bp, Homo sapiens; identical to SEQ ID NO: 1136

SEQ ID NO: 4314 - DNA, 307 bp, Homo sapiens
tacatgcatagctgggactgtaggtggcaccactacacctggctccttttccatacttaccagctgtatgtattcctgaaaatttataagaatttttagctgggagcggtggctcacacctgtaatcccagcactttggaaggtcgaggcgggtggatcacctgaggtcaggagttcaagaccagcttgaccaacatggtgaaaccctgtctctactaaaaatacaaaaattggccgggtgtggtggctcacgcctataatcccagcactttgggaggccgaggcgggcggatcacaaggtcaggag

SEQ ID NO: 4315 - DNA, 488 bp, Homo sapiens
ggttcttattgctggcggcctgaggagcccatcatggcgacgccccctaagcggcgggcggtggaggccacgggggagaaagtgctgcgctacgagaccttcatcagtgacgtgctgcagcgggacttgcgaaaggtgctggaccatcgagacaaggtatatgagcagctggccaaataccttcaactgagaaatgtcattgagcgactccaggaagctaagcactcggagttatatatgcaggtggatttgggctgtaacttcttcgttgacacagtggtcccagatacttcacgcatctatgtggccctgggatatggttttttcctggagttgacactggcagaagctctcaagttcattgatcgtaagagctctctcctcacagagctcagcaacagcctcaccaaggactccatgaatatcaaagcccatatccacatgttgctataggtgagagcagctcaccccactaccagactctgtgt

SEQ ID NO: 4316 - DNA, 316 bp, Homo sapiens
ctctcccctgggtcttaaattacagtaacatcggccaggcgcggtggctcacgcctgtaatcccagcactttgggaggccgaggagggcggatcacgaggtcaggagatcgagaccatcctgtataacacggtgaaatcccgtctctactaaaaacacaaaaaattagccaggcgtggtggcaggcgcctgtagtcccagctactcgggaggctgaggcaggagaatggcatgaacccgggaggcggagcttgcagtgaaccgagatcatgccactactgcactccagcctgggtgacagagtgagactcagtccc

SEQ ID NO: 4317 - DNA, 384 bp, Homo sapiens
gatgagttataggagaaaaagcttaatgattctgatatgtatccatcaggatccagtctggaaaacagaaaccattctaggtgtttcaacagagggagtttaatacaggaaattgacttacatagatgataaaagagaagccaaacagcaagaagctgttaccacacccagggctatgaggataatgggaagaggtttggtttcctgtgtccagtagtgggatcatccagaggagctggaaccatggtgggggctgcctagtgggagttaggaccaccaatggattgtggaaaatggagccatgacaagaacaaagccactgactgagatggagtgagctgagacagataagagaataccttggtcttacctatcctgccctca

SEQ ID NO: 4318 - DNA, 399 bp, Homo sapiens; identical to SEQ ID NO: 1138

SEQ ID NO: 4319 - DNA, 447 bp, Homo sapiens
cgcacgccttcgccgtagcatctttcgcagcggaccgaagagaagaaaataggccagagccgaactctcttcctgccaagatgtctattggtgtgccgattaaagtactgcatgaggccgagggccacattgtgacatgtgagacgaacaccggtgaggtatatcgggggaagctcattgaagcagaggacaacatgaactgccagatgtccaacatcacagtcacatacagagatggccgagtggcacagctggagcaggtatacatccgtggcagcaaaatccgctttctgattttgcctgacatgctgaagaacgcacccatgttaaagagcatgaaaaataaaaaccaaggctcaggggctggccgaggaaaagctgccattctcaaggcccaagtggccgcaagaggaagaggacgtggaatgggacgtggaaacatctttc

SEQ ID NO: 4320 - DNA, 505 bp, Homo sapiens; identical to SEQ ID NO: 1140

SEQ ID NO: 4321 - DNA, 209 bp, Homo sapiens
cgttcatctccatgttcttggaggtcggcaaatgcattggcctcctggttaagcacgttttggggataattttctcttctttaggcaatgattaagttaggcaatttccagtatgttaagtaacacacttatttttgcctgtgtatggagagattcaagaaataattttaaaaccgcatacataataaaagacattgttgcatggctaa

SEQ ID NO: 4322 - DNA, 410 bp, Homo sapiens
gccgaactcgggttctgacaagatggccgggctgccccgcaggatcatcaaggaaacccagcgtttgctggcagaaccagttcctggcatcaaagccgaaccagatgagagcaacgcccgttattttcatgtggtcattgctggccctcaggattccccctttgagggagggacttttaaacttgaactattccttccagaagaatacccaatggcagcccctaaagtacgtttcatgaccaaaatttatcatcctaatgtagacaagttgggaagaatatgtttagatattttgaaagataagtggtccccagcactgcagatccgcacagttctgctatcgatccaggccttgttaagtgctcccaatccagatgatccattagcaaatgatgtagcggagcagtgga

SEQ ID NO: 4323 - DNA, 571 bp, Homo sapiens; identical to SEQ ID NO: 1143

SEQ ID NO: 4324 - DNA, 497 bp, Homo sapiens
gaaacggctttgtccgccacaacgtggggcacctgagcagaatctacccggctggatggagaacagactcctccaactacagccccgtggagatgtggaatgggggctgccagatcgtggccctgaatttccagacacctgggccagagatggacgtgtaccagggccgcttccaggacaacggggcctgtgggtacgtgctgaagcccgccttcctgcgagaccccaacggcacctttaacccccgcgccctggctcaggggccctggtgggcacggaagcggctcaacatcagggtcatttcggggcagcagctgccaaaagtcaacaagaataagaattcaattgtggaccccaaagtgacagtggagatccatggcgtgagccgggacgtggccagccgccagactgctgtcatcaccaacaatggtttcaacccatggtgggacacggagtttgcgtttgaggtagttgtgcctgaccttgccctcatccgc

SEQ ID NO: 4325 - DNA, 320 bp, Homo sapiens
taagctcggaattcggctcgaggccgtaaagtgaaagagaccggaccagcttcagctttcggactctggttcttggatcgtgtcctctccccctcgccgccctcttcccccaatctgagccattgcaggcctctgcctgctgccccctctctcctcgggatcgggtccccagagccaccatctcctgagcctcccaccccgctgcctgggccctgtggttgctgggcctcccacctcaaggaggggaaggttgtacagcccgaacccgtggagcaatgccctgtctggcctccaaaaccaaaataaaactgggtcacttt

SEQ ID NO: 4326 - DNA, 422 bp, Homo sapiens
cgtacgtaagctcgggaattcggctcgagtcggaagctgctggggcattaggactcatgtgctttctgctccacagtttcagatgccactgcactactaactccccagtgcttttgaggcacgtgttagacatgttctcctctgttggaagtccttgtggcaacttcaagggcttgattcttatcaaatgcttaactactttcaattttgcattcactgaagggatattcttgtgaacttgaggggtatgtgctttttctaatccaagcatctttattatatctttttcccaatatggacgtcttcttgtactttttattctggtaacaatatgcagtttatgagggttctgtggatccccacctcgagccgctcgagccgaattcccgagcttggatcctctagagcggccgccgactagt

SEQ ID NO: 4327 - DNA, 439 bp, Homo sapiens
accaccatcagctccaggcttctatcctgctaacccagtaacccagtgggaaagagatttacttattccaataattccaagtggagagtgtcattgacccgtttggggtctcatctctacttctaggggaatgaaacactctgagtggccaggcctgtgtcatgtgctaattcctagagccagggaaataaggtctgaggattcaggatggggtgaaaggtggttgcttaaaggaaaatgaaatacaattagcagaataaggggaaacgagtggtctgctctgctcgggcaaaacaagagatgcccattactgtgagggacccttgaagtctggactcttaaatgggtttttgctgatttcctgggtgcatgctaggatgatggggcttgatgcagtagggaagagacgatgtaaaaataataaacaatatataccttc

SEQ ID NO: 4328 - DNA, 459 bp, Homo sapiens
cctcttccccgggccatttctgagagtggcgtggccctcacttctgttctggtgaagaaaggtgatgtcaagcccttggctgagcaaattgctatcactgctgggtgcaaaaccaccacctctgctgtcatggttcactgcctgcgacagaagacggaagaggagctcttggagacgacattgaaaatgaaattcttatctctggacttacagggagaccccagagagagtcaaccccttctgggcactgtgattgatgggatgctgctgctgaaaacacctgaagagcttcaagctgaaaggaatttccacactgtcccctacatggtcggaattaacaagcaggagtttggctggttgattccaatgttgatgagctatccactctccgaagggcaactggaccagaagacagccatgtcactcctgtggaagtcctatccccttgtttgcattgct

SEQ ID NO: 4329 - DNA, 427 bp, Homo sapiens
tgcaggagtactttggcagtttggcagcttgacttctgcagctggaggaggcccctcaggccggggatctggggagggctagcccaaaacctcccgcatcgggcaggcaccccctgaagtacttccttcagggtttcccctttgtgagggtgtcgagtagcctcaccggcctgtctggaggagcagctggctctgctctgagaaactctggcaagtggacgccattctcttgcccttaggattcactgctctctcctacagccgccaggcctggggtcctgaaaggaccttgggtggtaaagctgtacttggtgggagtgagggcgtggggaggaaccatgcaaatcgccttccatggtttttaaatgcagtaaataacatttctggatgagacttgtttccaaaataaaccagctatatctgtaaa

SEQ ID NO: 4330 - DNA, 475 bp, Homo sapiens
  misc_feature 405: n = A,T,C or G
tcatgaccctatgtgccatgctgcccctgctgttattcacctacctcaactccttcctgcatcagaggatcccccagtccgtacggatcctgggcagcctggtggccatcctgctggtgtttctgatcactgccatcctggtgaaggtgcagctggatgctctgcccttctttgtcatcaccatgatcaagatcgtgctcattaattcatttggtgccatcctgcagggcagcctgtttggtctggctggccttctgcctgccagctacacggcccccatcatgagtggccagggcctagcaggcttctttgcctccgtggccatgatctgcgctattgccagtggctcggagctatcagaaagtgccttcggctactttatcacagcctgtgctgttatcattntgaccatcatctgttacctgggcctgccccgcctggaattctaccgctactaccagcagctcaagcttga

SEQ ID NO: 4331 - DNA, 524 bp, Homo sapiens
tgattcacactggagagaagccttataaatgcaacaagtgtacaaaagcctttggttgtagttcacggcttattcgccatcagagaactcacactggagaaaaaccatttaaatgtgatgagtgtggcaaaggctttgttcagggctcacaccttattcagcatcagcgaatccacactggagagaaaccctatgtgtgtaatgactgtggaaaagccttcagtcagagttccagccttatttaccatcagagaatccataaaggagagaagccctacgaatgcctccaatgcggaaaagccttcagtatgagcacacagcttacaatacatcaaagggttcacactggagagaggccctataaatgtaatgaatgtgggaaagccttcagtcaaaactcaacccttttccaacaccagataattcatgcaggggtgaagccctatgagtgcagtgagtgtggaaaagccttcagccggagctcatatcttattgaacaccagagaatacacactagggcccag

SEQ ID NO: 4332 - DNA, 624 bp, Homo sapiens
gcagctcctgccactccgccagggccagcatgccagtccaggcagagcaggtggctggctgtctggccgtctcgccccgcccctccacaggaccctggaccagggcggtgcagggcgcagccccgaggaggcaggtggaggagctgcgggttttcacagggccgcgtcgccacggctcctctgatcctttagggttggcgagcatctctggaaatagcttttgcagaggagtggtgggaggaatagagggggacagtctgtcacctccctccccgccactttgtgtagatcctacctggagggaatggctttaggcacttttgtgccagagcttgtgagggtgacagaagagggtccaggctggaaacctgaactttctgggtgggagaaccaggtggtgcctgccgaggtctgggcgtgtttgggccggtgctggagcctgtccagctggcccgggccctggcctggttctcaagtgtttcctagacagagaggcacctgggtcagtattagtctatttatcagaggtgtaaataatctatgtatagtttttctccttttagattattttgtatttgtttaaaagaagttttgtcaaaatacaaaaatataaagaaatgactg

SEQ ID NO: 4333 - DNA, 284 bp, Homo sapiens; identical to SEQ ID NO: 3318
  misc_feature 52: n = A,T,C or G

SEQ ID NO: 4334 - DNA, 422 bp, Homo sapiens; identical to SEQ ID NO: 3319

SEQ ID NO: 4335 - DNA, 575 bp, Homo sapiens; identical to SEQ ID NO: 550

SEQ ID NO: 4336 - DNA, 461 bp, Homo sapiens
agtgtcccagccgggttcgtgtcgccatggggcagatcgagtgggccatgtgggccaacgagcaggcgctggcgtccggcctgatcctcatcaccgggggcatcgtggccacagctgggcgcttcacccagtggtactttggtgcctactccattgtggcgggcgtgtttgtgtgcctgctggagtacccccgggggaagaggaagaagggctccaccatggagcgctggggacagaagcacatgaccgccgtggtgaagctgttcgggccctttaccaggaattactatgttcgggccgtcctgcatctcctgctctcggtgcccgccggcttcctgctggccaccatccttgggaccgcctgcctggccattgcgagcggcatctacctactggcggctgtgcgtggcgagcagtggacgcccatcgagcccaagccccgggagcggccgccgactagt

SEQ ID NO: 4337 - DNA, 596 bp, Homo sapiens; identical to SEQ ID NO: 3321

SEQ ID NO: 4338 - DNA, 664 bp, Homo sapiens; identical to SEQ ID NO: 551

SEQ ID NO: 4339 - DNA, 521 bp, Homo sapiens; identical to SEQ ID NO: 2841

SEQ ID NO: 4340 - DNA, 529 bp, Homo sapiens; identical to SEQ ID NO: 3323

SEQ ID NO: 4341 - DNA, 441 bp, Homo sapiens
ccaggactcagcccatcctgaggaggacacgtgtcctcatggagagggtgctccggcccaggcgggggagtcggtgcccagtcagcagctctgccaccatcctgctgggaactgggggggcctctattgggttataggcaaggccttttctctggcatggaattgttaattttctgacacgtctagatgtgaaatttctgaaaatgttgaagcagagaaacattcacacacaaaaagcaacatagtcatgtgggtccagatggcctcagtcctagatgttggcaccctttgctgtgtctcctcagagtatcctgttccgcctcctgccacctggacctccctcagtggatgtcttccctcccccgaccccagcctgtcagtccgagcacagtgcaggtttggctctgacttgggcctttggctgcagtgggggtggatttc

SEQ ID NO: 4342 - DNA, 447 bp, Homo sapiens; identical to SEQ ID NO: 3326

SEQ ID NO: 4343 - DNA, 184 bp, Homo sapiens
gtaaagcaatacttgctttgaagaatcagatttcgactcggtctgctgatctgaggtttttagattttaaatatttatgtggaattaattaaaggtagttggctatatcgctatcatttcattcttttgacattatttgaatattttactggaaaataagactaataaattgttaaaagttttt

SEQ ID NO: 4344 - DNA, 324 bp, Homo sapiens
ctgcagtggcaatagtgttaaaaaatctcattctcatgatttttggctctagctaggaatagtttagtcaggactcagaaaatttgagcttagttctgggattatgaaaacatggggacaaaaacaataacttgtggatgtctggttcctgctgtctgcagccaggtatctcaggttgcaatggtcagaagtcccagtgagggagctagaaacagagctatctgttcctcatagtgccagtgtgtttacatttataggaccacatatccctggtttctgggggagggtttcactgttacatcaccaagaggccctgaaaagagg

SEQ ID NO: 4345 - DNA, 297 bp, Homo sapiens
ccaaatcattatcttgctgcattttaccctatcatagcacactcccaatttctttcatgagtcattggtaatgagagttctgagtacttgttaatcttgctgtacttgtcaatttaaagcagtatcgttttcaaaacaaagcttgattatcattgacctgaactgagagttctttatttagtgctcaataattacatttaacgacttaagttcttaaaaatttaaagtttgattatactttggaggatcacagattgttccataaccttaagcctccaactatttccgactttcact

SEQ ID NO: 4346 - DNA, 377 bp, Homo sapiens; identical to SEQ ID NO: 3327

SEQ ID NO: 4347 - DNA, 526 bp, Homo sapiens
taagctcgggaattcggtcgagcggctgggaagtcagttcgttctctcctctcctctcttcttgtttgaacatggtgcggactaaagcagacagtgttccaggcacttacagaaaagtggtggctgctcgagcccccagaaaggtgcttggttcttccacctctgccactaattcgacatcagtttcatcgaggaaagctgaaaataaatatgcaggagggaaccccgtttgcgtgcgcccaactcccaagtggcaaaaaggaattggagaattctttaggttgtcccctaaagattctgaaaaagagaatcagattcctgaagaggcaggaagcagtggcttaggaaaagcaaagagaaaagcatgtcctttgcaacctgatcacacaaatgatgaaaaagaatagaactttctcattcatctttgaataacgtctccttgtttaccctggtattctagaatgtaaatttacataaatgtgtttgttccaattagctttgttgaacaggcatttaattaaaaaat

SEQ ID NO: 4348 - DNA, 550 bp, Homo sapiens; identical to SEQ ID NO: 3328

SEQ ID NO: 4349 - DNA, 509 bp, Homo sapiens; identical to SEQ ID NO: 3330

SEQ ID NO: 4350 - DNA, 593 bp, Homo sapiens; identical to SEQ ID NO: 3331

SEQ ID NO: 4351 - DNA, 537 bp, Homo sapiens; identical to SEQ ID NO: 3332

SEQ ID NO: 4352 - DNA, 564 bp, Homo sapiens
aagctcggaattcggctcgaggcaggagcggctgcatgacattgagagcaaagggctgcagcccactcccatgactttggtgttcggctgccgatgctcccaacttgaccatctctaccgcgacgaggtgcagaacgcccagcagcgcggggtgtttggccgagtcctcaccgccttctcccgggaacctgacaaccccaagacctacgtgcaggacatcctgaggacggagctggctgcggaggtgcaccgcgtgctgtgcctcgagcggggccacatgtttgtctgcggcgatgttaccatggcaaccaacgtcctgcagaccgtgcagcgcatcctggcgacggagggcgacatggagctggacgaggccggcgacgtcatcggcgtgctgcgggatcagcaacgctaccacgaagacattttcgggctcacgctgcgcacccaggaggtgacaagccgcatacgcacccagagcttttccttgcaggagcgtcagttgcggggcgcagtgccctgggcgttcgaccctcccggctcagacaccaacagcccctgagagcc

SEQ ID NO: 4353 - DNA, 503 bp, Homo sapiens
agcccttctgtggcctgccagcgccagcacttggcctgtgcccgctgcctgctggaagggcggccagagccaggcagaggaacatctcactctctggacctccagctgcaaaactggcaaggtctggcttgtctccacattgccacccttcagaagaaccaaccactcatggaattgctgcttcggaatggagctgacattgatgtgcaggagggcaccagtggtaagacagcgctgcacctggctgtggaaacccaagagcggggcctggtacagttcctgctccaggctggtgcccaggtagatgcccgcatgctgaacgggtgcacacccctgcacctggcagctggccggggtctcatgggcatctcatccactctgtgcaaggcgggtgctgactccctgctgcggaatgtggaggatgagacgccccaggacctgactgaggaatcccttgtccttttgccctttgatgacctgaagatctcagggaaactgctgct

SEQ ID NO: 4354 - DNA, 544 bp, Homo sapiens
tgtctgacacagtctggcattgctggaggatacaaaccttttaacctggagacttgccggcttatggtttcaatgctggatagagatatgtctggcacaatgggtttcaatgaatttaaagaactctgggctgtactgaatggctggagacaacactttatcagttttgacactgacaggagtggaacagtagacccacaagaattgcagaaggccctgacaacaatgggatttaggttgagtccccaggctgtgaattcaattgcaaaacgatacagcaccaatggaaagatcaccttcgacgactacatcgcctgctgcgtcaaactgagggctcttacagacagctttcgaagacgggatactgctcagcaaggtgttgtgaatttcccatatgatgatttcattcaatgtgtcatgagtgtttaaatcaagaggaagctgcatgaatgtaatcaacattccaactggagctctcctttgcttgtcctctttgccttcggtaatatgtataaacttacatcacgactttctcttacagctg

SEQ ID NO: 4355 - DNA, 269 bp, Homo sapiens
tgcccttcttatcagcatctatctagctacattctgacaggataactgcaaactgaatgattcctgggcatcataatggatgtttctttctacttaggtgtctcccctcctctctgcttatatctagcatgcctgttttgggtggtccctggggttgtgggatttcccaggggctacccttcctgctcttggctagatatctgccttctctaacaatgtcatcaaagattacactttgggaacaggcattttcaaggatacacagcttc

SEQ ID NO: 4356 - DNA, 349 bp, Homo sapiens
tccatatcggctggctgatggtccaggcccatctgtgggtgttcaatgaggaagaccctattcacctgaagtgtcacagatggaagaacactgctctgataaggtcacatatttacagaatggcaaaggcggaagtatttttcatcataattctgacttctacattccaaaagccacactcaaagacagcggctcctacttctgcagggggctttttgggagtaaaaatgtgtcttcagagactgtgaacatcaccatcactcaaggtttggcagtgtcaaccatctcatcattctttccaccctgggtaccaagtctctttctgcttggtgatggtactcctttttgc

SEQ ID NO: 4357 - DNA, 313 bp, Homo sapiens
caacacaaagtatgttgtttgttgttagagggcttgggacatttcactctttgccagcctcagcttaatccaggagacaaagattattttccttattatctcttctgcataggatctgcaatcagaactattgaacttctccattcagaccgccactcacacctatgggaaaagggtaatgtatcatcggcttagcaacagggaatactattcgtatgatggaaaatggggacaaaaggctttggtacataaaacattattccttccttggcctaaaaactcatcgccacctacattaaagctaatatgcctg

SEQ ID NO: 4358 - DNA, 382 bp, Homo sapiens
cacatgaattttttgatgttcttcctgtgcataaattacagaaaaacaccacagggatggcgagaagtatttgttgacattgatccacaggtttctgataaactgaggtttgttttggcaccttctgccaccccagcagaagccttcatacaacatgacgaaacaagggatcatgttgaagtgtgtcctgatgctggtgttatcatcgaggaactttctcaacgcattgcattaactggaggtgctgcactggttgctgattatggtcatgatggaacaaagacagataccttcagagggttttgcgaccacaagcttcatgatgtcttaattgccccaggaacagcagatctaacagctgatgtggacttcagttatttgc

SEQ ID NO: 4359 - DNA, 547 bp, Homo sapiens; identical to SEQ ID NO: 3333
  misc_feature 123: n = A,T,C or G

SEQ ID NO: 4360 - DNA, 364 bp, Homo sapiens
acagacataccctatgccactgctcgagccttcaagacattcgtgaggcttacaagaagtacattactgcccatggactgccgcccactgcctcagccctgggccccggcccgccacctcctgagcccctccctggctctgggccccgagccttgcgccagaaaattgtcattaaatgaagagatgtctagtcctcagaaacttctttcctgccctgattggggctcttgctgttccgtttcttctccctgcttctcccctttgtcatctctgatctttgcctaatctgtttctttttccttttcccctagttcttacaggtttcgttgtgttttttaatctaataaaatagaaagatcccttt

SEQ ID NO: 4361 - DNA, 159 bp, Homo sapiens
ggaatacaactgcctgagccagccagggacagcgtctcctcagggcacttggattggggaagacatattccctcctctgctgcctcccactgaacaggacctcactaaacttctcctggaggggcaaggagagtcagggggagggtccttgggggcaca

SEQ ID NO: 4362 - DNA, 1416 bp, Homo sapiens
cgttgaagacattgtcgggtggtgggagaggtatcggcaggggcagcgctgccgccggggcctggggctgacccgtctgacttcccgtccgtgccgagcccactcgagccgcagccatgtctggggacgagatgatttttgatcctactatgagcaagaagaaaaagaagaagaagaagccttttatgttagatgaggaaggggatacccaaacagaggaaacccagccttcagaaacaaaagaagtggagccagagccaactgaggacaaggatttggaagctgatgaagaggacactaggaaaaaagatgcttctgatgatctagatgacttgaacttctttaatcaaaagaaaaagaagaaaaaaactaaaaagatatttgatattgatgaagctgaagaaggtgtaaaggatcttaagattgaaagtgatgttcaagaaccaactgaaccagaggatgaccttgacattatgcttggcaataaaaagaagaaaaagaagaatgttaagttcccagatgaggatgaaatactagagaaagatgaagctctagaagatgaagacaacaaaaaagatgatggtatctcattcagtaatcagacaggccctgcttgggcaggctcagaaagagactacacatacgaggagctgctgaatcgagtgttcaacatcatgagggaaaagaatccagatatggttgctggggagaaaaggaaatttgtcatgaaacctccacaagtcgtccgagtaggaaccaagaaaacttcttttgtcaactttacagatatctgtaaactattacatcgtcagcccaaacatctccttgcatttttgttggctgaattgggtacaagtggttctatagatggtaataaccaacttgtaatcaaaggaagattccaacagaaacagatagaaaatgtcttgagaagatatatcaaggaatatgtcacttgtcacacatgccgatcaccggacacaatcctgcagaaggacatacgactctatttcctacagtgcgaaacttgtcattctagatgttctgttgccagtatcaaaaccggcttccaggctgtcacgggcaagcgagcacagctccgtgccaaagctaactaatttgctaatcactgattttgcaaagcttgttgtggagatgtggctggacaggtttgccatcagagtggatataccgttgtattaaaaacaagataaaaaagctgccaagatttttggcgagtggttggtctgaagtccttgcaagacgctgatgctcaagctgttgacatactcattgcctactttaacacctgtcagagaaacgtgatatggggtaaggaggtgcttttttaaaatcgttcatagacttctgtaaaatgcaagataaattaaagttattataacagtgattctttca

SEQ ID NO: 4363 - DNA, 509 bp, Homo sapiens; identical to SEQ ID NO: 3340

SEQ ID NO: 4364 - DNA, 359 bp, Homo sapiens; identical to SEQ ID NO: 3341

SEQ ID NO: 4365 - DNA, 121 bp, Homo sapiens
taaagatttatttctagtttgtgtatttgtatgttgtaagcgtttcctaatctgtgtatatctagatgtttttaataagatgttctattttaaactatgtaaattgactgagatataggag

SEQ ID NO: 4366 - DNA, 188 bp, Homo sapiens
ccaaatctgaacagtcactgtaaatcattcttaagcccagatatgagaacttctgctggaaagtgggaccctctgagtgggtggtcagaaaatacccatgctgatgaaatgacctatgcccaaagaacaaatacttaacgtgggagtggaaccacatgagcctgctcagctctgcataagtaattcat

SEQ ID NO: 4367 - DNA, 561 bp, Homo sapiens
cactaggatgcagatggaccacactttgagaaacaccacccatttctactttttgcaccttattttctctgttcctgagcccccacattctctaggagaaacttagaggaaaagggcacagacactacatatctaaagctttggacaagtccttgacctctataaacttcagagtcctcattataaaatgggaagactgagctggagttcagcagtgatgcttttagttttaaaagtctatgatctggacttcctataatacaaatacacaatcctccaagaatttgacttggaaaaaaatgtcaaaggaaaacaggttatctgcccatgtgcatatggacaaccttgactaccctggcctggcccgtggtggcagtccagggctatctgtactgtttacagaattactttgtagttgacaacacaaaacaaacaaaaaaggcataaaatgccagcggtttatagaaaaaacagcatggtattctccagttaggtatgccagagtccaattcttttaacagctgtgagaatttgctgcttcattccaacaaaattttattt

SEQ ID NO: 4368 - DNA, 507 bp, Homo sapiens
cgaattcggctcgagcggctcgagggggatgacaatttgcctggaataaacagcatgttacagcggaaaattgcagagctcgaggaagaacagtcccagggctccaccacaaatagtgactggatgaaaaacctcatctcccctgacttaggagttgtatttctcaatgtacctgaaaatctcaaaaatccagagccaaacatcaagatgaagagaagcatagaagaagcctgcttcactctccagtacctaaacaaattgtccatgaaaccagaacctctgtttagaagtgtaggcaatactattgatcctgtcattcttttccaaaaaatgggagtaggtaaacttgagatgtatgtgcttaatccagtcaagagcagcaaggaaatgcagtattttatgcagcagtggactggtaccaacaaagacaaggctgaattcattctgcctaatggtcaagaagtagatctcccgatttcctacttaacttcagtctcatctttgatt

SEQ ID NO: 4369 - DNA, 86 bp, Homo sapiens
agccccccaccaggatcaagaaggagccccagagtccccgcacagacccggccctgtcctgcagcaggaagccgccactcccctac

SEQ ID NO: 4370 - DNA, 310 bp, Homo sapiens; identical to SEQ ID NO: 3342

SEQ ID NO: 4371 - DNA, 527 bp, Homo sapiens
tcggctcgagtgctgctctacatcctccttcggaatggtgtgagtgaggagaacctggccaagctgatccagcatgccaatgtacaggcgcacagcagcctcatccgtaacctggagcagctgggaggcactgtcaccaaccccgggggctcggggacctccagccggctggagccgagagaacgcatggagcccacctatcagctgtcccgctggaccccggtcatcaaggatgtaatggaggacgccgtggaggaccggctggacaggaacctgtggcccttcgtatccgaccccgcccccacggccagctcccaggccgctgtcagtgcccgcttcggtcactggcacaagaacaaggctggcatagaagcccgggcgggcccccggctcatcgtgtatgtcatgggcggtgtggccatgtcagagatgagggccgcctatgaggtgaccagggccaccgagggcaagtgggaggtgctcattggctcctcacacatcctcaccccgacccgcttcctggatga

SEQ ID NO: 4372 - DNA, 333 bp, Homo sapiens
ccagccgccgccgttgagggctgagtccttgctgtgggatgtgccagtgtccccaccaacaccaggaatttagaccttttccctgcaccactctcttcatcctgggggctctgttacactaatttgaataaactctcccctttctttgcaacttcccagcaacaataatgattttcttgccaggccgtctcttgctccctaattcatttcccaggaagctgtgatacagggtgaaataaagtcttgtcttagaaaccaggaccctaaaccccacactatgtaatagaaacacatgtgtttttatgtctcaaataaaactattatatcacttgg

SEQ ID NO: 4373 - DNA, 509 bp, Homo sapiens; identical to SEQ ID NO: 3343

SEQ ID NO: 4374 - DNA, 535 bp, Homo sapiens; identical to SEQ ID NO: 3344

SEQ ID NO: 4375 - DNA, 476 bp, Homo sapiens
gtaagctcggaattcggctcgagacccactgatcctggagaaaaggatggagctgaaaaagatggaatgcttgcagagcatgacctgaggagggaggaacgtggtcaactcacacctgcctcttcctgcagcctcacctctacctgcccccatcataagggcactgagcccttcccaggctggatactaagcacaaagcccatagcactgggctctgatggctgctccactgggttacagaatcacagccctcatgatcattctcagtgagggctctggattgagagggaggccctgggaggagagaagggggcagagtcttccctaccaggtttctacacccccgccaggctgcccatcagggcccagggagcccccagaggactttattcggaccaagcagagctcacagctggacaggtgttgtatatagagtggaatctcttggatgcagcttcaagaataaatttttcttc

SEQ ID NO: 4376 - DNA, 596 bp, Homo sapiens; identical to SEQ ID NO: 567

SEQ ID NO: 4377 - DNA, 599 bp, Homo sapiens; identical to SEQ ID NO: 569

SEQ ID NO: 4378 - DNA, 517 bp, Homo sapiens
gtaagctcggaattcgctcgggttagcgaaacctgtctacctgctatagcacactctccgatttgggccatttatgcaccccgcaacctgggatctcaaggagctttaaagtcttaatgggaacttggcattttcctgatgatctttaaaatgtggtcactaaactcaggattggcgtgtgcttttagaacactggagtagcccttgttttagaggctgtgcattgagtatcgaccgtattttgtaaaaggcaagatatcctcccttccaggctggtaacgggtttcaaggggactcttgaggaagtgccccctaaaatagaacacagcaataactgggcttcctgtccccacccccaccccagcagtgctctctggcactgggaactctgctagggagtggtggaagtaggaaggatttgtgtgcaaaggaaaatcgtggttgagtttcactgcagcaggctgacgttgcctgatgtgagagcaagtggccgactggggtgcgggtgcacaggtcg

SEQ ID NO: 4379 - DNA, 509 bp, Homo sapiens; identical to SEQ ID NO: 570

SEQ ID NO: 4380 - DNA, 251 bp, Homo sapiens; identical to SEQ ID NO: 3350

SEQ ID NO: 4381 - DNA, 727 bp, Homo sapiens
taagctcgggaattcggctcgagccgcctgtccttcctgacacctcaccatgtgtacgggaaaatgtgcccgctgtgtggggctctccctcattaccctctgcctcgtctgcattgtggccaacgccctcctgctggtacctaatggggagacctcctggaccaacaccaaccatctcagcttgcaagtctggctcatgggcggcttcattggcgggggcctaatggtactgtgtccggggattgcagccgttcgggcagggggcaagggctgctgtggtgctgggtgctgtggaaaccgctgcaggatgctgcgctcggtcttctcctcggcgttcggggtgcttggtgccatctactgcctctcggtgtctggagctgggctccgaaatggacccagatgcttaatgaacggcgagtggggctaccacttcgaagacaccgcgggagcttacttgctcaaccgcactctatgggatcggtgcgaggcgccccctcgcgtggtcccctggaatgtgacgctcttctcgctgctggtggccgcctcctgcctggagatagtactgtgtgggatccagctggtgaacgcgaccattggtgtcttctgcggcgattgcaggaaaaaacaggacacacctcactgaggctccactgaccgccgggttacacctgctccttcctggacgctcactcccttgctcgctagaataaactgctttgcgctctca

SEQ ID NO: 4382 - DNA, 153 bp, Homo sapiens
tattgtgaccatttttataaaatacatgttcataaaacagatcaacatatttagcttatacagaaataaagttaactcaatccactcacaagagaatttctattttgtaaaaatgtagcttgtatttcagctttaataaaatctgatgtaagg

SEQ ID NO: 4383 - DNA, 233 bp, Homo sapiens
tcctgccacaagttcagactagtcttctgtaggtgagaaagcgcataatgatattaatatccacctcccaaaccccagagtgtgttacattccagggtgataaacctagaggggccttcttcctcttcccagaggaaattcacttacatttcaagataatgaataatttctctcctgaatgggaggaatgggtaggtcaccagcagctttgataaaagcttggaggcttctaa

SEQ ID NO: 4384 - DNA, 288 bp, Homo sapiens
ctgcttagagaccaatcaacggacactggtttttagacctctatcaatcagtagttagcatccaagagactttgcagaggcgtaggaatgaggctggacagatggcggaaacagaggttccctgcgaagacttgagatttagtgtctgtgaatgttctagttcctaggtccagcaagtcacacctgccagtgccctcatccttatgcctgtaacacacatgcagtgagaggcctcacatatacgcctccctagaagtgccttccaagtcagtcctttggaaaccagca

SEQ ID NO: 4385 - DNA, 230 bp, Homo sapiens
  misc_feature 43, 99: n = A,T,C or G
ttctgagacatctttttaaggctcttactgcagctcccctccncaccctcctcttctttgcaaaacagacccaagcagggcaggctcagaccactcgcntctttcagatctttcttgcaattatgataacatgagatttgctgttgtgcttttagagaaaagtctggactcagccacaaactctaataagacctgtacatctgagaacctttcccgttactgcgttttca

SEQ ID NO: 4386 - DNA, 513 bp, Homo sapiens; identical to SEQ ID NO: 3352

SEQ ID NO: 4387 - DNA, 467 bp, Homo sapiens; identical to SEQ ID NO: 3353

SEQ ID NO: 4388 - DNA, 497 bp, Homo sapiens; identical to SEQ ID NO: 3354

SEQ ID NO: 4389 - DNA, 541 bp, Homo sapiens; identical to SEQ ID NO: 575

SEQ ID NO: 4390 - DNA, 383 bp, Homo sapiens; identical to SEQ ID NO: 3356

SEQ ID NO: 4391 - DNA, 130 bp, Homo sapiens
tctctgctgacctctctcagagcgccccttctttggaaatgtgcatagcacctttctacaagagactcttactgtgtcctgagaaagccgtagctcctctcctgcctcacaagggcacggtgcttgcttc

SEQ ID NO: 4392 - DNA, 552 bp, Homo sapiens; identical to SEQ ID NO: 3357

SEQ ID NO: 4393 - DNA, 543 bp, Homo sapiens; identical to SEQ ID NO: 3359

SEQ ID NO: 4394 - DNA, 566 bp, Homo sapiens
taagctcggaattcggctcgaggcgccacatcccaccggcccttacactgtggtgtccagcagcatccggcttcatggggggacttgaaccctgcagcaggctcctgctcctgcctctcctgctggctgtaagtggtctccgtcctgtccaggcccaggcccagagcggtaggcctagacccagcagtccctctctctacctcccagagacctccctgtctccgtctctcccacaccctttccaaacctccctgccgctgacccccctccccacagttcccagcacacactgacctcccctgacccctgtgctgcagattgcagttgctctacggtgagcccgggcgtgctggcagggatcgtgatgggagacctggtgctgacagtgctcattgccctggccgtgtacttcctgggccggctggtccctcgggggcgaggggctgcggaggcagcgacccggaaacagcgtatcactgagaccgagtcgccttatcaggagctccagggtcagaggtcggatgtctacagcgacctcaacacacagaggccgtattacaaatgag

SEQ ID NO: 4395 - DNA, 520 bp, Homo sapiens
tcggctcgagcccctgcatacataaaggtgcaaaccaacaagatggtgatgctgtcctgcgaggctaaaatctccctcagtaacatgcgcatctactggctgagacagcgccaggcaccgagcagtgacagtcaccacgagttcctggccctctgggattccgcaaaagggactatccacggtgaagaggtggaacaggagaagatagctgtgtttcgggatgcaagccggttcattctcaatctcacaagcgtgaagccggaagacagtggcatctacttctgcatgatcgtcgggagccccgagctgaccttcgggaagggaactcagctgagtgtggttgatttccttcccaccactgcccagcccaccaagaagtccaccctcaagaagagagtgtgccggttacccaggccagagacccagaagggcccactttgtagccccatcacccttggcctgctggtggctggcgtcctggttctgctggtttccctgggagtggccatccacctgtgct

SEQ ID NO: 4396 - DNA, 411 bp, Homo sapiens
gctcggaattcggctcgagcccaggtgtctgagcacagcatcatcaaggacttcaccaagcagaaatacccggagcacgccatccacaaggtgctgcagctcatgctgcggcgcggcgagatccagcatcgcatgcagcgcaaggttctctaccgcctcaagtgagtcgcgccgcctcactggactcatggactcgcccacgcctcgcccctcctgccgctgcctgccattgacaatgttgctgggacctctgcctccccactgcagccctcgaacttcccaggcaccctcctttctgccccagaggaaggagctgtagtgtcctgctgcctctgggcgcccgcctctagcgcggttctgggaagtgtgcttttggcatccgttaataataaagccacggtgtgttcaggt

SEQ ID NO: 4397 - DNA, 438 bp, Homo sapiens
taagctcgggattcggctcgagccggggctatgggaacctgtcccccatgatggatcttggtagagacacttccctctgtcatcgtgcccaggaggatgctgcaggtgactacctgcagccctgttctcattcatttggatgccctccagaaatctggggagccatacacctttagagccttttttgctccttatcaagttggcaaggcttggccaattcctgttcaaggctgcattaaaggcatgttcaccatcctggctaatacggtgaaaccccttctctactaaaaatacaaaaaaattagccgggcttggtggcgggtgcctgtagtcccagctactccggaggctgaggcaggggaatggtgtgaacccaggaggcggagcttgcagtgagccgagatcacaccactgcactccagcctgggctcaaaaaag

SEQ ID NO: 4398 - DNA, 75 bp, Homo sapiens
gagcatgaggccctgggaccaggactacgtgcccatgacagacctccgggtggactggttctgatcctctaacac

SEQ ID NO: 4399 - DNA, 79 bp, Homo sapiens; identical to SEQ ID NO: 92
  misc_feature 23: n = A,T,C or G

SEQ ID NO: 4400 - DNA, 276 bp, Homo sapiens
  misc_feature 20, 43, 46, 49, 53, 70, 125, 127, 133, 153, 154, 161, 164,169, 175, 178, 179, 182, 205, 209, 220, 245, 246, 250, 253,254, 255, 257, 259, 262, 263, 266: n = A,T,C or G
tctcttcaggcgtgcaagcnggcccaggccaatggttggggcntanatngtgnctcatcgttcggggganactgaagatacttcatcgctgacctggttgtggggctgtgcactgggcagatcananactganagccccttgccgatctgagnncttggcnaantacanccagcnccnnagntttgaagaggagctgggcagcanggcntaagttgcccngcaggaacttcagaaaaccctttgnncaantannntngnggnnaantcagcccctt

SEQ ID NO: 4401 - DNA, 278 bp, Homo sapiens
gtctggctttgcaacaccttaaacatttattctgtcatagatagtaaagccccatctcagtttatttagtcctgaggttggcagcatggggtttgactatatgagctaaaagatacacaaagagataacgctgtttcataataaacaggaattgactatacaaataggtaaaccagcatatctacctgtatttctcagagtttagatgtgtgctttatgtttacattaaaataaagcctaacgccacagtagatcatctcatactgcattcggatgta

SEQ ID NO: 4402 - DNA, 383 bp, Homo sapiens
caggaacttcacaacttattggaggttgtaagccaatgttgtgaggcttcaagttcagacatcactgagaaatcagatggacgtaaggcagctcatgagaaacagcataacatttttcttgatcagatgactattgatgaagataaattgatagcacaaaatctagaacttaatgaaaccataaaaattggtttgactaagcttaattgctttctggaacaggatctgaaactggatatcccaacaggtacgacaccacagaggaaaagttatttatacccatcaacactggtaagaactgaaccacgtgaacatctccttgatcagctgaaaaggaaacagcctgagctgttaatgatgctaaactgttcagaaaacaacaa

SEQ ID NO: 4403 - DNA, 490 bp, Homo sapiens; identical to SEQ ID NO: 579

SEQ ID NO: 4404 - DNA, 415 bp, Homo sapiens
cggctcgagtgaatgactaaagctttgctactggggctgaggattccggctaccaagacgcaaacactttcactttgagctgggcaaatcttacttggcatcaacttggatggctcgcatatgacaggaaactggattgccaaggcatggcagactgagctggaggaagatgtcagaaatgtttgccctgaaatcagttacggacaaaatgttggctacaacttgaggagaaaaatcacccccaaaggagtggacatttcctaacaattctgtatggaggaaggtggggtaattgcattcgtctgcagtagacacgagttcctcggacctgtataatctcccaaagccaaggtttggtaataatgtagtccccaaatacctgaaagctgtctttaaaaatgcaggtaagcatgtg

SEQ ID NO: 4405 - DNA, 299 bp, Homo sapiens
ttccacaagattcccagagacaggaaaatcctctggctggctaactggaagcatgtaggagaatccaagcgaggtcaacagagaaggcaggaatgtgtggcagatttagtgaaagctagagatatggcagcgaaaggatgtaaacagtgcctgctgaatgatttccaaagagaaaaaaagtttgccagaagtttgtcaagtcaaccaatgtagaaagctttgcttatggtaataaaaatggctcatacttatatagcacttactttgttgcaagtactgctgtaaataaatgctttatg

SEQ ID NO: 4406 - DNA, 393 bp, Homo sapiens
agctggtggacttcctcagcaggggtaatgacacagttgcagggaaccagggccttaggcagtgccattgaatacaccatagagaatgtctttgaaagtgccccaaacccacgggacctgaaaattgtggtcctgatgctgacgggcgaggtgccggagcagcagctggaggaggcccagagagtcatcctgcaggccaaatgcaagggctacttcttcgtggtcctgggcattggcaggaaggtgaacatcaaggaggtatacaccttcgccagtgagccaaacgacgtcttcttcaaattagtggacaagtccaccgagctcaacgaggagcctttgatgcgcttcgggaggctgttgccatccttcgtcagcagtgaaaatgctttttac

SEQ ID NO: 4407 - DNA, 325 bp, Homo sapiens
  misc_feature 33, 43, 72, 124, 171, 206, 235, 243, 250, 254, 274, 286,287, 300, 314: n = A,T,C or G
taaactagtaccacataatgagagtgcatgganactatttganagggattttgcaggatcgtggtcttccanatatcctaatctgttaaatcaattacttgatttacaaccaagtcatagttcnccctacctaattgctttcttgtggatatctatgaagacatgctaganaatcagtgtgacaataaggaagacattcttaatanagcattagagtatgtgaaatcctagctanagaaaagncactatnaganaggatatggagatacttggnagttccttcaanncaacacagacagnaatgactcccaacnatgtacagcat

SEQ ID NO: 4408 - DNA, 593 bp, Homo sapiens; identical to SEQ ID NO: 583

SEQ ID NO: 4409 - DNA, 496 bp, Homo sapiens
taagctcggaattcgaattcctgccagatctggtctctggacactatgggcacacgactcctcccagctctgtttcttgtcctcctggtattgggatttgaggtccaggggacccaacagccccagcaagatgagatgcctagcccgaccttcctcacccaggtgaaggaatctctctccagttactgggagtcagcaaagacagccgcccagaacctgtacgagaagacatacctgcccgctgtagatgagaaactcagggacttgtacagcaaaagcacagcagccatgagcacttacacaggcatttttactgaccaagttctttctgtgctgaagggagaggagtaacagccagaccccccatcagtggacaagggggagagtcccctactcccctgatcccccaggttcagactgagctcccccttcccagtagctcttgcatcctcctcccaactctagcctgaattcttttcaataaaaaatacaattc

SEQ ID NO: 4410 - DNA, 586 bp, Homo sapiens; identical to SEQ ID NO: 3365

SEQ ID NO: 4411 - DNA, 592 bp, Homo sapiens; identical to SEQ ID NO: 2633

SEQ ID NO: 4412 - DNA, 245 bp, Homo sapiens; identical to SEQ ID NO: 584

SEQ ID NO: 4413 - DNA, 235 bp, Homo sapiens
gggaaatgctggagggatccagccagacttgctcatctccctcacagcccccaaaaaatctgcaacccagtttaccggtcgctaccattacctggggggtcgttttgtgccacctgctctggaaaagaagtaccagctgaacctgccaccctaccctgacactgagtgtgtctatcgtctgcagtgagggaaggtgggtgggtattctccccaataaagacttagagcccctctc

SEQ ID NO: 4414 - DNA, 239 bp, Homo sapiens
cttagtcctttattaacaacttcaaggtgcaaatttgtgagattccagacaggcagttcaatgagcagctggattttgctggttcccaagagcaaggaaaattcccttgttttaaaaagccagatccatttggaatagtctttcttccccacatattacagcatgaacgtgactctaaagtacctgccgagggtctttctttttgtgacggtgggcgctgttccccactgtcgtggact

SEQ ID NO: 4415 - DNA, 257 bp, Homo sapiens
aaaaaggagtcattgattttatttgctgttccaaaatccaggaaatgttggagtttcttttatcaggcctcaaagcagaagaataattctccgtggttcttggctctaccctctagactcttggttttgtcttctgagtcttcctttttcatcaaagctagagtgtgtttttacctgagttcttttctcaggctgcttctttccagtagaattttaggggaactagtggtctctatttgtactgtttctgtcctttt

SEQ ID NO: 4416 - DNA, 602 bp, Homo sapiens
gctggtgcccgccttcctcctcatcggctggggacgttctctgcccgtgctgggcctggggctgctgctctactcctttgccgccgccgttgtggtgccctgcctgtcctccgtggtcgctggctatggctcaccagggcagaagggcacggtcatgggtacactgcgcagcctaggtgctctggccagggccgcggggcccctggtggccgcttcagtgtactggctggccggggcccaggcctgcttcaccacgtggtccgggctctttttgctccccttcttcctcctgcagaagctgagttacccggcacagacgctcaaggctgagtagctgagccactgtgcccaggctgtgggcaccaggcagagtgggagcctaggtcaggcccctgcccactgcctgacccccaccccccgccagtccagggagaccctgtgggtgggggccggcccctaagcaggaagctcaggcagctcctccagacttacttactccttcagtgactccgagctgcagcactccaaggctgtcagggcttctgtttgttttttaaactatgcaccaggtttctgatgatgaaataaagcacctgtttgtt

SEQ ID NO: 4417 - DNA, 563 bp, Homo sapiens
ccacccaccctgagagcaaccagggcatgctgacaaccaggaagggtttggattttgaggccaaaaaccagcacaccctgtacgttgaagtgaccaacgaggccccttttgtgctgaagctgccaacctccacagccaccataatggtccacgtggaggatgtgaatgaggcacctgtgattgtcccaccctccaaagatcgctgaggtccacgagggcatccccactggggagcctgtgtgtgtctacactgcagaagaaccctgacaaggagaatcaaaagatcagctaccgcatcctgagagacccagcagggtggctagccatggacccagacagtgggcaggtcacagctgtgggcaccctcgaccgtgaggatgagcagtttgtgaggaacaacatctatgaagtcatggtcttggccatggacaatggaagccctcccaccactggcacgggaacccttctgctaacactgattgatgtcaatgaccatggcccagtccctgagccccgtcagatcaccatctgcaaccaaagccctgtgcgccaggtgctgaaca

SEQ ID NO: 4418 - DNA, 486 bp, Homo sapiens
ggctcgagggggcagcaatgggaccatctgtgacaaccagagggactgccagccggggctgtgctgtgccttccagagaggcctgctgttccctgtgtgcacacccctgcccgtggagggcgagctttgccatgaccccgccagccggcttctggacctcatcacctgggagctatagcctgatggagccttggaccgatgcccttgtgccagtggcctcctctgccagccccacagccacagcctggtgtatgtgtgcaagccgaccttcgtggggagccgtgaccaagatggggagatcctgctgcccagagaggtccccgatgagtatgaatttggcagcttcatggaggaggtgcgccaggagctggaggacctggagaggagcctgactgaagagacggcgctgggggagcctgcggctgccgccgctgcactgctgggaggggaagagatttagatctggaccatgctgtgggtagatgt

SEQ ID NO: 4419 - DNA, 511 bp, Homo sapiens; identical to SEQ ID NO: 3369

SEQ ID NO: 4420 - DNA, 553 bp, Homo sapiens; identical to SEQ ID NO: 3371

SEQ ID NO: 4421 - DNA, 401 bp, Homo sapiens; identical to SEQ ID NO: 3372

SEQ ID NO: 4422 - DNA, 595 bp, Homo sapiens; identical to SEQ ID NO: 3373

SEQ ID NO: 4423 - DNA, 571 bp, Homo sapiens
  misc_feature 460: n = A,T,C or G
tgcgctctttgatcttgatattatgtccatcagatggacaatgcgcaggacctgctttcctttggtggtcttcaagtggtgatcaatgggctgaacagcacagagcccctcgtgaaggagtatgctgcgtttgtgctgggcgctgccttttccagcaaccccaaggtccaggtggaggccatcgaagggggagccctgcagaagctgctggtcatcctggccacggagcagccgctcactgcaaagaagaaggtcctgtttgcactgtgctccctgctgcgccacttcccctatgcccagcggcagttcctgaagctcggggggctgcaggtcctgaggaccctggtgcaggagaagggcacggaggtgctcgccgtgcgcgtggtcacactgctctacgacctggtcacggagaagatgttcgccgaggaggaggctgagctgacccaggagatgtccncagagaagctgcagcagtatcgccaggtacacctcctgccaggcctgtgggaacagggctggtgcgagatcacggcccacctcctggcgctgcccgagcatgatgcccgtg

SEQ ID NO: 4424 - DNA, 296 bp, Homo sapiens
ggaaaagaacatctcagccgggcgtggtggttcacgcctggaatcccagcacttgaggccaggagttccagagcagcctgggcaacgcagtgagagaccccatctctacaaaaaaaaaaaaaaaaaaaaaaaatggaaaatcccgggttaaaaatttcttaacccccaaagggaaccattcccttttaaaacccaccaaaaccaacaattggcttttaaacccaaatcttaaatttttcaaaaaaattttaaggtaccggggtttttttttttaaaaaaaataaaaaaaattttgg

SEQ ID NO: 4425 - DNA, 453 bp, Homo sapiens
ccgagggtgtcctggccaacgtgctgggcctgctgctggcctgcttcggtggggcggtgctctacatcttgacccgggccgactggaagcggccttcccaggcggaagagcaggccctctccatggacttcaagacgctgacggagggagatagccccggctcccagtgatgcgcccggccggccctgggggttcgcggggtgtcttcttgcctgcccctgctgaggcgtcttcaggactgcaggctccggagagtggctctggcagcaggcgggcgcgtgggtgcagctgcatctgtttgagtgctgctttctggggtcaggtctccgcctcctctgcttctcctttctccgctgctatagaccagttcattgtgtgtggctcccgtgtctctgttgcccccttcagtgcagaaggctttgggtaggacttcgggtgttcggtcctggtcgc

SEQ ID NO: 4426 - DNA, 424 bp, Homo sapiens; identical to SEQ ID NO: 591

SEQ ID NO: 4427 - DNA, 446 bp, Homo sapiens; identical to SEQ ID NO: 592

SEQ ID NO: 4428 - DNA, 529 bp, Homo sapiens; identical to SEQ ID NO: 3374

SEQ ID NO: 4429 - DNA, 341 bp, Homo sapiens; identical to SEQ ID NO: 594

SEQ ID NO: 4430 - DNA, 317 bp, Homo sapiens
  misc_feature 230: n = A,T,C or G
gtacttgtgtgtacttgttggtctgtatcttagtttctttggggaggacagggctgtagctgtgaggtcttgtctccagggtgtgtgtatgtctccgtggatcagccacagggatagggattttgtttttaagggaaagcattctctaattccctttgttcatgccgagattcagttgctctgagactatggggtacaagtttgatcctccgaatctggagatgttgtanagctggaacgagtgcagagtaggaacgctttgatgcgcatgcacattggggaagatgcgctcctcagggacacaaaggccgagtggg

SEQ ID NO: 4431 - DNA, 517 bp, Homo sapiens; identical to SEQ ID NO: 3375

SEQ ID NO: 4432 - DNA, 345 bp, Homo sapiens
ggtaataaatgaaaattggctaaacttctaattgcactaagtaaattattacctaatattctttgtgtgcttttcttacctgattatgctatgaattaattttgtgaatttcttattatttaaatgtttcactctgacctgtgtcagtatgtttgccatttttagttgcttggttgtttttgttagaaagtaaaatgtattgttgcaccatgcatttgttatgtgtataaaattttttacttcacaaaactgtctataggcaattagcaattagtattaagaagttgtataaattgaaatcactttcatatactaaaaactgtaaaatgagagttattacaaaag

SEQ ID NO: 4433 - DNA, 258 bp, Homo sapiens
gagccaaactatttaaattttaaaacagtaaaacaaaatgaaacttaatagctcacaaaattccagtccatgtttcatgacttattttagtcaatgaattttctatttatactaaacatatggacattttaaatgtgtttctaatatttttgattatctataatgtgcctgtcttcaattcacaagattgggttataacaattatttgccagattaacactagggaattatttgataaccagcttatcttatcagtag

SEQ ID NO: 4434 - DNA, 178 bp, Homo sapiens
tgggggaggctggggtgggggtaacaacagagggaagatgccctcagctcccaccaaggagcataaataaaaagagaattgaccccccaggaccctttaatagcccaccagagttgccaccaaacagtgtaaaaacgtgtggtttttactattctgatgaaaataatggatgttctgt

SEQ ID NO: 4435 - DNA, 552 bp, Homo sapiens
taagctcggaattcggctcgagtctggctgcacctggcatgactgtttgtttctccaagcctgctttgtgcttctcacctttgggtgggatgccttgccagtgtgtcttacttggttgctgaacatcttgccacctccgagtgctttgtctccactcagtaccttggatcagagctgctgagttcaggatgcctgcgtgtggtttaggtgttagccttcttacatggatgtcaggagagctgctgccctcttggcgtgagttgcgtattcaggctgcttttgctgcctttggccagagagctggttgaagatgtttgtaatcgttttcagtctcctgcaggtttctgtgcccctgtggtggaagagggcacgacagtgccagcgcagcgttctgggctcctcagtcgcaggggtgggatgtgagtcatgcggattatccactcgccacagttatcagctgccattgctccctgtctgtttccccactctcttatttgtgcattcggtttggtttctgtagttttaatttttaataaagttgaataaaatata

SEQ ID NO: 4436 - DNA, 594 bp, Homo sapiens
gaattcctgcagtgccaaatatggcgtgggcttctggaagcctggatctggaatcattcaccagattattctggaaaactatgcgtaccctggtgttcttctgattggcactgactcccacacccccaatggtggcggccttgggggcatctgcattggagttgggggtgccgatgctgtggatgtcatggctgggatcccctgggagttgaagtgccccaaggtgattggcgtgaagctgacgggctctctctccggttggtcctcacccaaagatgtgatcctgaaggtggcaggcatcctcacggtgaaaggtggcacaggtgcaatcgtggaataccacgggcctggtgtagactccatctcctgcactggcatggcgacaatctgcaacatgggtgcagaaattggggccaccacttccgtgttcccttacaaccacaggatgaagaagtacctgagcaagaccggccgggaagacattgccaatctagctgatgaattcaaggatcacttggtgcctgaccctggctgccattatgaccaactaattgaaattaacctcagtgagctgaagccacacatcaatgggcc

SEQ ID NO: 4437 - DNA, 567 bp, Homo sapiens
tggtcatcgccgcgctttcggtggcgggcaacgtgctggtgtgcgccgcggtgggcacggcgaacactctgcagacgcccaccaactacttcctggtgtccctggctgcggccgacgtggccgtggggctcttcgccatcccctttgccatcaccatcagcctgggcttctgcactgacttctacggctgcctcttcctcgcctgcttcgtgctggtgctcacgcagagctccatcttcagccttctggccgtggcagtcgacagatacctggccatctgtgtcccgctcaggtataaaagtttggtcacggggacccgagcaagaggggtcattgctgtcctctgggtccttgcctttggcatcggattgactccattcctggggtggaacagtaaagacagtgccaccaacaactgcacagaaccctgggatggaaccacgaatgaaagctgctgccttgtgaagtgtctctttgagaatgtggtccccatgagctacatggtatatttcaatttctttgggtgtgttctgcccccactgcttataatgctggtgatctacatta

SEQ ID NO: 4438 - DNA, 376 bp, Homo sapiens; identical to SEQ ID NO: 3378

SEQ ID NO: 4439 - DNA, 1083 bp, Homo sapiens
cagcatggtgtgtctgaggctccctggaggctcctgcatggcagttctgacagtgacactgatggtgctgagctccccactggctttggctggggacaccagaccacgtttcttggaggaggttaagtttgagtgtcatttcttcaacgggacggagcgggtgcggttgctggaaagacgcgtccataaccaagaggagtacgcgcgctacgacagcgacgtgggggagtaccgggcggtgacggagctggggcggcctgatgccgagtactggaacagccagaaggacctcctggagcggaggcgtgccgcggtggacacctactgcagacacaactacggggttggtgagagcttcacagtgcagcggcgagttcaacctaaggtgactgtgtatccttcaaagacccagcccctgcagcaccacaacctcctggtctgttctgtgaatggtttctatccaggcagcattgaagtcaggtggttccggaacggccaggaagagaagactggggtggtgtccacgggcctgatccagaatggagactggaccttccagaccctggtgatgctggaaacagttcctcagagtggagaggtttacacctgccaagtggagcacccaagtgtgatgagccctctcacagtggaatggagagcacggtctgaatctgcacagagcaagatgctgagtggagtcgggggctttgtgctgggcctgctcttccttggggccgggctgttcatctacttcaggaatcagaaaggacactctggacttccgccaacaggattcctgagctgaagtgcagatgaccacattcaaggaagaacctactgccccagctttgcaggatgaaaagctttgctgcctggctgttattcttccgcaagagagggctttctcaggacctggttgctactggttcagcaactgcagaaaatgtcctcccttgtggcttcctcagctcctgcccttggcctgaagtcccagcattgatggcagtgcctcatcttcaacttttgtgctcccctttgcctaaaccttatggcctcctgtgcatctgtactcaccctgtacca

SEQ ID NO: 4440 - DNA, 320 bp, Homo sapiens; identical to SEQ ID NO: 597

SEQ ID NO: 4441 - DNA, 228 bp, Homo sapiens
agaagatactcccaagcgtcggggaaaggggaaatccaagggtaagggtgtgggcagtgcccgtaagaagctggatgcttccatcctggaggaccgggataagccctatgcctgtgacatttgtggaaaacgttacaagaaccgaccaggcctcagttaccactatgcccactcccacttggctgaggaggagggcgaggacaaggaagactctcaacccacccactc

SEQ ID NO: 4442 - DNA, 583 bp, Homo sapiens; identical to SEQ ID NO: 2727

SEQ ID NO: 4443 - DNA, 506 bp, Homo sapiens
actctggggatgtcaccaccactgtgcatatggatgcagccacacctgaactaccaaaagacttccattctttatcgactctgtgcataactcctcctcagagccctgatctcgtggagccatcgacaaggacacctgtttctccccaagtaacagattccaaagcatgtacagccacggatgttctccagtcctctgccgtagtggccagagctctgagcgggggcgcggagaggggcttgctgggtttggagccagtgcccagctctccctgcagggccaaggggactagcgtgatccgacacactggggagagccctgctgcctgctttcccaccatccagactccagattgccggctttctgacagcagagaaggagaagagcagcttctgggacactttgaaactttgcaggacacacacctcacggacagtttactcagcactaacttggtgtcctgtcagccctgcttgcacaagtctggtggcctgctgctcactgac

SEQ ID NO: 4444 - DNA, 409 bp, Homo sapiens
tcggctcgaggggaattgatggttagcgaggccgtgcagggccaggtgcacccaaactacttctggatggtcagcggttgcgtggagcccccgcccagctggaagccccagcagatgccaccgccagaagagcccttatgacccctgggccgcgctgtgccttagtgtctacttgcaggacccttcctccttccctagggctgcagggcctgtccacagctcctgtgggggtggaggagactcctctggagaagggtgagaaggtggaggctatgctttggggggacaggccagaatgaagtcctgggtcaggagcccagctggctgggcccagctgcctatgtaaggccttctagtttgttctgagacccccaccccacgaaccaaatccaaataaagtgacattccc

SEQ ID NO: 4445 - DNA, 299 bp, Homo sapiens
atgtccacccagccgtctctctccctcccggccaatgttattctttcctcataagcccttccagagcacaaacacacaagcacgtatgtttgtcttcttttctcataaatggtaacaagctctgcttgctgttgtgcagcttctcttttcacataaaaatacaccttgaagattatttcttatgagtacgtaagatgggcacctgagtagtttgctgttacagaccacgtaggcaatggccgcctgcacagattatttgcacaggtgggagtatcattagatgtttctggaagtgggag

SEQ ID NO: 4446 - DNA, 7680 bp, Homo sapiens
gaagagcaagaggcaggctcagcaaatggttcagccccagtccccggtggctgtcagtcaaagcaagcccggttgttatgacaatggaaaacactatcagataaatcaacagtgggagcggacctacctaggtaatgtgttggtttgtacttgttatggaggaagccgaggttttaactgcgaaagtaaacctgaagctgaagagacttgctttgacaagtacactgggaacacttaccgagtgggtgacacttatgagcgtcctaaagactccatgatctgggactgtacctgcatcggggctgggcgagggagaataagctgtaccatcgcaaaccgctgccatgaagggggtcagtcctacaagattggtgacacctggaggagaccacatgagactggtggttacatgttagagtgtgtgtgtcttggtaatggaaaaggagaatggacctgcaagcccatagctgagaagtgttttgatcatgctgctgggacttcctatgtggtcggagaaacgtgggagaagccctaccaaggctggatgatggtagattgtacttgcctgggagaaggcagcggacgcatcacttgcacttctagaaatagatgcaacgatcaggacacaaggacatcctatagaattggagacacctggagcaagaaggataatcgaggaaacctgctccagtgcatctgcacaggcaacggccgaggagagtggaagtgtgagaggcacacctctgtgcagaccacatcgagcggatctggccccttcaccgatgttcgtgcagctgtttaccaaccgcagcctcacccccagcctcctccctatggccactgtgtcacagacagtggtgtggtctactctgtggggatgcagtggttgaagacacaaggaaataagcaaatgctttgcacgtgcctgggcaacggagtcagctgccaagagacagctgtaacccagacttacggtggcaacttaaatggagagccatgtgtcttaccattcacctacaatggcaggacgttctactcctgcaccacggaagggcgacaggacggacatctttggtgcagcacaacttcgaattatgagcaggaccagaaatactctttctgcacagaccacactgttttggttcagactcaaggaggaaattccaatggtgccttgtgccacttccccttcctatacaacaaccacaattacactgattgcacttctgagggcagaagagacaacatgaagtggtgtgggaccacacagaactatgatgccgaccagaagtttgggttctgccccatggctgcccacgaggaaatctgcacaaccaatgaaggggtcatgtaccgcattggagatcagtgggataagcagcatgacatgggtcacatgatgaggtgcacgtgtgttgggaatggtcgtggggaatggacatgcattgcctactcgcaacttcgagatcagtgcattgttgatgacatcacttacaatgtgaacgacacattccacaagcgtcatgaagaggggcacatgctgaactgtacatgcttcggtcagggtcggggcaggtggaagtgtgatcccgtcgaccaatgccaggattcagagactgggacgttttatcaaattggagattcatgggagaagtatgtgcatggtgtcagataccagtgctactgctatggccgtggcattggggagtggcattgccaacctttacagacctatccaagctcaagtggtcctgtcgaagtatttatcactgagactccgagtcagcccaactcccaccccatccagtggaatgcaccacagccatctcacatttccaagtacattctcaggtggagacctaaaaattctgtaggccgttggaaggaagctaccataccaggccacttaaactcctacaccatcaaaggcctgaagcctggtgtggtatacgagggccagctcatcagcatccagcagtacggccaccaagaagtgactcgctttgacttcaccaccaccagcaccagcacacctgtgaccagcaacaccgtgacaggagagacgactcccttttctcctcttgtggccacttctgaatctgtgaccgaaatcacagccagtagctttgtggtctcctgggtctcagcttccgacaccgtgtcgggattccgggtggaatatgagctgagtgaggagggagatgagccacagtacctggatcttccaagcacagccacttctgtgaacatccctgacctgcttcctggccgaaaatacattgtaaatgtctatcagatatctgaggatggggagcagagtttgatcctgtctacttcacaaacaacagcgcctgatgcccctcctgacccgactgtggaccaagttgatgacacctcaattgttgttcgctggagcagaccccaggctcccatcacagggtacagaatagtctattcgccatcagtagaaggtagcagcacagaactcaaccttcctgaaactgcaaactccgtcaccctcagtgacttgcaacctggtgttcagtataacatcactatctatgctgtggaagaaaatcaagaaagtacacctgttgtcattcaacaagaaaccactggcaccccacgctcagatacagtgccctctcccagggacctgcagtttgtggaagtgacagacgtgaaggtcaccatcatgtggacaccgcctgagagtgcagtgaccggctaccgtgtggatgtgatccccgtcaacctgcctggcgagcacgggcagaggctgcccatcagcaggaacacctttgcagaagtcaccgggctgtcccctggggtcacctattacttcaaagtctttgcagtgagccatgggagggagagcaagcctctgactgctcaacagacaaccaaactggatgctcccactaacctccagtttgtcaatgaaactgattctactgtcctggtgagatggactccacctcgggcccagataacaggataccgactgaccgtgggccttacccgaagaggccagcccaggcagtacaatgtgggtccctctgtctccaagtaccccctgaggaatctgcagcctgcatctgagtacaccgtatccctcgtggccataaagggcaaccaagagagccccaaagccactggagtctttaccacactgcagcctgggagctctattccaccttacaacaccgaggtgactgagaccaccatcgtgatcacatggacgcctgctccaagaattggttttaagctgggtgtacgaccaagccagggaggagaggcaccacgagaagtgacttcagactcaggaagcatcgttgtgtccggcttgactccaggagtagaatacgtctacaccatccaagtcctgagagatggacaggaaagagatgcgccaattgtaaacaaagtggtgacaccattgtctccaccaacaaacttgcatctggaggcaaaccctgacactggagtgctcacagtctcctgggagaggagcaccaccccagacattactggttatagaattaccacaacccctacaaacggccagcagggaaattctttggaagaagtggtccatgctgatcagagctcctgcacttttgataacctgagtcccggcctggagtacaatgtcagtgtttacactgtcaaggatgacaaggaaagtgtccctatctctgataccatcatcccagctgttcctcctcccactgacctgcgattcaccaacattggtccagacaccatgcgtgtcacctgggctccacccccatccattgatttaaccaacttcctggtgcgttactcacctgtgaaaaatgaggaagatgttgcagagttgtcaatttctccttcagacaatgcagtggtcttaacaaatctcctgcctggtacagaatatgtagtgagtgtctccagtgtctacgaacaacatgagagcacacctcttagaggaagacagaaaacaggtcttgattccccaactggcattgacttttctgatattactgccaactcttttactgtgcactggattgctcctcgagccaccatcactggctacaggatccgccatcatcccgagcacttcagtgggagacctcgagaagatcgggtgccccactctcggaattccatcaccctcaccaacctcactccaggcacagagtatgtggtcagcatcgttgctcttaatggcagagaggaaagtcccttattgattggccaacaatcaacagtttctgatgttccgagggacctggaagttgttgctgcgacccccaccagcctactgatcagctgggatgctcctgctgtcacagtgagatattacaggatcacttacggagaaacaggaggaaatagccctgtccaggagttcactgtgcctgggagcaagtctacagctaccatcagcggccttaaacctggagttgattataccatcactgtgtatgctgtcactggccgtggagacagccccgcaagcagcaagccaatttccattaattaccgaacagaaattgacaaaccatcccagatgcaagtgaccgatgttcaggacaacagcattagtgtcaagtggctgccttcaagttcccctgttactggttacagagtaaccaccactcccaaaaatggaccaggaccaacaaaaactaaaactgcaggtccagatcaaacagaaatgactattgaaggcttgcagcccacagtggagtatgtggttagtgtctatgctcagaatccaagcggagagagtcagcctctggttcagactgcagtaaccaacattgatcgccctaaaggactggcattcactgatgtggatgtcgattccatcaaaattgcttgggaaagcccacaggggcaagtttccaggtacagggtgacctactcgagccctgaggatggaatccatgagctattccctgcacctgatggtgaagaagacactgcagagctgcaaggcctcagaccgggttctgagtacacagtcagtgtggttgccttgcacgatgatatggagagccagcccctgattggaacccagtccacagctattcctgcaccaactgacctgaagttcactcaggtcacacccacaagcctgagcgcccagtggacaccacccaatgttcagctcactggatatcgagtgcgggtgacccccaaggagaagaccggaccaatgaaagaaatcaaccttgctcctgacagctcatccgtggttgtatcaggacttatggtggccaccaaatatgaagtgagtgtctatgctcttaaggacactttgacaagcagaccagctcagggtgttgtcaccactctggagaatgtcagcccaccaagaagggctcgtgtgacagatgctactgagaccaccatcaccattagctggagaaccaagactgagacgatcactggcttccaagttgatgccgttccagccaatggccagactccaatccagagaaccatcaagccagatgtcagaagctacaccatcacaggtttacaaccaggcactgactacaagatctacctgtacaccttgaatgacaatgctcggagctcccctgtggtcatcgacgcctccactgccattgatgcaccatccaacctgcgtttcctggccaccacacccaattccttgctggtatcatggcagccgccacgtgccaggattaccggctacatcatcaagtatgagaagcctgggtctcctcccagagaagtggtccctcggccccgccctggtgtcacagaggctactattactggcctggaaccgggaaccgaatatacaatttatgtcattgccctgaagaataatcagaagagcgagcccctgattggaaggaaaaagacagacgagcttccccaactggtaacccttccacaccccaatcttcatggaccagagatcttggatgttccttccacagttcaaaagacccctttcgtcacccaccctgggtatgacactggaaatggtattcagcttcctggcacttctggtcagcaacccagtgttgggcaacaaatgatctttgaggaacatggttttaggcggaccacaccgcccacaacggccacccccataaggcataggccaagaccatacccgccgaatgtaggacaagaagctctctctcagacaaccatctcatgggccccattccaggacacttctgagtacatcatttcatgtcatcctgttggcactgatgaagaacccttacagttcagggttcctggaacttctaccagtgccactctgacaggcctcaccagaggtgccacctacaacatcatagtggaggcactgaaagaccagcagaggcataaggttcgggaagaggttgttaccgtgggcaactctgtcaacgaaggcttgaaccaacctacggatgactcgtgctttgacccctacacagtttcccattatgccgttggagatgagtgggaacgaatgtctgaatcaggctttaaactgttgtgccagtgcttaggctttggaagtggtcatttcagatgtgattcatctagatggtgccatgacaatggtgtgaactacaagattggagagaagtgggaccgtcagggagaaaatggccagatgatgagctgcacatgtcttgggaacggaaaaggagaattcaagtgtgaccctcatgaggcaacgtgttacgatgatgggaagacataccacgtaggagaacagtggcagaaggaatatctcggtgccatttgctcctgcacatgctttggaggccagcggggctggcgctgtgacaactgccgcagacctgggggtgaacccagtcccgaaggcactactggccagtcctacaaccagtattctcagagataccatcagagaacaaacactaatgttaattgcccaattgagtgcttcatgcctttagatgtacaggctgacagagaagattcccgagagtaaatcatctttccaatccagaggaacaagcatgtctctctgccaagatccatctaaactggagtgatgttagcagacccagcttagagttcttctttctttcttaagccctttgctctggaggaagttctccagcttcagctcaactcacagcttctccaagcatcaccctgggagtttcctgagggttttctcataaatgagggctgcacattgcctgttctgcttcgaagtattcaataccgctcagtattttaaatgaagtgattctaagatttggtttgggatcaataggaaagcatatgcagccaaccaagatgcaaatgttttgaaatgatatgaccaaaattttaagtaggaaagtcacccaaacacttctgctttcacttaagtgtctggcccgcaatactgtaggaacaagcatgatcttgttactgtgatattttaaatatccacagtactcactttttccaaatgatcctagtaattgcctagaaatatctttctcttacctgttatttatcaatttttcccagtatttttatacggaaaaaattgtattgaaaacacttagtatgcagttgataagaggaatttggtataattatggtgggtgattattttttatactgtatgtgccaaagctttactactgtggaaagacaactgttttaataaaagatttacattccaca

SEQ ID NO: 4447 - DNA, 251 bp, Homo sapiens
ttagctttttttcctggccctcctaccacccacacatacactttctcgacacataaaggagatatgtaaactgaggtcccgggtattgctacagcaaagacggtggtcctgattcccacgatactgccagattatacttacgtaatcagagtggctctttgagatccacatgatgtgagttatggtgaagtcacctactgctactcatactgcatataaattagtactagtgacaacggtagcctgccttc

SEQ ID NO: 4448 - DNA, 469 bp, Homo sapiens; identical to SEQ ID NO: 3381

SEQ ID NO: 4449 - DNA, 660 bp, Homo sapiens; identical to SEQ ID NO: 600

SEQ ID NO: 4450 - DNA, 494 bp, Homo sapiens; identical to SEQ ID NO: 601

SEQ ID NO: 4451 - DNA, 559 bp, Homo sapiens; identical to SEQ ID NO: 3384
  misc_feature 500: n = A,T,C or G

SEQ ID NO: 4452 - DNA, 447 bp, Homo sapiens; identical to SEQ ID NO: 3387

SEQ ID NO: 4453 - DNA, 567 bp, Homo sapiens; identical to SEQ ID NO: 603

SEQ ID NO: 4454 - DNA, 404 bp, Homo sapiens
actttgttttaactgtaccttaatcggtcatgttctctgaagtggaatgtggctttcctaggaatgggtcccacaaagactaagtggtaatgatgctgtttggggaaaggtcttttttgcttaattttgctttttaaaactctgatgatcgcttgagcaacaggcaggttatctgcctgggtgaattctggttgaaccgggtcttctaatattcctggttaagtggggactgggtaacgaaaccacttggggtaacatttcaacaattcacttaccaatgtttataagctttccattccctaggcaattctttaaaagccccccaaaacaaaaactttactgaaaatggacacaaataggaaatggactttttccttactgtctatacctcctgaaccttggta

SEQ ID NO: 4455 - DNA, 514 bp, Homo sapiens
aagctcggaattcggctcgaggcaaaatggaatagtctcaggtgggaacaccttctcttgctagctccaggaaggctttgtgggaaatgagttgagaccatggacttgggagttgggggccagagttgagcctggacttgaccaattaattcccttacctttcagcccaagatagctacatgtctttacttgctgtataagttttccttttgtcctgggggtgcctgattgatcctatctcttcacccttcattctttcaacaaacatgccatctatctcccaggacatttattcccttctattcaaggccagttaggaatgcaattattttttttttcagttaaatacaaacttgtttggacgcaaggtaccctttctctttttaaaaactttttatcatgaaaactttcaaatacaaaaataaaatggtaaagtgaacctccatgtacccagcatccagctccagtaaccatcaatgtgtaccattatttcatctctcttcctgcacatgct

SEQ ID NO: 4456 - DNA, 567 bp, Homo sapiens; identical to SEQ ID NO: 3389

SEQ ID NO: 4457 - DNA, 528 bp, Homo sapiens
ggattcctggtcatcatgcagctatcaagcccgctcctccacaaaccgagcaagtagagagcaagaggaagtcagggggaaatgaggttagcattgaggaacgtctgggagcaatggatatagacacacacaaaaaaggaaaggaagacctccagacgaatagctttccagttcttcttacccagggcttagaaagtaacgattttgaaatgctaaataaagtacttcaaactaggaatgtaaaccttataaagaagactgtattaaggatgcccctgcatactattattccgttgttacaagagcttacaaagaggttacaaggacatcctaatagtgctgtgctaatggttcagtggctaaaatgtgtgttaacagttcatgcatcatacctgtccacgttgcctgacctggtaccccagctggggacactctaccagttaatggaaagcagagtcaaaacttttcagaaactttcacaccttcatggaaagcttattcttctaattacacaagtaacagcatcag

SEQ ID NO: 4458 - DNA, 311 bp, Homo sapiens
attcactttatacagtactagcattaacaaacttcttgatcttgggggcctctcatttgagccaagtctgttaatatcctgaggagcgcattcagggaaacattctattggcttgacttactcagatgacagcggtctcagctgagcatttgataggggccagtagaatcaattcagagttgttttctaacttttactaaatctatgttatagattttcttggaggaaaagtagaccttgtcagagagccttaattaaagtccataacctagaaacatatgcatcaccagatcaacaactgaaatgggaat

SEQ ID NO: 4459 - DNA, 650 bp, Homo sapiens; identical to SEQ ID NO: 605

SEQ ID NO: 4460 - DNA, 271 bp, Homo sapiens; identical to SEQ ID NO: 606
  misc_feature 224, 229: n = A,T,C or G

SEQ ID NO: 4461 - DNA, 364 bp, Homo sapiens
aggcatccacctgaatgcctacttcttggaaaccagcaaacgtctcgccaaccagatcccatttataattcagtattttatgctccgagagaatggtgactccttgcagaaagccatgatgcagatactacaggaaaaaaatcgctattcctggctgcttcaagagcagagtgagaccgctaccaagagaagaatccttaaggagagaatttaccggctcactcaggcgcgacacgcactctgtcaattctccagcaaagagatccactgaagggcggcgatgcctgtggttgttttcttgtgcgtactcattcattctaaggggagtcggtgcaggatgccgcttctgctttggggccaaact

SEQ ID NO: 4462 - DNA, 445 bp, Homo sapiens
tttataaaggcatttagtttatttttcaaaaaaatactttgctagaagggttgagtactgtaattttacatgatcataatctctaaataaattctttttctgaccaacaggtaccagttaagtgaacagctcgtctaggtctgcttttgtaacacccaaatacaattagcacttctctgctggtattccctgggccgtcttaattatctagaggccaggaggcaaagcctagcacgtaacaaagtatgtgctttgtaactgctgattaattcagtttcttaactaggcagagcaggtcatcagtgtatctaattcacactattaatacactgtcttgctgaagagtctgacctgcccagaaccccgttatggctagcccagggaagcagtaaactgcaaagcagagaaaaggggcagctaagatgaggctagtgctggctgagtc

SEQ ID NO: 4463 - DNA, 312 bp, Homo sapiens; identical to SEQ ID NO: 608

SEQ ID NO: 4464 - DNA, 569 bp, Homo sapiens; identical to SEQ ID NO: 3390
  misc_feature 528: n = A,T,C or G

SEQ ID NO: 4465 - DNA, 444 bp, Homo sapiens
ttcggctcgacaaaatctcaatttgtgtctgtttacagctctctctcctcactgctcacagcaaggggttctgtatcagtggatttcattttgtagctgctgagatgttaaggcaagcctcagcatctgcccctgctgggtgcacaatgctgcttcctcgaagagaagacacagagtccaagtggcaggacttgaggttggcttccactctgccttagaagttaattttccaaagtacattacaaatctctgaggccattaggggaaaaggaaggggtgtggtttgtctttgaaattacggttaatacttttagacagtaagtccggctggttgcagggctatttgccccgacagcatcagcctgtaacatttcttctctttcctttgtgccactgagtcgttccctggccagaggacataaatggtgctggtaggaggttatc

SEQ ID NO: 4466 - DNA, 581 bp, Homo sapiens
aagctcgggaattcgaattcggcaaatggtggtggcatccagtaagaaaggagagcccgtcagtgccgaagatctgggggtgagtggtgcactgacagtgcttatgaaggacgcaatcaagcccaatctcatgcagacactggagggcactccagtgtttgtccatgctggcccgtttgccaacatcgcacatggcaattcctccatcattgcagaccagatcgcactcaagcttgttggcccagaagggtttgtagtgacggaagcaggatttggagcagacattggaatggaaaagttttttaacatcaaatgccggtattccggcctctgcccccacgtggtggtgcttgttgccactgtcagggctctcaagatgcacgggggcggccccacggtcactgctggactgcctcttcccaaggcttacatacaggagaacctggagctggttgaaaaaggcttcagtaacttgaagaaacaaattgaaaatgccagaatgtttggaattccagtagtagtggccgtgaatgcattcaagacggatacagagtctgagctggacctcatcagccgccttt

SEQ ID NO: 4467 - DNA, 519 bp, Homo sapiens
ttttggacaagtcattcctggggttctgtctttggtagcatcaccagggatatttgggtgggacagacagaagacacacagctgcctgttctctcctgcccatcatgtttggcccactagatgaagctgtactcagcaatttagggaatgtaacccttctcagaactggccattttcaggggaagcttgggagagcaatagtatggtgagccccttagagatgagcgcctactccttcttggcgaatgctgccttcagatgcttaccaagtggtcactgcatctagtaagattatatttccagtacacttccttagggcagaaacaccatcctatcaggtttggtcagtcccttcttcatgaagggagtcatggggaattcctgaaaattttcttccttctgcagacagttggatgagtcccttagagaaggcatccagagacataactaaactgaatatcatcccatattgattttaggaattgactctaaaactctgtgcagaatcttgtgttggga

SEQ ID NO: 4468 - DNA, 551 bp, Homo sapiens
gctcgggccgggtcaactgctcggtctatgtgcagctggagaaggtgtgcaggggaaaccctgctgatgtcaccgaggccaggttgtctttctactcgggacactcttcctttgggatgtactgcatggtgttcttggtgctgtatgtgcaggcacgactctgttggaagtgggcacggctgctgcgacccacagtccagttcttcctggtggcctttgccctctacgtgggctacacccgcgtgtctgattacaaacaccactggagcgatgtccttgttggcctcctgcagggggcactggtggctgccctcactgtctgctacatctcagacttcttcaaagcccgacccccacagcactgtctgaaggaggaggagctggaacggaagcccagcctgtcactgacgttgaccctgggcgaggctgaccacaaccactatggatacccgcactcctcctcctgaggccggaccccgcccaggcagggagctactgtgagtccagctgaggcccacccaggtggtccctccagccctggttaggcactg

SEQ ID NO: 4469 - DNA, 1556 bp, Homo sapiens
ggctgggagagatggcaggcggaagacaccggcgcgtcgtgggcaccctccacctgctgctgctggtggccgccctgccctgggcatccaggggggtcagtccgagtgcctcagcctggccagaggagaagaattaccaccagccagccattttgaattcatcggctcttcggcaaattgcagaaggcaccagtatctctgaaatgtggcaaaatgacttacagccattgctgatagagcgatacccgggatcccctggaagctatgctgctcgtcagcacatcatgcagcgaattcagaggcttcaggctgactgggtcttggaaatagacaccttcttgagtcagacaccctatgggtaccggtctttctcaaatatcatcagcaccctcaatcccactgctaaacgacatttggtcctcgcctgccactatgactccaagtatttttcccactggaacaacagagtgtttgtaggagccactgattcagccgtgccatgtgcaatgatgttggaacttgctcgtgccttagacaagaaactcctttccttaaagactgtttcagactccaagccagatttgtcactccagctgatcttctttgatggtgaagaggcttttcttcactggtctcctcaagattctctctatgggtctcgacacttagctgcaaagatggcatcgaccccgcacccacctggagcgagaggcaccagccaactgcatggcatggatttattggtcttattggatttgattggagctccaaacccaacgtttcccaatttttttccaaactcagccaggtggttcgaaagacttcaagcaattgaacatgaacttcatgaattgggtttgctcaaggatcactctttggaggggcggtatttccagaattacagttatggaggtgtgattcaggatgaccatattccatttttaagaagaggtgttccagttctgcatctgataccgtctcctttccctgaagtctggcacaccatggatgacaatgaagaaaatttggatgaatcaaccattgacaatctaaacaaaatcctacaagtctttgtgttggaatatcttcatttgtaatactctgatttagtttaggataattggttctagaattgaattcaaaagtcaaggcatcatttaaaataatctgatttcagacaaatgctgtgtggaaacatctatcctatagatcatcctattcttatgtgtctttggttatcagatcaattacagaataattgtgttgtgatattgtgtcctaaattgctcattaatttttatttacagattgaaaaagaggcaccgtgtaaagaaaatggcaaaataaatatctttccaaggatcatcatcacgatagctaaacagtacttaaatagcggttggaactaggtagcctttcgaattttatgattttttcatatgtggaaatctattacatgtaatacaaaacaaacatgtagtttgaaggcggtcagatttctttgagaaatctttgtagagttaattttatggaaattaaaatcagaattaaatgct

SEQ ID NO: 4470 - DNA, 570 bp, Homo sapiens; identical to SEQ ID NO: 2559

SEQ ID NO: 4471 - DNA, 634 bp, Homo sapiens
aagctcggaattcggctcgaggtcggcgtcggtagtgtctgtcatttcgcggttcttagaagagtacttgagctccactccgcagcgtctgaagttgctggacgcgtacctgctgtatatactgctgaccggggcgctgcagttcggttactgtctcctcgtggggaccttccccttcaactcttttctctcgggcttcatctcttgtgtggggagtttcatcctagcggtttgcctgagaatacagatcaacccacagaacaaagcggatttccaaggcatctccccagagcgagcctttgctgattttctctttgccagcaccatcctgcaccttgttgtcatgaactttgttggctgaatcattctcatttacttaattgaggagtaggagactaaaagaatgttcactctttgaatttcctggataagagttctggagatggcagcttattggacacatggattttcttcagatttgcacttactgctagctctgctttttatgcaggagaaaagcccagagttcactgtgtgtcagaacaactttctaacaaacatttattaatccagcctctgcctttcattaaatgtaaccttttgccttccaaattaaagaactccatgccactcc

SEQ ID NO: 4472 - DNA, 482 bp, Homo sapiens
tagcaagaaacagtatccacagtggactccggggctcctacagacttggcacagcttcctacagtcttgaaacagccctgttgttctgtcatggccagtgggcagtttgtgaacaaactgcaagaggaagtgatctgccccatctgcctggacattctgcagaaacctgtcaccatcgactgtgggcacaatttctgcctcaaatgcatcactcagattggggaaacatcatgtggatttttcaaatgtcccctctgcaaaacttccgtaaggaagaacgcaatcaggttcaactcgctgttgcggaatctggtggagaaaatccaagctctacaagcctctgaggtgcagtccaaaaggaaagaggctacatgcccgaggcaccaggagatgttccactatttctgcgaggatgatgggaagttcctctgttttgtgtgttgtgaataccaagaccacaaatcccataatgtcagcttgat

SEQ ID NO: 4473 - DNA, 356 bp, Homo sapiens
agttatctaagctttgattccttacagcaggaggctgcccttgagcctgagcagaagcagctacaatggccgtcaggggccacatttctcaaaaggttggcagaacctgaattaccagaccctttttaaatcccagttgtgtccctttttaagctgtgagaccagttttttgaattccattgctttgaaatgtttcctattactgatttttttttttaactttccttgacatcttgaatgggtttttttgattgatgttcaatatacccagtacccatggtaggggggggtcatgggcctctgctgggtctcttaggggtcttttccacgggcccctaaaaaagtacaggaggggc

SEQ ID NO: 4474 - DNA, 2019 bp, Homo sapiens
acgtgtatcgctgccgtcaagatggaggggcctttgtccgtgttcggtgaccgcagcactggggaaacgatccgctcccaaaacgttatggctgcagcttcgattgccaatattgtaaaaagttctcttggtccagttggcttggataaaatgttggtggatgatattggtgatgtaaccattactaacgatggtgcaaccatcctgaagttactggaggtagaacatcctgcagctaaagttctttgtgagctggctgatctgcaagacaaagaagttggagatggaactacttcagtggttattattgcagcagaactcctaaaaaatgcagatgaattagtcaaacagaaaattcatcccacatcagttattagtggctatcgacttgcttgcaaggaagcagtgcgttatatcaatgaaaacctaattgttaacacagatgaactgggaagagattgcctgattaatgctgctaagacatccatgtcttccaaaatcattgggataaatggtgatttctttgctaacatggtagtagatgctgtacttgctattaaatacacagacataagaggccagccacgctatccagtcaactctgttaatattttgaaagcccatgggagaagtcaaatggagagtatgctcatcagtggctatgcactcaactgtgtggtgggatcccagggcatgcccaagagaatcgtaaatgcaaaaattgcttgccttgacttcagcctgcaaaaaacaaaaatgaagcttggtgtacaggtggtcattacagaccctgaaaaactggaccaaattagacagagagaatcagatatcaccaaggagagaattcagaagatcctggcaactggtgccaatgttattctaaccactggtggaattgatgatatgtgtctgaagtattttgtggaggctggtgctatggcagttagaagagttttaaaaagggaccttaaacgcattgccaaagcttctggagcaactattctgtcaaccctggccaatttggaaggtgaagaaacttttgaagctgcaatgttgggacaggcagaagaagtggtacaggagagaatttgtgatgatgagctgatcttaatcaaaaatactaaggctcgtacgtctgcatcgattatcttacgtggggcaaatgatttcatgtgtgatgagatggagcgctctttacatgatgcactttgtgtagtgaagagagttttggagtcaaaatctgtggttcccggtgggggtgctgtagaagcagccctttccatataccttgaaaactatgcaaccagcatggggtctcgggaacagcttgcgattgcagagtttgcaagatcacttcttgttattcccaatacactagcagttaatgctgcccaggactccacagatctggttgcaaaattaagagcttttcataatgaggcccaggttaacccagaacgtaaaaatctaaaatggattggtcttgatttgagcaatggtaaacctcgagacaacaaacaagcaggggtgtttgaaccaaccatagttaaagttaagagtttgaaatttgcaacagaagctgcaatcaccattcttcgaattgatgatcttattaaattacatccagaaatccttcggattaaacatggaagttatgaagatgctgttcactctggagcccttaatgattgatctgatgttccttttatttataacaatgttaaatgcaatgtcttgtaccttgagttgagtattacacattaaagtaaagtacaagctgtaaacttgggtttttgtgatgtaggaaatggtttccatctgtactttggtcctctgatttcagatattgcaacctagtactttattagtttaaaaagaaattgaggttgttcaaagtttaagcaattcattctctctgaacacacattgctattcccatcccacccccaatgcacagggctgcaacaccacgacttctgcccattctctccagtgtgtgtaacagggtcacaagaattc

SEQ ID NO: 4475 - DNA, 582 bp, Homo sapiens
taagctcgggaattcgctcgagcggctcgagcttatggagggcttatccccataacctgatgacatttcaaatgaagtttttctacatatcacagctggcttactggcttcatgcttttcctgaactctacttccagaaaaccaaaaaagaagatattcctcgtcagcttgtctacattggtctttacctcttccacattgctggagcttaccttttgaacttgaatcatctaggacttgttcttctggtgctacattattttgttgaatttcttttccacatttcccgcctgttttattttagcaatgaaaagtatcagaaaggattttctctgtgggcagttctttttgttttgggaagacttctgactttaattctttcagtactgactgttggttttggccttgcaagagcagaaaatcagaagctggatttcagtactggaaacttcaatgtgttagctgttagaatcgctgttctggcatccatttgcgttactcaggcatttatgatgtggaagttcattaattttcagcttcgaaggtggagggaacattctgcttttcaggcaccagctgtga

SEQ ID NO: 4476 - DNA, 411 bp, Homo sapiens
  misc_feature 400: n = A,T,C or G
gatctattcatttattttactttctaaggaattgatagaaatataaatgtacatatacctaaaaagtggctatcctacatatgacagcccagaatttactaactccataggttttctggatatttcaagcacacattaaaacaattacagagaggacatacatttatgatttatgcaaattaaggcacatcaattacaatctatttttttaagttagtcagtttaaaaatcttcacttacaaaaattcaaaatatgtccaagctcaactttttagtaggaatgttagtttgttgggtttggccattttcttttttcaccttaaaggtcaaacatgaaacaatgaggaatgtaggtctttgtaaaacacataaatacctgtgatgttttgaatcatttggnccttaaaaata

SEQ ID NO: 4477 - DNA, 556 bp, Homo sapiens; identical to SEQ ID NO: 617

SEQ ID NO: 4478 - DNA, 265 bp, Homo sapiens
  misc_feature 180: n = A,T,C or G
cagcctccaaaggagccagcctctccccagttcctgaaatcctgagtgttgcctgccagtcgccatgagaacttcctaccttctgctgtttactctctgcttacttttgtctgagatggcctcaggtggtaactttctcacaggccttggccacagatctgatcattacaattgcgtcanagtggagggcaatgtctctattctgcctgcccgatctttaccaaaattcaaggcacctgttacagagggaaggccaagtgctgca

SEQ ID NO: 4479 - DNA, 246 bp, Homo sapiens
atgcatatgtatatgcatataaaagatatatataaaatgggggttataaacaatgaaggaaatagtgatactatctatgtgggaacaatactagtatcctccctttggatgaatacagtagctacagatgcaattctggggactctgttgagcaatagcttaactattgcttggctgcaagcatggataacttgttcaaagaacatgaggagttgtaaatatttaaatacgcaggatttgcaacat

SEQ ID NO: 4480 - DNA, 367 bp, Homo sapiens; identical to SEQ ID NO: 620

SEQ ID NO: 4481 - DNA, 171 bp, Homo sapiens
ttaaaattgagataggttaggcatctatccaatctcccatgccagtaattctacagaaacagattaggttagctagataagcatgtttacaattaaatttatgctgtatccttctaatcaccactttctcatcaaaatgctcacaaatcatctgcatcattgtccattctt

SEQ ID NO: 4482 - DNA, 625 bp, Homo sapiens
ttaggttattgatttgagatctttcttctttttaatttaagcacctgcagctataagcttccctttagcatggctttgagatctttcttctttttaatttaagcatctgcagctgtaagcttccctttagcactgcctttgttgcctcctcctgagtttgggtatgtcatggttttgttttcatttgcttaaacattttttttgtcctattgtaatataattgtgttgtttttaatagaggtaattaatgaaacacataatgaattgtgcttctgtttttataatattttaagcattcttaactcagaaatgtaaattttagaaaaaaattccaggccaggcacagtggctcacacctgtagtcccagcacttgaggaggccgaggtgggaggatcatctgaggtcaggagttggagaccagcctggccaacatggtgaaaccctgtctttactaaaaatagaaaaaaaatatataaaagctagctgggtatcatggcgggtgcctgtaatcccagctactctggaggctgaggcaggagaatcacttgaatctgggaggcggaggttgcagtgagctgaaattgcaccactgcactccagcctgggtgacagaatgagtccatc

SEQ ID NO: 4483 - DNA, 470 bp, Homo sapiens; identical to SEQ ID NO: 622

SEQ ID NO: 4484 - DNA, 514 bp, Homo sapiens; identical to SEQ ID NO: 3400

SEQ ID NO: 4485 - DNA, 521 bp, Homo sapiens; identical to SEQ ID NO: 624

SEQ ID NO: 4486 - DNA, 67 bp, Homo sapiens
cagttcaactgcttactcccaaaacagcctttttgtaatttattttttaagtgggctcctgacaata

SEQ ID NO: 4487 - DNA, 509 bp, Homo sapiens; identical to SEQ ID NO: 3404

SEQ ID NO: 4488 - DNA, 516 bp, Homo sapiens
taagctcggaattcggctcgagctgcaggagatccgcctcgagccgcaggaggtgccgcgcggctcggagccctggaagcagcagctcaccgaggacggggactcgttcctgcacttggccatcatccatgaagaaaaggcactgaccatggaagtgatccgccaggtgaagggagacctggccttcctcaacttccagaacaacctgcagcagactccactccacttggctgtgatcaccaaccagccagaaattgctgaggcacttctgggagctggctgtgatcctgagctccgagactttcgaggaaatacccccctacaccttgcctgtgagcagggctgcctggccagcgtgggagtcctgactcagtcctgcaccaccccgcacctccactccatcctgaaggctaccaactacaatggccacacgtgtctacacttagcctctatccatggctacctgggcatcgtggagcttttggtgtccttgggtgctgatgtcaatgctcagga

SEQ ID NO: 4489 - DNA, 458 bp, Homo sapiens; identical to SEQ ID NO: 3405

SEQ ID NO: 4490 - DNA, 616 bp, Homo sapiens
gctctcaactgtctcctgcgttgctgggaagttctggaaggaagcatgtgctccagaggttgggattcgtgtctggctctggaattgctactgctgcctctgtcactcctggtgaccagcattcaaggtcacttggtacatatgaccgtggtctccggcagcaacgtgactctgaacatctctgagagcctgcctgagaactacaaacaactaacctggttttatactttcgaccagaagattgtagaatgggattccagaaaatctaagtactttgaatccaaatttaaaggcagggtcagacttgatcctcagagtggcgcactgtacatctctaaggtccagaaagaggacaacagcacctacatcatgagggtgttgaaaaagactgggaatgagcaagaatggaagatcaagctgcaagtgcttgaccctgtacccaagcctgtcatcaaaattgagaagatagaagacatggatgacaactgttatctgaaactgtcatgtgtgatacctggcgagtctgtaaactacacctggtatggggacaaaaggcccttcccaaaggagctccagaacagtgtgcttgaaaccacccttatgccacataattact

SEQ ID NO: 4491 - DNA, 584 bp, Homo sapiens
taagctcggaattcggctcgaggttcagaattgggaatgttgagatttcacaggtcactattgtggggatcatcagacatgcagagaaggctccaaccaacattgtttacaaaatagatgacatgacagctgcacccatggacgttcgccagtgggttgacacagatgacaccagcagtgaaaacactgtggttcctccagaaacatatgtgaaagtggcaggccacctgagatcttttcagaacaaaaagagcctggtagcctttaagatcatgcccctggaggatatgaatgagttcaccacacatattctggaagtgatcaatgcacacatggtactaagcaaagccaacagccagccctcagcagggagagcacctatcagcaatccaggaatgagtgaagcagggaactttggtgggaatagcttcatgccagcaaatggcctcactgtggcccaaaaccaggtgttgaatttgattaaggcttgtccaagacctgaagggttgaactttcaggatctcaagaaccagctgaaacacatgtctgtatcctcaatcaagcaagctgtggattttctgagc

SEQ ID NO: 4492 - DNA, 580 bp, Homo sapiens; identical to SEQ ID NO: 628

SEQ ID NO: 4493 - DNA, 262 bp, Homo sapiens
  misc_feature 164: n = A,T,C or G
cggctcgagtagtaacttgttttcactattgtttctagcccttggaattatttcttttattacatttttccttcagggtttcacatttggcaaagctggagagatcctcaccaagcggctccgatacatggttttccgatccatgctcagacaggatgtgagtnggtttgatgaccctaaaaacaccactggagcattgactaccaggctcgccaatgatgctgctcaagttaaaggggtataggttccaggcttgctgtaa

SEQ ID NO: 4494 - DNA, 236 bp, Homo sapiens
  misc_feature 16, 39, 121, 124, 126: n = A,T,C or G
gattacaggcgtgagnatcacacccagcctccccctttntttcctaataggagactcctgtacctttcttcgttttacctatgtgtcgtgtctgcttacatttccttctcccctcaggctnttntntgggtggtcctccaacctccaatacccaggcctggcctcttcagagtaccccccattccactttccctgcctccttccttaaatagctgacaatcaaattcatgctatgg

SEQ ID NO: 4495 - DNA, 853 bp, Homo sapiens
ctagtcctgacttcacttctgatgaggaagcctctctccttagccttcagcctttcctcccaccctgccataagtaatttgatcctcaagaagttaaaccacacctcattggtccctggctaattcaccaatttacaaacagcaggaaatagaaacttaagagaaatacacacttctgagaaactgaaacgacaggggaaaggaggtctcactgagcaccgtcccagcatccggacaccacagcggcccttcgctccacgcagaaaaccacacttctcaaaccttcactcaacacttccttccccaaagccagaagatgcacaaggaggaacatgaggtggctgtgctgggggcaccccccagcaccatccttccaaggtccaccgtgatcaacatccacagcgagacctccgtgcccgaccatgtcgtctggtccctgttcaacaccctcttcttgaactggtgctgtctgggcttcatagcattcgcctactccgtgaagtctagggacaggaagatggttggcgacgtgaccggggcccaggcctatgcctccaccgccaagtgcctgaacatctgggccctgattctgggcatcctcatgaccattggattcatcctgtcactggtattcggctctgtgacagtctaccatattatgttacagataatacaggaaaaacggggttactagtagccgcccatagcctgcaacctttgcactccactgtgcaatgctggccctgcacgctggggctgttgcccctgcccccttggtcctgcccctagatacagcagtttatacccacacacctgtctacagtgtcattcaataaagtgcacgtgcttgtga

SEQ ID NO: 4496 - DNA, 497 bp, Homo sapiens; identical to SEQ ID NO: 631

SEQ ID NO: 4497 - DNA, 250 bp, Homo sapiens
  misc_feature 236, 240: n = A,T,C or G
cttgtttctttgatactcttgctgtaggtcgccgtgaggggtagggaagcatatatactgtagggagaagtatcaaaatcatttaaggtcttttttccaaactagtgttcccctcccacatcccaataactcttggaagtctggtgctccctctaggtgaaaatcatttgctggcttatggagtcactgttgctgagtcccatcccccagttacagtgcagtggaaaaacaggttnagantctagaactt

SEQ ID NO: 4498 - DNA, 384 bp, Homo sapiens; identical to SEQ ID NO: 3409

SEQ ID NO: 4499 - DNA, 618 bp, Homo sapiens
taagctcggaaattcggctcgagcgagggccccatcgatgccgccttcacccgcatcaactgtcaggggaagacctacctcttcagggtagtcagtactggcgctttgaggatggtgtcctggaccctgattacccccgaaatatctctgacggcttcgatggcatcccggacaacgtggatgcagccttggccctccctgcccatagctacagtggccgggagcgggtctacttcttcaaggggaaacagtactgggagtaccagttccagcaccagcccagtcaggaggagtgtgaaggcagctccctgtcggctgtgtttgaacactttgccatgatgcagcgggacagctgggaggacatcttcgagcttctcttctggggcagaacctctgctggtaccagacagccccagttcattagccgggactggcacggtgtgccagggcaagtggacgcagccatggctggccgcatctacatctcaggcatggcaccccgcccctccttggccaagaaacaaaggtttaggcatcgcaaccgcaaaggctaccgttcacaacgaggccacagccgtggccgcaaccagaactcccgccggccatcccgcgccacgt

SEQ ID NO: 4500 - DNA, 463 bp, Homo sapiens
  misc_feature 385: n = A,T,C or G
tgttgacatcaacacatttcgcctctctgctgatgacatacgtggcattcagtccctgtatggagacccaaaagagaaccaacgcttgccaaatcctgacaattcagaaccagctctctgtgaccccaatttgagttttgatgctgtcactaccgtgggaaataagatctttttcttcaaagacaggttcttctggctgaaggtttctgagagaccaaagaccagtgttaatttaatttcttccttatggccaaccttgccatctggcattgaagctgcttatgaaattgaagccagaaatcaagtttttctttttaaagatgacaaatactggttaattagcagtttaagaccagagccaaattatcccaagagcatacattcnttttggttttcctaactttgtgaaaaaaattgatgcagctgtttttaacccacgtttttataggacctacttctttgt

SEQ ID NO: 4501 - DNA, 732 bp, Homo sapiens
tgctgcgaaccacgtgggtcccgggcgcgtttcgggtgctggcggctgcagccggagttcaaacctaagcagctggaaggaaccatggccaactgtgagcgtaccttcattgcgatcaaaccagatggggtccagcggggtcttgtgggagagattatcaagcgttttgagcagaaaggattccgccttgttggtctgaaattcatgcaagcttccgaagatcttctcaaggaacactacgttgacctgaaggaccgtccattctttgccggcctggtgaaatacatgcactcagggccggtagttgccatggtctgggaggggctgaatgtggtgaagacgggccgagtcatgctcggggagaccaaccctgcagactccaagcctgggaccatccgtggagacttctgcatacaagttggcaggaacattatacatggcagtgattctgtggagagtgcagagaaggagatcggcttgtggtttcaccctgaggaactggtagattacacgagctgtgctcagaactggatctatgaatgacaggagggcagaccacattgcttttcacatccatttcccctccttcccatgggcagaggaccaggctgtaggaaatctagttatttacaggaacttcatcataatttggagggaagctcttggagctgtgagttctccctgtacagtgttaccatccccgaccatctgattaaaatgcttcctcccagc

SEQ ID NO: 4502 - DNA, 371 bp, Homo sapiens; identical to SEQ ID NO: 3410

SEQ ID NO: 4503 - DNA, 240 bp, Homo sapiens
ccttgccacgcggggccccggccccatcaagtccctctggggacgtccccgtcggaaaccggaaaaagcagttccagttaattgtgtgaagtgtgtctgtctccagcccttcgggcctcccacgagcccctccagcctctccaagtcgctgtgaattgaccccttctttcctttctctgttgtaaatacccctcacggaggaaatagttttgctaagaaataaaagtgactattttatta

SEQ ID NO: 4504 - DNA, 376 bp, Homo sapiens
tgggaaggacctgtacgggaacaagcgtgccctgcgcaggctgcgcacagcctgtgagcgcgccaagcgcaccctgtcctccagcacccaggccaccctggagatagactccctgttcgagggcgtggacttctacacgtccatcactcgtgcccgctttgaggaactgagctcagacctcttccgcagcaccctggagccggtggagaaggccctgcgggatgccaagctggacaaggcccacattcatgacgtcgtcctggtggggggctccacacgcatccccaaggtgcaaaaattgctgcacgacttcttcaacggcaaggagctgaacaggagcatcaaccctgatgaggctgtggcctatggggctgct

SEQ ID NO: 4505 - DNA, 438 bp, Homo sapiens; identical to SEQ ID NO: 3413

SEQ ID NO: 4506 - DNA, 50 bp, Homo sapiens
gattctggaaaacccggacttgtttctcaccagtgaagccacagattatg

SEQ ID NO: 4507 - DNA, 457 bp, Homo sapiens
ggagactgtgacgacaaagcatattcatatcacacaggccacagagaccaccacaaccagacacaagcgcacagcaaatccttccaaaaccattgatcttggagcagcagcacattacacaggggacaaagcaagtccagatcagaatgcttcaacccacacaccttagtcttcagttaagacttcagtgcctagcagcaagtcatctggtgaccttgttgatctgtttgatggcaccagccagtcaacaggaggatcagctgatttattcggaggatttgctgactttggctcagctgctgcatcaggcagattcccttcccaagtaacagcaacatgtgggaatggagactttggtgactggagtgccttcaaccaagccccatcaggccctgttgcttccagtggcgagttctttggcagtgcctcacagccagcggtagaacttgttagtggc

SEQ ID NO: 4508 - DNA, 509 bp, Homo sapiens; identical to SEQ ID NO: 3414

SEQ ID NO: 4509 - DNA, 275 bp, Homo sapiens
  misc_feature 209: n = A,T,C or G
gggtatttaggttcccatatatgaattgtggggggatattaacatttagaccatagcacctactcatgaaagaacattaataattaacacctctagtgagtatttgtgagtctaggatttacagaacataaggatattgtacaaattttaaaagccaaaatgagttttagtattactaaacaacaactgttcagcaggaaaaaaaaganaatagtaatacagaatccctgtaagcattacctgcactaaactgagcacacaattataactcaagc

SEQ ID NO: 4510 - DNA, 552 bp, Homo sapiens
cgaggttggggccaggacacccagtgagcccatacttgctctttttgtcttcttcagactgcgccatggggctcagcgacggggaatggcagttggtgctgaacgtctgggggaaggtggaggctgacatcccaggccatgggcaggaagtcctcatcaggctctttaagggtcacccagagactctggagaagtttgacaagttcaagcacctgaagtcagaggacgagatgaaggcatctgaggacttaaagaagcatggtgccactgtgctcaccgccctgggtggcatccttaagaagaaggggcatcatgaggcagagattaagcccctggcacagtcgcatgccaccaagcacaagatccccgtgaagtacctggagttcatctcggaatgcatcatccaggttctgcagagcaagcatcccggggactttggtgctgatgcccagggggccatgaacaaggccctggagctgttccggaaggacatggcctccaactacaaggagctgggcttccagggctaggcccctgccgctcccaccccca

SEQ ID NO: 4511 - DNA, 493 bp, Homo sapiens
tgtatcgagctttgatcagttcacctgcaacctgctgtatgtgagctggaggaaggacctcactgagcaccttcaccgcctctacttccggggccgtgcgtactacaccctcaacgtgctgcgggatgacatcgataacccggaccagcgcatcagccaggacgtggagcgattctgccggcagctcagcagcatggccagcaagctcatcatctccccgttcaccctcgtctactacacttaccagtgcttccaaagcacaggctggctcgggcctgtgagcatcttcgggtatttcatcctggggaccgtggtgaacaaaactttgatgggccccattgtgatgaagctggtgcatcaggagaagctggagggagattttaggttcaagcacatgcagattcgggtgaatgcggagcctgctgctttctacaggtgagtctggagagatggttccccttctgccttgccagagctgagagtggagaaggaa

SEQ ID NO: 4512 - DNA, 581 bp, Homo sapiens
ttctgatcacgtagcccttttatcagtattccaagcctgggatgatgctagaatgggtggagaagaagcagagatacgtttttgtgagcacaaaagacttaatatggctacactaagaatgacctgggaagccaaagttcagctcaaagagattttgattaattctgggtttccagaagattgtttgttgacacaagtgtttactaacactggaccagataataatttggatgttgttatctccctcctggcctttggtgtgtaccccaatgtatgctatcataaggaaaagaggaagattctcaccactgaagggcgtaatgcacttatccacaaatcatctgttaattgtccttttagtagccaagacatgaagtacccatctcccttctttgtatttggtgaaaagattcgaactcgagccatctctgctaaaggcatgactttagtcacccccctgcagttgcttctctttgcctccaagaaagtccaatctgatgggcagattgtgcttgtagatgactggattaaactgcaaatatctcatgaagctgctgcctgtatcactggtctccgggcag

SEQ ID NO: 4513 - DNA, 325 bp, Homo sapiens
ggaagttcaccaacagccccacattcctggaggtgctagaggagttcccgtccctgcgggtgtctgctggcttcctgctttcccagctccccattctgaagcccaggttctactccatcagctcctcccgggatcacacgcccacagagatccacctgactgtggccgtggtcacctaccacacccgagatggccagggtcccctgcaccacggcgtctgcagcacatggctcaacagcctgaagccccaagacccagtgccctgctttgtgcggaatgccagcggcttccacctccccgaggatccctcccatccttgcatcct

SEQ ID NO: 4514 - DNA, 504 bp, Homo sapiens
ccacgtaagatcatccgcatgtgggcagaaaaagaatgcacaatctcgcaagatgcagagagctggaattccttgtccaacagttgtactacatgaagaaacacattttagttatgtcttttattggccatgatcaagttccagcccctaaattaaaagaagtaaagctcaatagtgaagaaatgaaagaagcctactatcaaactcttcatttgatgcggcagttatatcatgaatgtacgcttgtccatgctgacctcagtgagtataacatgctgtggcatgctggaaaggtctggttgatcgatgtcagtcagtcagtagaacctacccaccctcacggcctggagttcttgttccgggactgcaggaatgtctcgcagtttttccagaaaggaggagtcaaggaagcccttagtgaacgagaactcttcaatgctgtttcaggcttaaacatcacagcagataatgaagctgattttttagctgagatagaagctttgg

SEQ ID NO: 4515 - DNA, 603 bp, Homo sapiens
cgttcagcctcatgacttaggaaaagttggagaggtcattgtgaccaaagacgatgccatgctcttaaaaggaaaaggtgacaaggctcaaattgaaaaacgtattcaagaaatcattgagcagttagatgtcacaactagtgaatatgaaaaggaaaaactgaatgaacggcttgcaaaactttcagatggagtggctgtgctgaaggttggtgggacaagtgatgttgaagtgaatgaaaagaaagacagagttacagatgcccttaatgctacaagagctgctgttgaagaaggcattgttttgggagggggttgtgccctccttcgatgcattccagccttggactcattgactccagctaatgaagatcaaaaaattggtatagaaattattaaaagaacactcaaaattccagcaatgaccattgctaagaatgcaggtgttgaaggatctttgatagttgagaaaattatgcaaagttcctcagaagttggttatgatgctatggctggagattttgtgaatatggtggaaaaaggaatcattgacccaacaaaggttgtgagaactgctttattggatgctgctggtgtggcctc

SEQ ID NO: 4516 - DNA, 564 bp, Homo sapiens
cgagtaaggattgggtctgggaacatttctcttcaatggaaaaggaagaccaatctctcaaattttgtctggaagaaagggactttgaggcgggtgtttttgaactagaagcaattgttaacagcatcaaaagaagcagaaaaattatttttgttataacacaccatctattaaaagacccattatgcaaaagattcaaggtacatcatgcagttcaacaagctattgaacaaaatctggattccattatattggttttccttgaggagattccagattataaactgaaccatgcactctgtttgcgaagaggaatgtttaaatctcactgcatcttgaactggccagttcagaaagaacggataggtgcctttcgtcataaattgcaagtagcacttggatccaaaaactctgtacattaaatttatttaaatattcaattagcaaaggagaaactttctcaatttaaaaagttctatggcaaatttaagttttccataaaggtgttataatttgtttattcatatttgtaaatgattatattctatcacaattacatctctt

SEQ ID NO: 4517 - DNA, 581 bp, Homo sapiens
gagcctttgtgctctcaccgccttcatgggggcgacctggtggtgtcctaccccttcgacttctccaagcacccccaggaggagaagatgttttctcccacgcccgacgagaagatgttcaagctgctgtccagagcctacgctgacgtccaccccatgatgatggacaggtcggagaataggtgtggaggcaatttcctgaagagggggagcatcatcaacggggcggactggtacagcttcacgggaggcatgtccgatttcaactacctgcacaccaactgctttgagatcacggtagagctgggctgtgtgaagttcccccccgaggaggccctgtacacactctggcagcacaacaaggagtcactcctgaatttcgtggagacggtgcaccggggcatcaaaggtgtggtgacagataaattcggcaagccagtcaaaaacgcccggatctcagtcaaaggcattcgccacgacatcaccacagccccagatggtgactactggagactgctgcccccaggtatccacattgtcattgcccaagcccctggctacgccaaagtcatcaagaaagt

SEQ ID NO: 4518 - DNA, 500 bp, Homo sapiens
ggatcgaggcgtcccggagcccacggtggtcatggctgccagagcgctctgcatgctggggctggtcctggccttgctgtcctccagctctgctgaggagtacgtgggcctgtcccagcaagggctctggcagctgacagggctttgtctgggacagctgcaaaccagtgtgccgtgccagccaaggacagggtggactgcggctacccccatgtcacccccaaggagtgcaacaaccggggctgctgctttgactccaggatccctggagtgccttggtgtttcaagcccctgcaggaagcagaatgcaccttctgaggcacctccagctgcccccggccgggggatgcgaggctcggagcacccttgcccggctgtgattgctgccaggcactgttcatctcagcttttctgtccctttgctcccggcaagcgcttctgctgaaagttcatatctggagcctgatgtcttaacgaataaaggtcccatgctccacccg

SEQ ID NO: 4519 - DNA, 597 bp, Homo sapiens; identical to SEQ ID NO: 3416

SEQ ID NO: 4520 - DNA, 425 bp, Homo sapiens; identical to SEQ ID NO: 3417

SEQ ID NO: 4521 - DNA, 494 bp, Homo sapiens
cttatatatgtataagtggtatgtgatataaatcgtgtgtttcatatgcataatggaatttaacgtaattgtgaataggaagtaggtatcctagtttagtagtggttacattatcaggcccatcccagatgtttgtgatgtcctgaaacaatttaaaaggagacccacagagctaatgtttatccatttaaaaggtataaatcaaaataacaaattatctaaaaaaaatctatcctgtacatgtgaagatctaggctcgcctccatgttactccctttctcttcctacctgtggctcatgccatgccatgaagtgcctagggtacatatgtgaacattccagccttcagcataagtggtagtccaaattttctttaagcagctgctctccaagacagggccctggaaaggcccacacatacagcccagggctgcccagggctgttggactgtcatttcaaggctcattgtccccagacagggatctgggccctc

SEQ ID NO: 4522 - DNA, 166 bp, Homo sapiens
  misc_feature 87: n = A,T,C or G
tgccgaaatagcttcagagtaattatgaattgccttccaaaaaccactgttttgcacttgcctgcaagaataggaaaaacaaaaggnctgtaaggtggcaggatggcagaaccaaacaagagtagtacaccttggagttttttcgaaatatgggttgggtttttgg

SEQ ID NO: 4523 - DNA, 620 bp, Homo sapiens; identical to SEQ ID NO: 646

SEQ ID NO: 4524 - DNA, 353 bp, Homo sapiens
caggttcactgggaccagggctacaggcacagagtctcctggaaaaggagaggggaccctgccaaagatgaggctccagctgccctggggggagggtggtggccattactagagggggcctgggtcctctccccaggggctgccagcatccaggccaggaagcctggagccaagaaccttctggctctgagggagcaagagctggcaggcggcagggctggcacagacagacggaagcagaaaggacagtttggctgctgtgtctgctgcgcacgccccctccccggacagcacctgccacctagaaactttcttagcaaaaaaattaataaaaacaaatccattgtcctctt

SEQ ID NO: 4525 - DNA, 67 bp, Homo sapiens
atcgcctcgggggacggagcggaggatacagttctggaaaacaaggcagaagtgatagttcaagtaa

SEQ ID NO: 4526 - DNA, 366 bp, Homo sapiens
agacccccgcgcaaatcctagtgcattcctttgatgagaaaacaaggaagatttcctttcgtattatgatcttgttcactttctgtaattttctgttaagctccatttgccagtttaaggaaggaaacactatctggaaaagtaccttattgatagtggaattatatatttttactctatgtttctctacatgtttttttctttccgttgctgaaaaatatttgaaacttgtggtctctgaagctcggtggcacctggaatttactgtattcattgtcgggcactgtccactgtggcctttcttagcatttttacctgcagaaaaactttgtatggtaccactgtgttggttatatggtgaatctg

SEQ ID NO: 4527 - DNA, 105 bp, Homo sapiens
ccctgccgcaccacagtgccaatgcttgtgaggacacatgcccttcgggagccttccagaacaggagggaagacaaagagaaaactttcttcccttctactaaaa

SEQ ID NO: 4528 - DNA, 84 bp, Homo sapiens
atacttcatccctacctttcacctggtagccagagccaaaacactggggattgacatcatggatgcctcttaccttgtttctgt

SEQ ID NO: 4529 - DNA, 249 bp, Homo sapiens; identical to SEQ ID NO: 3421

SEQ ID NO: 4530 - DNA, 396 bp, Homo sapiens
gctcgggaattcgaattctgacatcgctggccttcttggggacatgcttttgctcaggtgacctgttccagcccaggcagagatcaggtgggcagaggctggcagtgctgattcagcctggccatccccagaggtgacccaatgctcctggagggggcaagcctgtatagacagcacttggctccttaggaacagctcttcactcagccacaccccacattggacttccttggtttggacacagtgctccagctgcctgggaggcttttggtggtccccacagcctctgggccaagactcctgtcccttcttgggatgagaatgaaagcttaggctgcttattggaccagaagtcctatcgactttatacagaactgaattaagttattgattttt

SEQ ID NO: 4531 - DNA, 636 bp, Homo sapiens
gcagccaagtcgaaagagagctagctcagaaaagaaaagagctggaaaagcgtctgcaggatgtcagcgggcagctgagcagcagcaagaagcccgcccggaaagagaagcccggctcagcaccctcagggggcccgtccaggctcagcagcagcagctcctccgagtctgggagcagcagctccagcgggtccagctctgacagcagtgactcagaatgaactggcttcggacagaacaggacagatggatgtcgcacacgccgagactctgccgtacccctctgtggttcatattactacttctgttccatggtgtgcaggtctgcttcttaattcagtgttatgatatcttccagtttttgctttcataggtcagagatctatcttgtgtgtgcgttagacttgatgagaaggtgtgaactctgcagaaagtctcttcttcatcactgaattcagtcacttggagatgacaacttcaaatgctaacccgatgaccccagaaaaccgtgtgagattcgtaccgaagaaccttgtggaatccctttgcttaggcccaacctggtcgatagctcgagaaagaattttttccaaggaaatgtctcggatatgggtactgtatttgaaagctgttagc

SEQ ID NO: 4532 - DNA, 1448 bp, Homo sapiens
  misc_feature 410, 1096, 1134, 1433: n = A,T,C or G
attgattaaaaggtgacctttcttattggactgataagacaaaaatatagattccaaatctattgacatatgatatcacatccacaaatgtttgcctatttttgtagcattattttggttgcaaagtctcttagggaatgcacaaaaataatacaaccttaaaaatcagactagaagatggaatataagtggtttccttgtaatttttttttaagcttggagaggtaataacacatctttgaattcaaactgaggactgctgcttaatggtgcttttacagggtggttctaaaatttttgagagtcaggtattgctttctctgactgtttaattcaccactggcacgtgtttcctatcctcaagcataagtttaaaagattacaaacctcatgctgctcagttttttctntccagtaaatcagatgcatggtttctctaaatttacatatagaaaatcgagatgtggtgggtattagactaacacttcagtgataggaagaagagactgatttctcatatttgtgtaaaacattctcttacctaactaccatctggtccacattaatttcctctcatagccatagctttccattaccaatgagttttccatgtattcacagcatatgggccaggaaatctttctacagagaatgtgtcccttaggcatatatttcccctagattaccgtattaagaaatgttctccctaaaccatacttatggcattaccataaaattgcctcttgaacacagttaaattgaaagtgctcaaaatgcatatcaattcaggtaaaagaaatcttgctacttggaggggaggtattttttattcttccccactttctctttctaactccctacaaagctatttctaattatttgcttatgctgggcactgaattttctcttaggctgaccatatattttattaaagtagtcttgaattcaggagtggaaaaaaaaaagttatgttttagacctcaatgtaagctgaaaggaaataaaggaacttctatatttccatttctcaggctgattttccttcccctgttctcttatctgtatcatgacatgagacgtgaacctcagaaatgtnaaaacaaaaagtcctagaataaagcattcccttgaatnttaaatgaacatgcttttagcagcctggatacgaagcagactattttcaacaaattgaatgtttccccacttgtgtgagagccaaacaagtgccatacagaaagggacctcttcaatgttaccaaagctttgtggcagcatttaagtgtggtggcgccatagaagtcactatagcatggacgagccacttggcttgctttttcctgctaatcaaagttttaagaagataaaaagctatctttgttatatatgttttgtctaatttgcaatattacagtctcctggggggaaatccaacntccaataataattgt

SEQ ID NO: 4533 - DNA, 607 bp, Homo sapiens; identical to SEQ ID NO: 3424

SEQ ID NO: 4534 - DNA, 572 bp, Homo sapiens; identical to SEQ ID NO: 3425

SEQ ID NO: 4535 - DNA, 357 bp, Homo sapiens; identical to SEQ ID NO: 3426

SEQ ID NO: 4536 - DNA, 574 bp, Homo sapiens; identical to SEQ ID NO: 3427

SEQ ID NO: 4537 - DNA, 548 bp, Homo sapiens
tcatgatgaaggtgggacacctctcggagccactaatgaaccgcctggaagacaagtgcctggagttggtggagcactttggccccaatgagctgcggaaggtgctggtgatgctggcagctcagagccggcggtccgtgcccttgctgcgggccatctcctaccacctggtgcagaagcccttctctctgacgaaagatgtgctcttggacgtggcctatgcctatggcaaactcagctttcaccagacccaggtgtcccagcgcctggccaccgacctgctatccctcatgcccagcctgacttctggtgaggtggcccactgtgccaagtccttcgccttactcaagtggctcagcctgcccctgtttgaggcctttgcccagcacgtcctgaacagagcgcaggacatcaccctgccccacctgtgcagcgtacttctggcttttgcgcgtctgaacttccatccagaccaagaggatcagttcttcagcctggtacatgagaagctggggtcagagctgccaggcctggagccagccctgcag

SEQ ID NO: 4538 - DNA, 349 bp, Homo sapiens
  misc_feature 162: n = A,T,C or G
gcagttgaaaaattgaaggatttagagctagaaggcatcactggagcagaaagaaacagcatagccttcaggtcaacttgatactcttcccccatctcattgcttctcactagaatagccacattcataattggaagcctagccagctcaggccaaagttantcattagtccaagggaaaaatgaccgaaaaaggacagcatagtgagttttgtgtaaaagctcatttaaagatcgtcttatttggagatggtgtgccccgcattttagtgttacaatgtatttgagagctgatgctgataataaatggctattttattaaatgctctagtttggcaaaattaaaagtt

SEQ ID NO: 4539 - DNA, 304 bp, Homo sapiens
agagattctttattagttgggcattctttatgaccttttctataaaacagtaaggacattaaaatgtaagatgcatgacaaaaatataagtggagaggctcattgtagttaacctatattaagtaatgtttaaggtaggtgttcagagtaatacttttctacattatactgagagaaagaaattataaattaaagtatatcaattattttactaattttactgttacgtaataaaatgcaatatatttaaaaattgttagattatgtgtgaacttaacttatattttatttacttacttaactt

SEQ ID NO: 4540 - DNA, 393 bp, Homo sapiens
agatactacctgtggcaagaatgctgcctaccagttaactgctggtcctaccacagtcaaagtattcctcattaaagagagaatctcaggttctcactggaggcactgtgcatattttcaaccagatcaccaggagctgagatcttcttcagtccctagccaggaatacccatttgatttccagggtgccatctaatcctgggctgtacatgtggatatggacttgaggcccacctctgtgtccaagtggattgagcatatatgcctaggaggagatagactgttaatcgttggattttgattttttttttttatgcctgcaaataatcaaaagtaaaacgggagtaccctatttttcggggagcagggggaaaactttccctcctacccagg

SEQ ID NO: 4541 - DNA, 259 bp, Homo sapiens; identical to SEQ ID NO: 657

SEQ ID NO: 4542 - DNA, 342 bp, Homo sapiens; identical to SEQ ID NO: 3430

SEQ ID NO: 4543 - DNA, 188 bp, Homo sapiens
ctgcatcagtaattttaataaagaaaagcatgctctgagagaaagctcgctccttggtctgcagtcctttaaacaaagcagtgcagttcttagccaagggtaagtactgcaactgtcgagagcatcttgtcttccacacagttgggtgactctccgttttgacacaaagataagccttgcccttgttt

SEQ ID NO: 4544 - DNA, 500 bp, Homo sapiens
tgtccaacttcatcaaggcatggtcagctacagcatgaaccctgtggacctgttcgaggccaacgacctgtttgagagtgggaacatgacgcaggtgcaggtgtctcttctcgccctggctgggaaggccaagactaaggggctgcagagcggggtggacattggcgtcaagtactcggagaagcaggagcggaatttcgacgatgccaccatgaaggctggccagtgcgtcatcgggctgcagatgggcaccaacaaatgcgccaaccagtcgggcatgactgcgtacggcacgaggaggcatctctatgaccccaagaaccatatcctgccccccatggaccactcgaccatcagcctccagatgggcacgaacaagtgcgccagccaggtgggcatgacggctcccgggacccggcggcacatctatgataccaagctgggaaccgacaagtgtgacaactcctccatgtccctgcagatgggctacacgcagggcg

SEQ ID NO: 4545 - DNA, 292 bp, Homo sapiens
acagccgccaagctggggctgcctcccctgacgcccgagcagcaggaggcccttcagaaggccaagaagtacgccatggagcagagcatcaagagtgtgctggtgaagcagaccatcgcgcaccagcagcagcagctcaccaacctgcagatggcggctcagcggcagcgggcgctggccatcatgtgccgcgtctacgtgggctctatctactatgagctgggggaggacaccatccgccaggcctttgccccctttggccccatcaagagcatcgacatgtcctgggact

SEQ ID NO: 4546 - DNA, 450 bp, Homo sapiens
cggcctacctcctgttgcgggcgcggttcctggcagccttcaccctccctgcgctcctggccaccctggccccccaaggcgtccgcaccaccctctcagtaccttcgagggtgggctctgagagtgaggatgaagacctcctgagtgagctggaacttgcagacagggacgggcagccgggctgcacgacagccacatgccccattcagggagccccagactctggtaaatgctctgcttcctcctgcctggatacttctaatgaccctgacgacctggacgtgctcagaacccggcatgccaggcacacccggaagcggaggcggctggtgtgagcagcaggacaagcactttctcagaagcccgtggccctgctgacgagagacagcccacccccagcctgcatgagaggcagccagaggccaggtatctgctggccgctgactgacc

SEQ ID NO: 4547 - DNA, 497 bp, Homo sapiens; identical to SEQ ID NO: 3431

SEQ ID NO: 4548 - DNA, 525 bp, Homo sapiens
gtttcctacctatatagattcaactggaaccactgtggagagatggcacctgcctgcaaacggcatttcatccaggacacctgcctctacgagtgctcccccaacttggggccctggatccagcaggtggatcagagctggcgcaaagagcgggtactgaacgtgcccctgtgcaaagaggactgtgagcaatggtgggaagattgtcgcacctcctacacctgcaagagcaactggcacaagggctggaactggacttcagggtttaacaagtgcgcagtgggagctgcctgccaacctttccatttctacttccccacacccactgttctgtgcaatgaaatctggactcactcctacaaggtcagcaactacagccgagggagtggccgctgcatccagatgtggttcgacccagcccagggcaaccccaatgaggaggtggcgaggttctatgctgcagccatgagtggggctgggccctgggcagcctggcctttcctgcttagcctggccctaatgctg

SEQ ID NO: 4549 - DNA, 520 bp, Homo sapiens
gattctggggttggggcttccctaaccaggtccaacaggcaccgactgagatggcacagtttccagagctcacatcggccaagcctcaactctgtatcactacagattaactgccagtctgtggcccagatgaacctgctgcagaaatactcactcctaaagctaacggccctgctggagaaatacacaccttctaacaagcatggttttagctgggccgtgcccaagttcatgaagaggatcaaggttccagactacaaggaccggagtgtgtttggggtcccactgacggtcaacgtgcagcgcacaggacaaccgttgcctcagagcatccagcaggccatgcgatacctccggaaccattgtttggatcaggttgggctcttcagaaaatcgggggtcaagtcccggattcaggctctgcgccagatgaatgaaggtgccatagactgtgtcaactacgaaggacagtctgcttatgacgtggcagacatgctgaagcagtattttcgagatcttc

SEQ ID NO: 4550 - DNA, 508 bp, Homo sapiens
tgcaagatacaaggctttagagagcagcataaatgttgacatgggacatttgctcatggaattggagctcgtgggacagtcacctcatggaattggagctcgtggaacagttacctctgcctcagaaaacaaggatgaattaagttttttttaaaaaagaaacatttggtaaggggaattgaggacactgatatgggtcttgataaatggcttcctggcaatagtcaaattgtgtgaaaggtacttcaaatccttgaagatttaccacttgtgttttgcaagccagattttcctgaaaacccttgccatgtgctagtaattggaaaggcagctctaaatgtcaatcagcctagttgatcagcttattgtctagtgaaactcgttaatttgtagtgttggagaagaactgaaatcatacttcttagggttatgattaagtaatgataactggaaacttcagcggtttatataagcttgtattcctttttctctcctctccccatgatgt

SEQ ID NO: 4551 - DNA, 515 bp, Homo sapiens
ccaagtgaactgtctttccaggactttgagtacccagactatgatgactacagagcagaggctttccttcaccaacagaagaggatggagtgctacagcaaggccaaagaagcttatcggatagggaaaaaaaatgtcgccaccttttatgcccagcagggtactcttcatgagcagaagatgaaagaagccaatcaccttgctgccatagagatctttgagaaagtcaatgcttcgctgctgccacagaatgttttagacctccatgggctgcatgtggatgaagctctagaacatttgatgagagttttagagaagaagactgaagaatttaagcagaacggtgggaagccctatttgtctgtgattacggggagaggaaaccacagccagggaggagttgctcgcatcaaaccagctgtcattaagtacctcataagccatagcttcaggttctctgaaattaaaccagggtgcttgaaagtcatgctaaagtaaaataaacatccttgaat

SEQ ID NO: 4552 - DNA, 253 bp, Homo sapiens
  misc_feature 220, 221, 239, 242, 243: n = A,T,C or G
ggatttttgaaactttacattctttacggttaagcaagatgtacagctcagtcaaagacactaaattcttcttagaaaaatagtgctaaggagtatagcagatgacctatatgtgtgttggctgggagaatatcatcttaaagtgagagtgatgttgtggagacagttgaaatgtcaatgctagagcctctgtggtgtgaatgggcacgttaggttgtgnnttaaaaattgccgtttcngcnnaattttagct

SEQ ID NO: 4553 - DNA, 513 bp, Homo sapiens; identical to SEQ ID NO: 661

SEQ ID NO: 4554 - DNA, 632 bp, Homo sapiens
acagcacagacagattgacctattggggtgtttcgcgagtgtgagagggaagcgccgcggcctgtatttctagacctgcccttcgcctggttcgtggcgccttgtgaccccgggcccctgccgcctgcaagtcggaaattgcgctgtgctcctgtgctacggcctgtggctggactgcctgctgctgcccaactggctggcaagatgaagctctccctggtggccgcgatgctgctgctgctcagcgcggcgcgggccgaggaggaggacaagaaggaggacgtgggcacggtggtcggcatcgacctggggaccacctactcctgcgtcggcgtgttcaagaacggccgcgtggagatcatcgccaacgatcagggcaaccgcatcacgccgtcctatgtcgccttcactcctgaaggggaacgtctgattggcgatgccgccaagaaccagctcacctccaaccccgagaacacggtctttgacgccaagcggctcatcggccgcacgtggaatgacccgtctgtgcagcaggacatcaagttcttgccgttcaaggtggttgaaaagaaaactaaaccatacattcaagttgatattggaggtgggcaaacaaagacatttgctcctga

SEQ ID NO: 4555 - DNA, 585 bp, Homo sapiens
tcccgttcagccgttgggcccaggctttcctcccctccagtgtgaacactgcagtcccggtgtggtggctccccatgcaggacgggccaggctgggagtgccgccttcctgtgccaaattcagtggggactcagtgcccaggcccttggccacgagctttggccttggtctacctgccaggccaggcaaagcgcctttacacaggcctcggaaaacaatggagtgagcacaagatgccctgtgcagctgcccgagggtctccgcccaccccggccggactttgatccccccgaagtcttcacaggcactgcatcgggttgtctggcgcccttttcctccagcctaaactgacatcatcctatggactgagccggccactctctggccgaagtggccgcaggctgtgcccccgagctgcccccaccccctcacagggtccctcagattataggtgcccaggctgaggtgaagaggcctgggggccctgccttccgggcgctcctggaccctggggcaaacctgtgacccttttctactggaatagaaatgagttttatcatctttgaaaaataattcactcttgaa

SEQ ID NO: 4556 - DNA, 586 bp, Homo sapiens
ggtgcgccagatgcccgggaaaggcctggagtggatggggatcatctatcctggtgactctgatatcaaatacagcccgtccttccaaggccaggtcaccatctcagccgacaagtccatcagcaccgcctacctgcagtggagcagcctgaaggcctcggacaccgccatgtattactgtgcgagacagtctgtcagctcctggtaccttgactactggggccagggaagcctggtcaccgtctcctcagcatccccgaccagccccaaggtcttcccgctgagcctctgcagcacccagccagatgggaacgtggtcatcgcctgcctggtccagggcttcttcccccaggagccactcagtgtgacctggagcgaaagcggacagggcgtgaccgccagaaacttcccacccagccaggatgcctccggggacctgtacaccacgagcagccagctgaccctgccggccacacagtgcctagccggcaagtccgtgacatgccacgtgaagcactacacgaatcccagccaggatgtgactgtgccctgcccagttccctcaactccacctaccccatctccc

SEQ ID NO: 4557 - DNA, 576 bp, Homo sapiens
actgaattgaaataaggaaataggattttctgtcctggtttttgaagattgttcttgattcccttgattcccaggagagattctctgacattcacgtgtcagccactttggcacggaagccttacagtgtggggaaccaaaacttcgtgtctcctctttccccgatgccatcagcatagacttgacttccttaaaccgagagttttgatgtggccttggcaaccctaaaatcagctgtgttaggtaacaaaactcaggctttctgttgatgacatcgagatggtgtcacttaaaagagccaagattcctgttttcagtttgtggattcatcctgctggttttactttagtccctccatgtcaaagtgggcctgagaaaagctcatacatgcctcatgtgaagtgtccaccctctctgaaaatctttcttgttcaaaacagcaacgacatatcttgttaacttttacggtgacttttggaggaggggagtttggaaattgtaaaatgttatagattgttgcctatttcctgctgaaagtaaatgtttttaaaaagtatcatataaagctgaatacaa

SEQ ID NO: 4558 - DNA, 526 bp, Homo sapiens
ccccttgtctgcagagatggctcccaatgcttcctgcctctgtgtgcatgtccgttccgaggaatgggatttaatgacctttgatgccaacccatatgacagcgtgaaaaaaatcaaagaacatgtccggtctaagaccaaggttcctgtgcaggaccaggttcttttgctgggctccaagatcttaaagccacggagaagcctctcatcttatggcattgacaaaaagaagaccatccaccttaccctgaaagtggtgaagcccattgatgaggagctgcccttgtttcttgtggagtcaggtgatgaggcaaagaggcacctcctccaggtgcgaaggtccagctcagtggcacaagtgaaagcaatgatcgagactaagacgggtataatccctgagacccagattgtgacttgcaatggaaagagactggaagatgggaagatgatggcagattacggcatcagaaagggcaacttactcttcctggcatcttattgtattggagggtgaccaccctgggca

SEQ ID NO: 4559 - DNA, 511 bp, Homo sapiens
aagtggaccaggaggaaccacatgttgaagaacaacagcagcagacaccagcagaaaataggcagagtctgaagaaatggagacctctcaagctggatccaaggataaaaagatggaccaaccaccccaagccaagaaggcaaaagtgaagaccagtactgtggacctgccaatcgagaatcagctattatggcagatagacagagagatgctcaacttgtacattgaaaatgagggtaagatgatcatgcaggataaactggagaaggagcggaatgatgctaagaacgcagtggaggaatatgtgtatgaaatgagagacaagcttagtggtgaatatgagaagtttgtgagtgaagatgatcgtaacagttttactttgaaactggaagatactgaaaattggttgtatgaggaatggagaagaccagccaaagcaagtttatgttgataagttggctgaattaaaaaatctaggtcaacctattaagatacgtttccaggaatctga

SEQ ID NO: 4560 - DNA, 215 bp, Homo sapiens
  misc_feature 202: n = A,T,C or G
gttacttacagtagcacagaaatgttagcatatttatttaaatagtcctgcagcagagaccctgcgattgtaaagtgatttaagtatttctgggtagtgtttgtgatttacggatttgttactgaaaaacaaaaaaaatcactactgtgaatttactactatgtaaccttgtggtcgtatttcattataaataaaataaganttgctcttctgcc

SEQ ID NO: 4561 - DNA, 551 bp, Homo sapiens
aaagcactatggtgtgtgtggacaacagtgagtatatgcggaatggagacttcttacccaccaggctgcaggcccagcaggatgctgtcaacatagtttgtcattcaaagacccgcagcaaccctgagaacaacgtgggccttatcacactggctaatgactgtgaagtgctgaccacactcaccccagacactggccgtatcctgtccaagctacatactgtccaacccaagggcaagatcaccttctgcacgggcatccgcgtggcccatctggctctgaagcaccgacaaggcaagaatcacaagatgcgcatcattgcctttgtgggaagcccagtggaggacaatgagaaggatctggtgaaactggctaaacgcctcaagaaggagaaagtaaatgttgacattatcaattttggggaagaggaggtgaacacagaaaagctgacagcctttgtaaacacgttgaatggcaaagatggaaccggttctcatctggtgacagtgcctcctgggcccagtttggctgatgctctcatcagttctccg

SEQ ID NO: 4562 - DNA, 601 bp, Homo sapiens
tccagtggagccccaaaatagaagcaagatgaatattccattccgcattggcaatgccaaaggagatgatgctttagaaaaaagatttcttgataaagctcttgaactcaatatgttgtccttgaaagggcataggtctgtgggaggcatccgggcctctctgtataatgctgtcacaattgaagacgttcagaagctggccgccttcatgaaaaaatttttggagatgcatcagctatgaacacatcctaaccaggatatactctgttcttgaacaacatacaaagtttaaagtaacttggggatggctacaaaaagttaacacagtatttttctcaaatgaacatgtttattgcagattcttcttttttgaaagaacaacagcaaaacatccacaactctgtaaagctggtgggacctaatgtcaccttaattctgacttgaactggaagcattttaagaaatcttgttgcttttctaacaaattcccgcgtattttgcctttgctgctactttttctagttagatttcaaacttgcctgtggacttaataatgcaagttgcgattaattatttctggagtcatgggaacacacagcac

SEQ ID NO: 4563 - DNA, 247 bp, Homo sapiens
attcgaattcgttacttacagtagcacagaaatgttagcatatttatttaaatagtcctgcagcagagaccctgcgattgtaaagtgatttaagtatttctgggtagtgtttgtgatttacggatttgttactgaaaaacaaaaaaaatcactactgtgaatttactactatgtaaccttgtggtcgtatttcattataaataaaataagaattgctcttctgccaaaaaaaaaatgccccaaaaat

SEQ ID NO: 4564 - DNA, 552 bp, Homo sapiens
caacaagaatactacccctatgtgtactacaagattgattgcaacttgctggaattcaagtgaaaatgggctcctcccccgacaatcctgtccttgtgtttgtgtgtgctaacagaaataagttgcagtatggtcgtacttttaactctagtatcctttgcttgcttcttaccccctttcctaggtgaattctcccacagtggtctgtatctcaacattttctttttaaaggaaaaaatatatatatatagtttctttttattgatcaggtctgtaaatgtgtactaaaaaaatcagagtttatttataaacagaatagtttatttaaagagaaggtctcttccttattgatatcatggtatgcattaattccatttgttactattgtgcacaaaagccctgttcacaggggaatggtgtaaacatttatactgttttgttcactgtatttagtagacataactgttgaatagttactgaatcatgatgtaaagaatatgtgaccatcttcaggtatgggatttctgaacgtttcaaatttcaatcaatgag

SEQ ID NO: 4565 - DNA, 537 bp, Homo sapiens; identical to SEQ ID NO: 3437

SEQ ID NO: 4566 - DNA, 538 bp, Homo sapiens; identical to SEQ ID NO: 3438

SEQ ID NO: 4567 - DNA, 466 bp, Homo sapiens; identical to SEQ ID NO: 3439

SEQ ID NO: 4568 - DNA, 296 bp, Homo sapiens
  misc_feature 284: n = A,T,C or G
gggatcagccaggggccagcatgagccggagggagggaagtctggaagacccccagactgattcctgcgtctgcatggtaactccgtctgagtctaccattttcttgctctccctccttccttgggcctgcctcagttccctttggcctccccctttacccagctcttggggtgtctctgttttttccatccccacttcctgccttctcgtggccctgtgtgagcacatgtgtacatctcagccttatctcaaggaggtgacaccttctctccttgtccccatntggccgtctctc

SEQ ID NO: 4569 - DNA, 456 bp, Homo sapiens
ctaccctttgcagtgcagtgcagcaaacctcactgtgtccaatacccgagacagttcttctcaccccgcattctatgtggaccaaaacatccatgagcaactggtagatttgatgttacaagccatccagggagcccattttgaagatgttactgagtttctggaagaggtcattgaagccttgatattggatgaggaagttagaacatttccagaagtcatgattccagtgtactgatattttattgggccgaataaaagatctagagctctgtcagatccttttgtatgcatatctggatattcttctctatttcactacgcaaaaagatatggcaaaggtttttgtagaatacattcagcccagggaccctaccaatgggcaaatgtaccataagaccttgctgggagtaattctgagtatctcctgcttattaaagactccgggtgttgtat

SEQ ID NO: 4570 - DNA, 273 bp, Homo sapiens
  misc_feature 51, 85, 170, 178, 201, 204, 234, 235, 243: n = A,T,C or G
attttcatggagagactgcaagagtctatatgtgtttcatccttatttganaaggaatccttgactttgttaggagctctatatntctcctctcatagaaatgccatatattatcaggagactgttaatatctcatgtggaggacccatttgtgcaagcatatctttaanattaaatnttttcaactattgaacatattcntanttttaaataaaggctacagtaaaccattannctggcagnctgtttgtgataggtgcatgtcaagagtgg

SEQ ID NO: 4571 - DNA, 258 bp, Homo sapiens
gtttggccagatttgcccaacataacaatagataaaactctaacggaagatgaagctgttaatgcttccagagctcatgtagctttcccagatttcttcaggacttccacagcagagtggtgggccagagaaattgtggacttttacaatgaaaagatgaagtttgatggtttgtggattgatatgaatgagccatcaagttttgtaaatggaacaactactaatcaatgcagaaatgacgaactaaattatccacct

SEQ ID NO: 4572 - DNA, 450 bp, Homo sapiens; identical to SEQ ID NO: 667
  misc_feature 379: n = A,T,C or G

SEQ ID NO: 4573 - DNA, 212 bp, Homo sapiens; identical to SEQ ID NO: 668

SEQ ID NO: 4574 - DNA, 465 bp, Homo sapiens; identical to SEQ ID NO: 3441

SEQ ID NO: 4575 - DNA, 482 bp, Homo sapiens
ttaccaaagaagtggtgacctccgaagatggttctgactgtcccgaggcaatggatttaggcacattgtctggcataggtactctggatgggttccgccataggcaccctgatgaagctgccttcttcgacactgcctcaactggaaaaacattcccaggtttcttctcacctatgttaggagagtttgtcagtgagactgagtctaggggctcagaatctggcatcttcacaaatacaaaggaatccagttctcatcaccctgggatagctgaattcccttcccgtggtaaatcttcaagttacagcaaacaatttactagtagcacgagttacaacagaggagactccacatttgaaagcaagagctataaaatggcagatgaggccggaagtgaagccgatcatgaaggaacacatagcaccaagagaggccatgctaaatctcgccctgtcagaggtatccacacttctcctttgggg

SEQ ID NO: 4576 - DNA, 492 bp, Homo sapiens; identical to SEQ ID NO: 3442

SEQ ID NO: 4577 - DNA, 566 bp, Homo sapiens; identical to SEQ ID NO: 3443

SEQ ID NO: 4578 - DNA, 528 bp, Homo sapiens; identical to SEQ ID NO: 3444

SEQ ID NO: 4579 - DNA, 496 bp, Homo sapiens; identical to SEQ ID NO: 3445

SEQ ID NO: 4580 - DNA, 259 bp, Homo sapiens; identical to SEQ ID NO: 68
  misc_feature 157, 239: n = A,T,C or G

SEQ ID NO: 4581 - DNA, 538 bp, Homo sapiens; identical to SEQ ID NO: 3447

SEQ ID NO: 4582 - DNA, 522 bp, Homo sapiens
cccagctgtgacagtggccatttctgcagcctccaggcctcacctttatggaacaccttcccgctgctggctccaaccagaaaagggatttatatggggcttccttggacctgtctgcgccatcttctctgtgaatttagttctctttctggtgactctctggattttgaaaaacagactctcctccctcaatagtgaagtgtccaccctccggaacacaaggatgctggcatttaaagcgacagctcagctgttcatcctgggctgcacgtggtgtctgggcatcttgcaggtgggtccggctgcccgggtcatggcctacctcttcaccatcatcaacagcctgcagggtgtcttcatcttcctggtgtactgcctcctcagccagcaggtccgggagcaatatgggaaatggtccaaagggatcaggaaattgaaaactgagtctgagatgcacacactctccagcagtgctaaggctgacacctccaaacccagcatggtaagatcacgcattgctcc

SEQ ID NO: 4583 - DNA, 275 bp, Homo sapiens
aagggttgcagtaaagggttgtctcacgtcttctgctttaaaagcctataaatatatgacctgaaaactccagttacataaaggatctgcagctatctaaggcttggttttcttactgtcatatgatacctgggtctaatgaactctgctgagatcacctcaagtttctgcggttggtaaagagaacaagggaagaacaaacatcccttttattgctccaaatggtgatttaatccctacatggtgctgggtggacaatgtgtcactgtcacatg

SEQ ID NO: 4584 - DNA, 281 bp, Homo sapiens
catccctctgctctctggcctccagcctcccagcagcatggctttcaccggcaagttcgagatggagagtgagaagaattatgatgagttcatgaagctccttgggatctccagcgatgtaatcgaaaaggcccgcaacttcaagatcgtcacggaggtgcagcaggatgggcaggacttcacttggtcccagcactactccgggggccacaccatgaccaacaagttcatgttggcaaggaaagcaacatacagaccaatggggggcaagacgttcaagg

SEQ ID NO: 4585 - DNA, 479 bp, Homo sapiens; identical to SEQ ID NO: 3448

SEQ ID NO: 4586 - DNA, 502 bp, Homo sapiens; identical to SEQ ID NO: 672

SEQ ID NO: 4587 - DNA, 599 bp, Homo sapiens; identical to SEQ ID NO: 3450

SEQ ID NO: 4588 - DNA, 373 bp, Homo sapiens
ccacctccacgggtggtctcggagctgctgcagggtggtacctccaggaagccatcagacccagctcccaaagtgatggacttcaaggaaaaacccagctctccggccaaaggctcggaaggtcctgggaaaaactgcgtgccagtcatccagcggactttcgctcactcgagtggggagcagagcggcagcgacacggacacagacagtggctatggaggagaatcggagaagggcgacttgcgcagtgagcagccgtgcttcaaaagtgaccacggacgcaggttcacgatgggagaaaggatcggcgcaattaagcaagagtccgaagaaccccccacaaaaaagaaccggatgcagctttcggatgatg

SEQ ID NO: 4589 - DNA, 371 bp, Homo sapiens; identical to SEQ ID NO: 3451
  misc_feature 264: n = A,T,C or G

SEQ ID NO: 4590 - DNA, 155 bp, Homo sapiens
  misc_feature 17, 38, 95, 101, 116: n = A,T,C or G
cagccccaggaaatgcncagtttggccagggctcaggncccattgtcctggatgatgtgcgctgctcaggacacgagtcttacctgtggagctgnccccanaatggctggctctcncacaactgtggccatcatgaagatgctggtgtcatctgc

SEQ ID NO: 4591 - DNA, 612 bp, Homo sapiens; identical to SEQ ID NO: 3453

SEQ ID NO: 4592 - DNA, 478 bp, Homo sapiens
aaacaatccacctctctaaatcaatgatggaggcgtcctttttcaagcatccagacctcaccacaggccagaagcgttacctgtgcagcattgctaaaatctataatgcaaactatctgaagatgttaatgaagaggcagtacatgcacgtacttcagcacagctcacaaaagccaggtgtcctcactcatcacagaagccgccttagctcccgttactcacagaaacagcattacccttgcactacatggcgacatcaactggagagagaggactcggggtcttctgatatcgcagctgcatctgcacctgaaatgctcatacagcattccctttggcggccagtgagaaacaaagaagggataaaaactggatatgcatctaaaacaagatgtaagtcactgaagatttttagaagaccaaggaaactgttcatgcaaacagtttcttcagatgattctgaatcacacatgagtga

SEQ ID NO: 4593 - DNA, 152 bp, Homo sapiens
agcaagagaagctgacagattcaaatgttcacaaacatttatgttctattttgatagatacataaactatgtttctcattcttatatactttatattagggcatgggattaaagtcaaaatagtggaaaattagtagaaataacatatttta

SEQ ID NO: 4594 - DNA, 141 bp, Homo sapiens
ttatatattcaatgatattattcagtattcaatattatttcaaataatattaaatctcttgttcctgtatctctacatgagctgcactaataatttgaatctggaaattaaaaagtgaaacatttaccgttctcatatact

SEQ ID NO: 4595 - DNA, 256 bp, Homo sapiens
aagctcggaattcggctcgaggggaaatgctggagggatccagccagacttgctcatctccctcacagcccccaaaaaatctgcaacccagtttaccggtcgctaccattacctggggggtcgttttgtgccacctgctctggaaaagaagtaccagctgaacctgccaccctaccctgacactgagtgtgtctatcgtctgcagtgagggaaggtgggtgggtattctccccaataaagacttagagcccctctc

SEQ ID NO: 4596 - DNA, 124 bp, Homo sapiens
tctgagtcttatcgttgtactgatagaagggtcagatatccccacatggagttgagtgggagaaagagattcactagagaataactccttagagaccaatgtctgtagcaggtgtacagcatct

SEQ ID NO: 4597 - DNA, 497 bp, Homo sapiens
agtttatcatcaactctttcagtggtaaactgtggtttccccaagctgcacaggaggccagaaaccacaagtatgatgactaggaagcctactgtcatgacagtggggagacaggcagcaaagcttatgaaggaggtacagaatattctttgcgttgtaagacagaatacgggtttaatctagtctaggcaccagatttttttcccgcttgataaggaaagctagcagaaagtttatttaaaccacttcttgagctttatcttttttgacaatatactggagaaactttgaagaacaagttcaaactgatacatatacacatatttttttgataatgtaaatacagtgaccatgttaacctaccctgcactgctttaagtgaacatactttgaaaaagcattatgttagctgagtgatggccaagttttttctctggacagtaatgtaaatgtcttactggaaatgacaagtttttgcttgatttttttttttaaac

SEQ ID NO: 4598 - DNA, 575 bp, Homo sapiens
gaggtctgaagtcactttttccactcctgccttatacatttatacttctggaaccacaggtcttccaaaagcagccatgatcactcatcagcgcatatggtatggaactggcctcacttttgtaagcggattgaaggcagatgatgtcatctatatcactctgcccttttaccacagtgctgcaccactgattggcattcacggatgtattgtggctggtgctactcttgccttgcggactaaattttcagccagccagttttgggatgactgcagaaaatacaacgtcactgtcattcagtatatcggtgaactgcttcggtatttatgcaactcaccacagaaaccaaatgaccgtgatcataaagtgagactggcactgggaaatggcttacgaggagatgtgtggagacaatttgtcaagagatttggggacatatgcatctatgagttctatgctgccactgaaggcaatattggatttatgaattatgcgagaaaagttggtgctgttggaagagtaaactacctacagaaaaaaatcataacttatgacctgattaaatatgatgtgg

SEQ ID NO: 4599 - DNA, 600 bp, Homo sapiens
ctgcggctgcagaagtaccgcctgcggagtaactgcaaagatgctgtccgtgcgcgttgctgcggccgtggtccgcgcccttcctcggcgggccggactggtctccagaaatgctttgggttcatctttcattgctgcaaggaacttccatgcctctaacactcatcttcaaaagactgggactgctgagatgtcctctattcttgaagagcgtattcttggagctgatacctctgttgatcttgaagaaactgggcgtgtcttaagtattggtgatggtattgcccgcgtacatgggctgaggaatgttcaagcagaagaaatggtagagttttcttcaggcttaaagggtatgtccttgaacttggaacctgacaatgttggtgttgtcgtgtttggaaatgataaactaattaaggaaggagatatagtgaagaggacaggagccattgtggacgttccagttggtgaggagctgttgggtcgtgtagttgatgcccttggtaatgctattgatggaaagggtccaattggttccaagacgcgtaggcgagttggtctgaaagcccccggtatcattcctcgaatttcagtgcggga

SEQ ID NO: 4600 - DNA, 559 bp, Homo sapiens
gttgactctgaggccctggtgggctgcctgcggggcaagagtaaagaggagattcttgcaattaacaagcctttcaagatgatccccggagtggtggatggggtcttcctgcccaggcacccccaggagctgctggcctctgccgactttcagcctgtccctagcattgttggtgtcaacaacaatgaattcggctggctcatccccaaggtcatgaggatctatgatacccagaaggaaatggacagagaggcctcccaggctgctctgcagaaaatgttaacgctgctgatgttgcctcctacatttggtgacctgctgagggaggagtacattggggacaatggggatccccagaccctccaagcgcagttccaggagatgatggcggactccatgtttgtgatccctgcactccaagtagcacattttcagtgttcccgggcccctgtgtacttctacgagttccagcatcagcccagctggctcaagaacatcaggccaccgcacatgaaggcagaccatggtgatgagcttccttttgttttcagaagtttct

SEQ ID NO: 4601 - DNA, 570 bp, Homo sapiens
  misc_feature 526: n = A,T,C or G
tagcagtcacaccctagccactgctgggaccttgtgttccccaagagtatctgattcctctgctgtccctgccaggagctgaagggtgggaacaacaaaggcaatggtgaaaagagattaggaaccccccagcctgtttccattctctgcccagcagtctcttaccttccctgatctttgcagggtggtccgtgtaaatagtataaattctccaaattatcctctaattataaatgtaagcttatttccttagatcattatccagagactgccagaaggtgggtaggatgacctggggtttcaattgacttctgttccttgcttttagttttgatagaagggaagacctgcagtgcacggtttcttccaggctgaggtacctggatcttgggttcttcactgcagggacccagacaagtggatctgcttgccagagtcctttttgcccctccctgccacctccccgtgtttccaagtcagctttcctgcaagaagaaatcctggttaaaaaagtcttttgtattgngtcaggagttgaatttggggtgggaggatggatgcaactgaagc

SEQ ID NO: 4602 - DNA, 590 bp, Homo sapiens
ctgaatccaaagttgctaagttggacacgtctcagtggccccttttgctaaagaattttgataagctgaatgtaaggacaacacactatacacctcttgcatgtggttcaaatcctctgaagagagagattggggactatatcaggacaggtttcattaatcttgacaagccctctaacccctcttcccatgaggtggtagcctggattcgacggatacttcgggtggagaagacagggcacagtggtactctggatcccaaggtgactggttgtttaatcgtgtgcatagaacgagccactcgcttggtgaagtcacaacagagtgcaggcaaagagtatgtggggattgtccggctgcacaatgctattgaaggggggacccagctttctagggccctagaaactctgacaggtgccttattccagcgacccccacttattgctgcagtaaagaggcagctccgagtgaggaccatctacgagagcaaaatgattgaatacgatcctgaaagaagattaggaatcttttgggtgagttgtgaggctggcacctacattcggacattatgtgtgcaccttggtttgtta

SEQ ID NO: 4603 - DNA, 621 bp, Homo sapiens
ctgaagcaggttcccaagctcagaggcgcactgtgacccccagctccggcctgtcctccaacaccaagcacagcagcctggggctggcctcccaaatgagccatgagatgatacatccaaagcagacagctccaccctggccgagtccaagctgggagattcaagggacccatgagttggggtctggcagcctcccatccagggcccccatctcatgcccctggctgggacgtggctcagccagcacttgtccagctgagcgccaggatggaacacggccacatcaaagaggctgaggctggcacaggacatgcggtagccagcacacagggcagtgagggagggctgtcatctgtgcactgcccatggacaggctggctccagatgcagggcagtcattggctgtctcctaggaaacccatatccttaccctccttgggactgaaggggaaccccggggtgcccacaggccgccctgcgggtgaacaaagcagccacgaggtgcaacaaggtcctctgtcagtcacagccacccctgagatccggcaacatcaaccccagagtcattcgttctgtggagggacaagtggactcagggcagcgccaggctgaccacagcac

SEQ ID NO: 4604 - DNA, 453 bp, Homo sapiens
cttgtgaagtatagatgtggttgtggtcttagattgacagcattagagaagactggttagaacatctggtctcgctggttagtgcctcgttggctgaggactaggtgtgcatttctcctagcttttcatcaggaaatcccaaagtttccaaagctttttgtttacagaataaaacttcaaataaaaccaattcattatttgtccagaaggaagcttggctgagctggccttttaacataggaatgtatttcgttggaaacattctgaaaaatctcagagaactgaacccttacaaactttgttttccctcataaccaaagcttcaggttagaagtttagaaaaatagaatggttgggtacatgatctaaatgtttaatgctaaaggtatatcgtaagggtagtgtttgtttttgaacgataatttagaagttctcatagaaagcgtataacat

SEQ ID NO: 4605 - DNA, 612 bp, Homo sapiens; identical to SEQ ID NO: 3459

SEQ ID NO: 4606 - DNA, 425 bp, Homo sapiens
  misc_feature 209: n = A,T,C or G
ccaggccaggccctcaggaattccctggtttccactgggccacccacttgctggacagtctgagccaagtccctcctgctggagaaaagcctggaactgccaaaacaaaaaaacaaatacaaacaaacctcgtcaccacggtcaggaggaggttcagacattctgcccagaggggctggggaaagggatgggagccaggaaagatttangggcaggagacagacacgtaacaggaactcggaaggtagaacttagaattcagaacttgggtttcaattgtagaatttggaatctggaatacagaattgggaagaagaacagagatgacaaaagaccacttgaagagaggttcctaatactagacagatggagagtggcttggctgtttccccctgcatattggggttgaaaacttaaatgtgtag

(The sequence listing continues in the following parts.)
